United States Patent Application Publication US 2026/0092266 A1 - sequence listing, part 20

SEQ ID NO: 3267 - DNA, 19551 bp, synthetic construct
  misc_feature 1..19551: note = Synthetic
  source 1..19551: mol_type = other DNA
  variation 12104..12131: note = note, n is a, c, g, or t
  variation 12280..12281: note = note, n is a, c, g, or t
  variation 1851..1852: note = note, n is a, c, g, or t
atgacatttaacttcctaaggccgaaggccgataaattcttctaaatccctctaactccaaaagtcgagcgaatgcgaaacttgaataatttgcggtttaaagtattcctgcaagttagctttgccctaagtttttgacctacgtcaataaatcgagcatttttcaaagttttaccccgaaaaagtttggtgtgtacgcacacggtcgtatctttgcaccgtcaaaagacaaaggataacgacttttataagtcaacaaaaaggataatataaggtaaaaagaaaatgaaagaaaggggctgtgaagcccgtaatgattcaggattaacattaaaatttaaagaaagggtaaaaagatgaaaagaatgattttagcagtcgttgccatgctgagcatgacgatgacattcgccaagagcgaaatggcaaacatggagaacgagatgaacgcttacgagatgaacttcagcgtctactccatgaccaacgcactgaaactgaacgacgatcaggctgaggcagtagaagacatcaaccgcatcttcaacaaggagatgggtgccgctgccaaggcttcggcagacaagcgcagcgaaatgaagaacaaggctgtgaagaagaacctgagctacatgcactatgtgctgagtgagcagcagtatcacaagtacttgatctatctgaacgctacgatgatcaaccgcggattaaactaaaacgcacacgtaaaaaatactaagagagagggcaacgccgactgggtgtcgccctcttttttttcattcgattgggatatagcgaagaagaaaaagaaataaattctctctgccaaaatgacaatttttcggttatggaacaatgtttgcgatattatttgtaaacgactaaccgaatgaacaagaaacttgtatcagaacgaaatccacaacctacagaaaagcccaagccagtcgaggaggcaaaagaaactccattgtcaaccaatccccagtcatacgaacaagggcgcaagttgctgaccccgcaagaatgattctcttgccccatctatcgtccacagtgcggtcattgcctcggtgccgaaatgaaagatggtcggcgatatgtcgtttgtgactatcagagaccacgataataggagtggagtagatttacttgagcagattcctattattattcccctccaaaacctgcatctgctgaatagcaatctggttgagctttattagcctctcaccttgtgatactccatcattgataagcacagcattgatattctccatattcgacaggcatatcagttcgttgatggtggcatagtcacggatattgcctttcaaatcggaattggcctcccgccattgctttgcagtcattccgaacatagccacgtttaatacatcagcttcctcggcatatatgatacttgcttgtgctggagtgacctcttcgggtatcagatggctcttgatagcatctgtatggatgcggtagttaatcttagagagttctcttttggcagtccaccccaattgcttctgttcttcctctttcagcctttggaactcgtcaatcaagtagagtttgaaggttacactaatggcggttccaaactcaaaagcaatatccttgaaagcatacgttcctccatatcgtcccttctttacaataataccaatggcactagtcttctcaatccactcactcacgctcatgacgaaacttggcaaacccgcctgcattctaaagtggtcaaattcgaccactttaaaattgggattatgaatcatctcccaagtacctagaaactcaatggtgtatcttgtacgaatccaattcttgatgatgtcnngcacggctttcactttgtttgccattagccatatctgtaagtgatatatagtccttgtcattgtgagataagaccgttatttccgtgttctgaaccgttatctttgccatagggtaatgctaatatgattatgtgtgcaaaggtagcataaaatcatgagacaaaagaacaaaaggcgaaaaatccctcaaaagttttgttatctcgcatattatatttgtacctttgtccccgacaatgagccattaaacaggctggtggcttagcatcgggagttcattgacaagcaaatcaaagcagaatgcggaattgagaacggtctcttattcgtaactcgatttttcctcaattcctcagactgcctttatttacaaaaggttagcgattttatccaaagatatgaaataactttgtaatttatgcgaatacccttatcttatgcgccataaaattcatgttcatatcaactgtcaaagagaagaaatccaattcttttgtcggaaaacaaacaataaccaacatttaaaatcagtaattacatgaagaaaacatcatcaacgcaaagcgaggatgtatctgccaagatacattctcgtttttttgtttcgccaaaacccttcacacgcccgtaaccgtctggctgtcagccgaatgctgtgaagggtttgtatatcccacattcaggtctacctgttccctttcttccatcggatgaacataaaaaaactttcgatgttgtcacgaaacagactcatcaaaaccttttgacacgtgtcggaaacgtttttgacacgtgtcagaaggttttccgacacgtgtcaaaaggtttgagaaaagcttcatcggaacttctttccaaaggaaagcgacttaaagtcgagcggagctaatgaagaagtagttcttcgcaagcgaagcgaccaaaggtcgagcgaaaagtcgatagatttatcagctggagactcagaatgcgatactaacggcttctgactccataaggccgaaggccgatatattcttctgacttcctctaactccataagtggagcgaatgcgaaacttgaataattgtcaattgtgaattgtgaattatgaattgtcaattgtcaattgtgaattatcaattgtcaattatgaattatgaattgtgaattgtgaattatgaattatcaattatcaattacaaacaaacccttcacagcatccggctgtctttcagcgagttacgacgctgtgaagagtttgcatcaacagcaaaaaccacatattataagggaattgttttggcgttttctcacttttttcatatctttgcgaaatgaataaccaagtctaaatatggaaacaagattcaagaagaaagccaacatctttaatgtcatcgtgactgccgtgtcagccatgctgtctgtaggcatcatgctctatgccgtagcccatttcggactgtatgaggctggcgaagaaatcatccttaacatgttctacatagcctgcatcgtcatgatgtggatgtacttcttcaaccgcctctctaccgacaagttcaactactggagctcggtgtgcgtggctataacggtattgttgcgcgacatcctcttccctcccccgctggctacctacgcccttcatctggcgtgccttgcgctctcggtgtacctcattctgatgctcacctacttctatgcccgcaaggagtggaagacttattccaaagccaacctgtggtttatctttattgtagacgtcatcatcgccgcactctacaactatgacatcttcatcgaagagtacgttggcgaggcgaagccctacctgatgacggaaatatggatacgccccacgattacctacggactggtggcttgcttcgtgacggaatcagactaaaatcactaacctaaacaaaagaattgtatgatggaactacatgagattagagaagccctgaagggcatgtacggtggagagaacagaccgattagcgacggcaattacgacaagtcgctggcggtgaagtgtatcaacggcacgttcgtcggcaagaagcaggagaacatcattacctacaggggtattccgtatgtaggaaagcaacctgtgggagagctgcgatggaaagcacccgtagacatcagtccgagggatggcgtctatgaggcgtattacaatgcgaagagcgccttcggcaacggacagctggagacggggtccctctactatatggacgaagactgcctgtatctgaacatctttaaggcggaagagacaaacgggcagccgatgaagaagcccgtcatggtgtggattcacggcggagctttcgaggctggaggcaccatcgacccgatgttcgactgtgtcaatctcgtgaaagagcacccggaggtcatcgtcgtcaccatcgcctacaggctcggcgtgatgggattcctgcacctgtcccacctgcctgacggcaaggactaccccgacgcgcagaacctgggactgctggatcaagtaaaggcgctgaaatgggtacatgaaaacatcgctggcttcggcggagaccccgacaacgtaaccctctttggcgagtcggcaggtgccgcaagctgtaccttgcttccgctcgtcaaaggctcacaacagtatttcaagcgcctcattgccgagagcggctccgtcaaccagacaaggacacccgaagaggctgccgggtgtaccgacaaactgatggaaacactcggctgcaagaacgttgccgacctgctgaaggtcgatggcgagaagttcctggaagccgcgtcgggactctttgccaagcagatgcccgaaagagacggcaggattctgcccacagacacgtatgaagcatacgccaacggcgctgccaaggatatagagattctcgtgggctgcaacaaggacgaaatggacttcttcgtctacagcttcggactggaaggctgggacacgtgggttaccggccgcaagaaggagaagtttgcccagctgccgccagaagagaaggcgctggcagagagctacatgagcgaagtggtgggcgacagctaccaagccgacagccggctgttcagccagagctggttcaatgcacccatcatcaggatttcggaggagcagaccaagggcggcggcaaatgtttcacctactacttcacgcccgagtcgcccgatccgatcatgaaatgcggacatgccatagagctttccatcgtgttcaaccacccggagttcaccgccgacacgggacgggcgttcgatgaaaccttctgcaagaccatgcgccagatgtgggtacagtttgccaagaccggcaacccgtcgctcacggcagacatctcgcccgacggcaaggcgaaggaatggccgctctacgacctggaggacaagaaggtgatggtgctcgacgagttcgacatccatccggcaaaggaagccgacgtaaagattgtagactgggagagaacctatcccctgacgaagtattatatgttgtaacatatccgggagggtgtgccaaaatgttgtcattccatttctgtagggtcttacaatcattttgacacacccttctacactctaaaaccgatgaaatgaaaacaaaaatcatgacattcaggaagaaatgacaacttagcaccaaccaaagccaaatccctcaacgcccagccacaacatcgtcctggaattccatggacggaatatcacctgcacaattagtataagtactgcctttcgcaagaggtaatcgtaaaaaacttaccaaggaggaagcccttcatcaactaatcttaaaaagaaagggcgagtcgccccgcccatttgttttcacaacggaataatccttattgtgattagctaaatttcgtgctgcaaagaaacaaaaaatccttcaaacatgcaaatgttttaaagaaaaagtttacctttgtcgcaaattaactaaaatctaagcaacatgaaaagaatattaggtctcgatttaggtacgaacagcataggatgggctgtggtaaatacagacgagaatgataaacctgtatcaatagaaagtatgggcagtcgaattgtaccacttacgtcagacgatactaatgaatttacgaaaggtaatgccattaccaaaaatcaatcacgaacagagaaacgaacagcacgaaaaggatatgacaggtatcaattacgacgggaacatttaaccgcagaactccggaagttaaaaatgctacctgacgaaaggctcataaagcttcctgttctggaattgtgggaacttcgggggaaagcagcaagcaaaggaaaccaattaacgttgtcagaaattggacgcgttttatatcatatcaatcaaaaacgcggatataaacatgcaaaatcagatgagagtgctgacactaaacaaaaagcatatgtagcagaagtaaatgctcgttatgcaatgataaaggaacgtaatcaaacgattggacaattttttgcagagaagctgaaggagaatgagattgagactcccaagggtaaattctacacatatagaatcaaagagcaagtatttcctcgaaaggcttacgaagcagaatttgaccaaatcatagagtgtcagaaagaattctatcctgacatattgactaatgaagagatcaacagactgcgcaatgaaattattttctatcaacgtagattgaaatcatgtaagcacttggtgtctttctgtgatttcgagaaacgagaatatataaataaagtaggtaaagttgtttatggaggtccaaaggttgctcccaagagttcaccattatttcaattatgcaaaatatgggaagaggtcaataatttaacattaaggaaccgcaagaatgatgagttgtttataacaatagaacaacgtcaagcaatggtcgattttttagatacacatgaaaaactgacattaagcgatatgtattccatccttggaattagcaagcaagatggctggtggggaggaaaagcaatcggaagaggactacaaggcaacactacaaaaattgctttaaaaaaagcactcggcgactttgtaaatgcagacaccctgttacagtttaacctaaaacaaactgacagtaatttagttgatgaagttactggtgagatattacaagtaatagatcctaagttggaaaaagaaccactttatgatttatggcatactatatattctatttccgacaaagaagaattagcaaacgcgcttaaaaagaaatacaacatacatgatgaagacatcataaatcgtctttatgcaatagattttgtaaaatctggatttggaaataaatcaactaaagcgatgcgacgaattcttccatatttacagcaaggcttaaaatacagtgatgcttgtgaatatgcaggattcagacattctgatagtttaacaaaagcagaaaacgaagcacgacaattgttagaaaaattgcctcctgttcaaaagaatgcactccaccaacctattgtggaaaaaatacttaatcagatgattaatgttgtcaacgctttaatgattgaatatgggcaatttgattctatacgtgttgagttagcccgagaactgaaacaaagcaaagacgaaagaaataccactttcttgcagaatgaagcgatgcagagattaaatgaatccattgcaacacgtctaagttcagaaggaataaagcccactaaaaggacaatagaaaaatacaaattcatctttccaacaaaaggctgctttgataaaagaactggtaaattcatcaccaaaaactttgagaacctatcaactgtaaatcgttgtatctactgtggtcagccattttctttaagtgcagcacttaatggtgatggatatgaaatagaacatatacttccacgtgatttgatttgtgataattcgcagagcaacaaagtcctatcgtgtagaaagtgcaattctatcaaatctaataagactgctttcgattttatgcgtagtcagggggaacatgcttttgaaacatacttagaacgagttgaattatggtataaagatggtattatatcaccttctaaacgtgagcgactcttgctttcacatgaagattatttggagcgtaaaaagaaagacaaggcaaccgatattgacaaaaaatattgggagaattttgtttctcgtcaagcaggagaaacacaatatatctcacgagaagccattagaatcctaaagcaatgctgcagatacgtaaacgcaaccagtggttctataactgccacattacgtcatctctgggggtatgatgaaattctacatcaacttaactttgagagatacaaacaagcaggattgacaaaaattgtaacgtgggaaagcaaccacggaaagaataaacacagcaaagaacagatagtggattggtcaaaacgaatcgaccacagacatcacgctatagatgctttggttgttgcctgtacacaacaaggatttattcagcgaattaacactctaaatgcggatgaaacaaaagatttgatgaaaaaacaaatagaatccgcaggtataaaatttgaagaaaaaaaagtcttattggataagtacctcacatcactcattccttttaaaactcaatttgttgccgatgctgtaaacaaaatacttgtttcatttaaagctgggaagaaaacggctactattgggaaacgaatagaatacaaggacggaaagaaacatgtagtccaagagggaattattatacctagaggggcgctacacgaagaaggtgtttatggagcaattctgatagatggcaagaaagaaatagtaaaaaaatacaagttaggtaaaggggcacaaggtttcgtttttacaggaaaagaaacttatgtagaaaaagtaaataaaaaaactggagaaattcaaattgaggataagattaagaatgtccttgattctattgtagatggtaatatacgtaacaaagttctgcaacgtttaaatcaaggatttgaagagggacaagattatcgaaataatgtaaagaaagctttggataatctgaacaatttggatgaaaatcctatttttgcagacaagaataatactattcctatccgtaccgttcgctgtcgtactggcttgtctgcagttgtaccaataaaaaagaacgaacgaggtgaggctataggctatgttaagccaggaaataatcatcatattgccatttatcgagacaaagaagggaaactcaaagaacacgcagtaacattttggaatgctgtagaacgcaaaaaatacggaatacctgttgtcattgagaatcctttagaggtttgggacagtattagggacaagcaattaccagaaacgttcttggaaaagttacctgatgtaaattggacctttgagatgagtctgcagcaaaatgaaatgtttatcttgggattggaggatgatgcctttgaggatgctatgcgaaataaaaattatgcattgattagtaaatatctgtatcgcgtacaaagtatctccgaatcagattattggtttaggttacatcttgaaactcaaaacgacaaaaccgcatctgcaaaattggcaaagaagtattataggacaaagagtataaaaggtttttattcacttaatccgcataaagtgtatatttctgtaataggaaaaattaaagaattatagaacataaaactaaccatcatgagcaacatcaaactttttcaagataaaaagatacgttctgtttggaacgatgaggaagaacaatggtatttctctgtagttgacgtagttggggcattaacagactccgcaaatccaactgactatttaaagaaaatgcgtaaacgcgaccaagcattaggagccttcctggggacaaattgtccccaggtaaatatgtacacagatactggaaaaaaaagaaaaacgttagctgctaacgtcaaagacctatttcgcattatccagtctatcccatcaccaaaagctgaaccgtttaagttatggttggcacaggtaggatatgagcgtgtgcaggaaatagagaatccagaactggcacaggaaaggatgaaacttatttatgaacaaaaaggatatccgaaagactggattgacaagcgactacgtggaattgccatacgacagaatctgactgatgaatggaaaaaacgaggaatcacagaagaaaaggattacgccattcttactgctgaaatatcaaaagctacgtttggcatgaccccttctcaatataaagagtttaaagggttgactaagaaaagccaaaacttacgcgaccacatggatgatcttgaactcatcttcacgatgcttggcgaaagagtgacaactgagatttctgaaaaagaacaacctgaaacattcaaggagagcaagaaagtagctcaaagaggaggtaacgttgcaggcatagcacgcaaggaaactgagaaagaattgggaagaagtgtatctaatcctaacaactttcttccacctccgaaacagaagaaacaattagaatagcctatgatcaagaagaccttgtatttcggcaatcctgcctacctgtcattgaaaaacaagcaactggtagtaaaattgcctgaagtggagaagaacgacctgcctgacgtcatcaagaaggagagcgtcaggacaattccgattgaggatatcggagtgatggtgctcgacaaccaacagttaacgattacacagggactgatggcggctctacttgacaacactacggctgtcatcacctgtgatgcaaagcgcatgcctacaggattgctgctgccacttgaaggacatacgctctataacgaacgttttcgcaatcagatagaggcctccctaccccttcgcaagcaactgtggcagcagacagtgaaagcaaagattgagaaccaagcgttctgcttgcagaaaaacacaccgaagtctcatgccccactccacgtaatggcacgggatgttaaaagtggagatcctgacaattacgaagcacaagcagcggtttactattggaagaacatcttcaaggacagacctggattcattcgtgcacaagagggtgaagcaccaaacaacttgctcaactatggctatgccattctgcgtggcgttgttgctcgatctcttgttgccagtgggctactacctatatatggaattcaccaccacaaccgctacaacgccttttgtcttgccgatgacatcatggaaccataccgtccttttgtagatgatttggtcatcaacgttagagagcggatggagattggggaaacgctgacgactgaactaaaacgagaaatgctcagcatacccgtacttgatgttcgtataagcggcaaaagaagtcctctcatggtggctgtagggcagacaacagccagccttgccaaatgcttcaacggagaaatccgcaagattgcctatcctgagttcgtatgatagaacgtttaaacgaatatagagttatgtgggtgcttgtgatgtacgacttgccaacagacaccaagaaggaacgaaaagcagcagccaagttccgtaaggacatcatgggggatggcttcacgatgttccagttctctatgtacattcgtcattgcgccagtatggagaacgctcaggtacatataaaaagagttaaatctttacttcctgagctcggacacgtcggaattctgtgtattaccgacaaacaattcggagatattcaaatcttctcatgtaaaaaagagaagaagccaaacgctccataccagcaacttgaacttttctaacagcgagagcaaaatgatgcttgcatcaggtttgccgagtcgtgacgaaaagtcatcaatagactaacttttctaacagcgagagcaaaatgatgcttgcatcaggtttgccgagtcgtgacgaaaagtcatcaaagataattgttttagaaaagaggattccgactttttaatcgaaatcctctttctttttgcacttgttttttcttttctggtttacaacatattctattgatttccaataagatacctacttcgggttgtttataccagtgcaaagatacgaaatttttagctaatcacaactcttacggtgacaacgttaccagcggttgagttgtttataccagtgcaaagatacgaaatttttagctaatcacaactggagccaccgcgggagggggtagctccgcgttgtttataccagtgcaaagannnnnnnnnnnnnnnnnnnnnnnnnnnnaatttttagctaatcacaactgatgactgccacaatatggcaagaacaccgttgtttataccagtgcaaagatacgaaatttttagctaatcacaactgctgttgtgcgtccgcgtcggcagtagatgttgtttataccagtgcaaagnnaatttttagctaatcacaactggtgagttgttgcgactggagtcgcaacagttgtttataccagtgcaaagatacgaaatttttagctaatcacaactagccgaagcaaaccgagctcgccaacatgttgtttataccagtgcaaagatacgaaatttttagctaatcacaactgagcggacttaactgcaatatcttcaaggttgtttataccagtgcaaagatacgaaatttttagctaatcacaaccggaggcagaggaggcgcaacgccggcgaggttgtttataccagtgcaaagatacgaaatttttagctaatcacaacctcgatgagcgtctgaacatcttgtttcatgttgtttataccagtgcaaagatacgaaatttttagctaatcacaaccgcatggagggcaagaatggggcaatacgagttgtttataccagtgcaaagatacgaaatttttagctaatcacaacgtgtttcagcataggctgtacgatggtagtgttgtttataccagtgcaaagatacgaaatttttagctaatcacaactgttaatgaagtactgctgacccttacccggttgtttataccagtgcaaagatacgaaatttttagctaatcacaacagagctttcatctgtgctacatcgacaacagttgtttataccagtgcaaagatacgaaatttttagctaatcacaacgggtgtcaagttcctcgcggctgttggcagttgtttataccagtgcaaagatacgaaatttttagctaatcacaacttggggaaagtggttgtatatgaagaggttgttgtttataccagtgcaaagatacgaaatttttagctaatcacaacataggaggcggcctgtctgttcggggtgttgttgtttataccagtgcaaagatacgaaatttttagctaatcacaacgactgcgcggagaacgttggcaagaggtggttgtttataccagtgcaaagatacgaaatttttagctaatcacaaccttgcaacctttaagtgattggcttatctgttgtttataccagtgcaaagatacgaaatttttagctaatcacaaccagagcagcatgacgttgttggggtcgtaggttgtttataccagtgcaaagatacgaaatttttagctaatcacaacctgctcatgccaacacacaaggatgacgaggttgtttataccagtgcaaagatacgaaatttttagctaatcacaaccgcaggaggtacagcagaccaaccttgtcagttgtttataccagtgcaaagatacgaaatttttagctaatcacaacaccgtgtaacgagataccttcggaatatccgttgtttataccagtgcaaagatacgaaatttttagctaatcacaaccaaggcactcgccaatactaagcgacgcatgttgtttataccagtgcaaagatacgaaatttttagctaatcacaacattactggatatggtgtatctgcttctcagttgtttataccagtgcaaagatacgaaatttttagctaatcacaacatgccactcacatgcattgataagctgtcagttgtttataccagtgcaaagatacgaaatttttagctaatcacaacaaaaacagttagatacttctattgatttgtgttgtttataccagtgcaaagatacgaaatttttagctaatcacaaccgtcacgacgatggtgttacctgcggctgagttgtttataccagtgcaaagatacgaaatttttagctaatcacaacagtgttaccagtagcgaatggaagtacgagttgtttataccagtgcaaagatacgaaatttttagctaatcacaacgcgtccgtcggagtgattttcagccgtgttgttgtttataccagtgcaaagatacgaaatttttagctaatcacaaccatcctgccgatgttgtgttacctcaacggttgtttataccagtgcaaagatacgaaatttttagctaatcacaacatcacgccgaaggcagccgaaacagccctcgttgtttataccagtgcaaagatacgaaatttttagctaatcacaacgaagagcggcttcagtatctcgtggcggtcgttgtttataccagtgcaaagatacgaaatttttagctaatcacaaccaccaaactgctcactcttaaaaatctgtagttgtttataccagtgcaaagatacgaaatttttagctaatcacaacatgtgttgcgaccggcttctgcttgttcggttgtttataccagtgcaaagatacgaaatttttagctaatcacaaccattgataaagagagtgaacacaaacttcgttgtttataccagtgcaaagatacgaaaaatccggaacttttgcagttccggcacgctaattgtctgtcatgtcgtcaaacaataaaactatacaacagttatcagttgctgccctatcctatggataccatccacgatacgctgacgttgctgcggacgaggatttttgatgccattggcatagtgcgacagttggtgctggttgatgccggtggcacggctgagagcagcaatggatatcagaggctcacagatgcgaatcagcgcagccacgttaacataatgatattcaaactcatagtcaccgtcaacaagccactgaggtacctcgtcaccgtcttcgagcataccttgtacgtggaattccaaagtttccttcgcctccttataaagttcatcaggagtattggcagtaaagaccactgctcctggcacgttatctccgagctgagcggagaaattcttgttgcaccatgcaacatctaccctaatcttttccatatagctattattttaggttatatcattttcaaggctgggtagttatttccttaagcacggcggcatcattacagatgtcgaagaccgtcttacttcttaggtttttgtacttcatattgcatcgttatttaattcttcgacagaaagcggctcaccttctacgggtgactttttataccaatgcaaatataccgccatatttgaccttacgaaaatacgttttctaacagtctcttgttgtcttcaaaaacaatatgtatctccttcaagagctcttcttccgtcttagcctcaatccatgtgctatggtcaatctcttctgagtctatgacctactgcttgcccttcaacacaggatggttgcgccatttggcactcttgccttgcgccatctcgtcgatgccgccggggaaaaggttcttaaaacagagggctatccatgcagggatgttgttgttgctgtttacctctatcatccttcgtatcaactgcttctggctctcctccatcctgctgcgtatctgccgttcctgggcgcgtgcctgtgcccaggcttccttgtcctgagagaagacgtcgatatggaagttgccgggaccttccctgttaatcatgtccagagtcatcttcagctccgacgacaggggtgagccttcgatggttcccgccggctggttgacggtgatgtgcttgctgtcgggaatgaggacgaagaaggcgcgttccggccattgcttgttttcgtacagacggataaacgagttacggtctaccttgacggtgacggagaacttgccgtccttgatggggacgaactgtgcattggcggtgtcttcatcgacgatgagatacagcttgctgatatatgaactgagggtgccgtcgatggtcaccttgacggtcttggcactgatggtcagtgcagccagcaggagtgctgacatgaggattgttattcgtttcatatctgttggggatttagtgttttacagttatggggagtaggctattcctcactcagaaacttttcgctgacgaaggttccgtcataagtgaagactttttctacggagtagcggccaccttcgggatggtagcggtaggctgagaggtggagctgccgacgctcggcatcgatgctaaggagcccttccgttgcttgcagctgcttggcggtgcgcttcttcaggtcgacgatgtaagtccagatgttgcgggcatcggggcatccttcgatgacgaccagatggtcggcacctgggatgaaggctgctttgtcggcagcggcaatgttgctgagcttgacgggtgcacagccgttcgtcatcttctcccacaccggttctgcattggcagtggtcgagaagagcagacaaaccttgccggtgcgcttatccttgtaccatacgctgacgactcctgccaactcgtcttcggaaggtggtaccagctggtcgaaatagatggcttggtcagcggtctcggcggctaacgtagcggtttcgggcagtcgtgcgatggctttgtctgcaaaggctggcattgcaacaaacaagatactgagtatcatgagcaggatttttttctttttcatcatcttaataggttgctttatggttaataactattctgcaaagtaaatcatttttcgcgaatctaccaagcatttagccgaaaaacagcagtttcgccacctccagcccgatacctgacgaggcaccgactactattgctttcttcccttgcttcatataccgtcctatctcctgatgctctgcttcagcctcagaatgcgacgcacgctctcgtcaatgcgcttctctgtgatggtgccgtcttctacagccttgaccactgcatcgaaagcctctgtgaacagctgcgggccgagcacgatgtcgacaccggccttgatgcagcccacggcagcctcgccattggtgtactgctgggtgatggctcccatctccatcgcatcggtgatgatgaggttctgatagcccagttcacggcgcagcttgtcctgaagtataaccgatgacattgttgaagggatgtcatcgcccgtcacgttgggcgcactgatgtgagccgtcataatgagttggcagccccactggatgccagccttgaaggtcaccatctcgcatgagagcatctcctcccacgtcttctgtgaactggcatagccgaagtgcgtgtcggccttcgtatcgccgtggccggggaagtgcttgagacatcccgttacgccggcatccttcagcccctgcagatagttggtcaccatcggtgctgccacctgcgggtcaccactgaatgcccgcgcaccgatgacgatattctcaggattcgtattcacgtcggccacgggcgcgaagtcaatatcgaacccgtagcggtggagataggtgccaatggtgttgccgcactcgtaggcattcttcgggtcgcccgtggcaccgatggcccccatcgactcataggtcttcacgtggaaattgctattgcgccctatgcgagccacacgtccgccctcttcgtcgatacacagcaggggcgagcctttcagcgcccgaatctcagggatgaatcgtgcaagttgtgcctcgtcctctatgttgtgtgcataaagtatgatgccgcctacgggatatttctcgttcacgccccgcatcgtctcgttgacggcctgcagcttgattttggtgatgtcgtcgacactctggtcaatgccgccagaacggttgaaatggatggtggtgtcaaggcattccggtcgcacatagaacatctgtcccaccttttctcgcagagtcatccgctgaagttgtaactcgacctcatctattgggggtacatctatgttgtcttcattcgaacacgaactgagcaccatcaggccacaagatgtaaggatggtggccagcatccattgtttcatttgtttcatgactgcaaatttacttattttctaagaaacaagtagtgtaaatgcatactttttaacatcaattcccgttcaccaagcttaaatactttacctgaaacaaaacagtatctttggcttcgccgatgttactacgtctcggaaatgcaaagaaaagcgagctttccttttgcatttcgctcgactttccgtaactttgaataacttacaatgcactcggcataaaaaataaacgagtttattttgttctgctctcgtttttccgtaactttgcacccaattcaatgaaattcatcatgcaagcggattgcaggttgcctgatgaaaccatttgtttctaaacgatacagagattatgaacgaaattgaacataagtacatcgtggtgagctacgagctgcacaccactgagaatggcgaagacaaagtgattgaaacggcaacggaagaacgccccttcagctatctgacgggattcggcatgacgctggatgccttcgagaaggaaacggagaagctgcagacgggtgacgacttcgagtttaccctgccccaggatcaagcctacggcgaatatgtggctgagcgggtcattgacatcgacaagaacatcttcaccatcaacaaccacttcgaccacgagaacatcttcaagggtgccatcgtccccctgcagaacgaggacggcaaccacttcttaggcaaagtggtcgacgtcatggatgacaaggtgaagatggacctcaaccacccgctggcaggcaaggacctgacgttcaagggaaaggtcatcgaggcacgcctggcaaacgacaaagaggtagaaggcttcatcaagcacatagaacagcaccactgcggatgcgaggactgtgaaggcggatgcggcggacacgacggatgcggcggacaccaccacgaccatgttggtagctgcggatgcggacactgtcactaaaggctgaagcctctctccctacaatggcagggagagttgaagggttattcacgctataaagtcgaacgtttatgagcaatacattcgggaaggtattcacactgacgaccttcggcgaaagccacggggaagctatcggcggcatcatcgacgggatgccggcggggattcacattgacgtggacttcatccaacacgaactgaaccgcagaagaccggggcagagccacatcacgacaggcagaaaggaggacgacaaggtggaactgctctctggcgtctttgaaggcgtgtcaacgggaacgcctatcggctttgtcgtcagcaacaccaaccagcactctcacgactatgagaacatgcgcaacgtgttcagaccgtcgcatgccgactatacctactacagcaaatacggcatcagagaccatcggggcggcggacgctcgtcggcaagaatcactattgccagagtggtaggaggagcgttggctaaactcgctctcagacaa

SEQ ID NO: 3268 - DNA, 15005 bp, synthetic construct
  source 1..15005: mol_type = other DNA
  misc_feature 1..15005: note = Synthetic
tgtggctggtaatggcaccgtaaccgatatcgacggaaactttaccctgcaactgaaaggtaaatctaaaaaggtcaacgtttcatacgtgggtatgaagcctcagaccgtcgacgcctcatcgggcaccattaacgtgtcgatgcaggacgaggctcacagcctgaacgacgtcgtagtcatcggctacggctcggtgaagcgcaaggacctcacgggatcggtagccaccgtagacagcaaagccctcaccgaggtgcccgttgcctctgcttccgaagccctcaccggtaagctcgccggtgtgcaggtgtccacctctgagggctcgcccgacgcaacggtgaagattcgcgtgcgtggcggtggctccatcacacagagcaacgacccgctgttcatcgtagacggatttcccgtagacgatatcagcaacattccagccaccgacatccaagacatcaccgtgctgaaggatgcctcctcgaccgccatctatggtagccgcggtgccaacggcgttatcctcgtgaccaccaagagcggtcaggccggcaaggtgaacgtgagctacaatgcttactatggctggaagaagatggccaagaccatgaatgtgctcgcgccgggcgactatgccaagtggcaatatgagctcgcgctgctccgcgacaacgtggataagttctcagagatcttcggaaactaccaggacctcgacctatataataatgtacaggccaacgactggcagaatatgacctacggccgcaccggaaacacgtttaatcacaacgtgaacgtgaccggcggaacggatgccgtgaagtacgctttcagctatgcgcacatgaacgacaaggcgatcatggtgggcagcagctacaaacgcgacaacttctcgctcaagctgaacaccaagccgaccaagaacaccacgttcgacctgcaggctcgctacagctccacggatatctggggaggcggcgccaacgaggccacaggtgtgtataataccgacaagcgcctgaaggacgccatgatctatcctcctatcccactgtcgggtctggcctcggccaactcttcgttccaggacgacgagctgaacatctacgatccgcttacctctacggccgacaacgaccgcaagcgcacccgcaccaacatgaacctcgccggtggattcggctgggaaatcttcaagaattttaaggcgcgcactgagtttggctacgacctctatcgccagtatgagaagcgtttctggggcctcaccacctattatgtgaagaatgtgcccacgggaaccaaccagaatcatcccgccatccgcttcaccgacgccaacaaccacaccttccgcaacaccaacacgctgagttacgacttcagcaagttgctggccagcaaggaccatcacctcgacgtgatggtgggcgaggagtatatcattaccaaggcccgtgagaatacggacgaggtgcacggcttccccaccgactacaatgctgccaccgcatggcgtctctcctcacagggcacgccctacaccatcgacgaccgctatgccgccgacgacaagctgtggtctttctttggccgcgccaactatgcctacgccgacaagtatctggcctctgtcaccttccgtgccgacgccagctcgaagttcaacaagcagaaccgttggggctacttcccctctgtggctctggcatggcgcatctcctcggagaagttcatggcaggcacccgtggatggctcgacgacctgaagctgcgcctgtcttacggtacagctggtaacaacaacatccccacgggccagctcgtgcagatgtatatcaactctgccaccacatggatcaacggattccccagctactgggcaccctcgaagaccatggccaaccccgacctgaagtgggaaacgaccatcacccgcaacgtgggtctggactggacactctttggcggcaagctcaacggtagcttcgaatactatctcaacaccaccaaagacctgctcatcgagttccccgtgagcggaaccggatatgaaacgcagtatcgcaacatgggcgagacgcagaacaagggtttcgaggccaccttcacatggcacatggtgaacaagaaagactggggaatcgacctcaacggcaacatcggcttcaacaaaagcaagatcaacagcctcggacagatggccgactacggcatgaactcctactgggcctctaccgagattggcaacgactactggattgccaagggcggtcgcgtaggtcagattcgtggctatcagctcgacggcaacggccgttacgaggtttccgacttcgtaggatatgacgaatccaccaagaaatgggtgctcaaggagggcgtggtcgacgattccggcatcatcggaaccgtgcgtccgggctcgttgaagcttaaagaccagcccaccgtggacactaacggcgatggtgtggccgatgccggcgacggaaagattaccgacgacgacaacactatcatcggcgacgtgaaccccgatgcctatggcggattcggactcaatgtgcgtgcctttggcttcgacctctcggcacagttcagtttcgagctgggcaaccaggaatacaatgccaacaagattgagtacacctcgaccagcaagtactattaccgcaacatgatcgacctgatggccgacggtaagcgctggaccaacctcgatccggccaccggcgagctctgcaacgatgccgcccgactggctgaactcaatgccaacaccaccatgtggagcccctatatgagcaagatggtgctcacagactgggccatcgaggatgcctcgttcctgcgtctcaacaccctgacgctgggctacaccctgcctacgagcctcaccaagcgcgccggaatcaacagcctgcgcttctatgctacggcctacaacgtgttctgcctcaccaactacagcggtttcgacccggagtcagactgtatcaccaagacagccctcacccccagcgtcgactactcgggctatccccgcagccgctcatttgttattggcctgaatttgaacttctaaagactaaaagaacactacgatgaaaaattatatcaaattatctatattagctctcgctgtaaccggcttgacttcctgcgatatggaagcaccctccgtttccagccttgacggctcttctatctactcggtctactcgttggccgaggccgaggtgatgtctatcaaccagtcgtttggtgagaccaactcctatcgcggacgcttcttgccctactatggcatcaacagcgacctcgaaaccatgagcgccggtacgctgttctccaagagttcagacgacaaggtgagcctctgcaactataacacactggccaacaaccagcagatgaacgagccgaagaacgcctatgccaagttttacgagggcattgagcgtgccaacctcgccatcgagggactgaagcagtatggcgatatcgacaaccgtccggagatgggacagctctatggcgaagccctcacgatgcgcgccgtgatctacaacgacctcatcaaggcatggggcgatgttcccgcgcgtttctcgcccaacaacaacgacaacatctacatgccgcgcaccagcaaagactctatctaccgagtgctgctggccgacctcaaggaggccgagaaatacctctactggcccaatcagaacaatatcaccacgtcagtggagcgctgcagcaaggcctttgccaagggtctacgtgcccgcatcgccctctatgcctgtggctacaagctctatggcgacggctatcgccgctccaacgacaaggctttgagccgggatagcatgatgctcatcgtgaagcaggagtgcgaagacgtgatcaacagcggatacaacaagctcggaggcttcaaggacaacttcgtgaagctctgccaggacaacaccggcgcaggtgcagagagcctctgggagattcccttcagcgacggacgcggccgcgtgctctacaccttcggcgtgaagcacaacagcaaagaccagtacaccgaacagtctcagggtggcgccaacggccccatgcccacactgttctatgattatgatgcccaggatgtgcgccgcgacatcacctgtgtgccctacgagtggagcaaagaccgcatcgagggtagcaccgatatgcccaccatcgacggcaagagcaccaagatccacgcctatcagacactgcgcagcatcagcaagtggtgcttcggcaagctccgctacgagtggatgacacgcaccgtaacctctaccaatgacgacggagtgaactggcagtacatgcgtctggccgatgtctacctcatggcagccgaggcagagaactacctcagcggtccggcagcagcctggccctacatgaagccggtgctcagccgcgtgcttcccgccgacaaggtggccgcactgcaggccaaatacaccgccagcaaggacgctttcttcaatggaatcgtggagcagcgcggcttggagtttgccggagagatgctgcgcaaggccgacctcgtgcgctggggactcatcgacaagaagatggaggagtgcaaggccaagctcacccagctcgccaaccgtgaaggcgcctacgccgacctgcctctgaagctctattataagatgtatgacggcgacggcgacggacttgctgagagcatcaacatctatggattgaaccatggcgacaccgacgaagccggaaaagacatggccgactacagctccaaggagtggtttgtagacagcaagacaggcactaacctgctcgcagacgactacatcaacggcatctacgtggtgcagcccagcacccattgcctctggcccatctggcaaacctttatcgatgcaagcaacggaatgctcaacaacgaaggcatgctcggccagctgaacaagtaaaatcctaaagaaacacgacaatgaaaaattcaatcatagcaacatgtatgctgggactcaccttggccctgacatcttgcggcgacgtgatggacgagattacatcgctggccctcgaccgaaacctctcgcccattaacctcagcgccagcgtgcaggagcgaaccaatgtgaaactcacatggaccacggtcaacggcgctaccggatatgtcgttgaacaatacgacaacgatagcctcagcttcgacggaaagacgccctcggccacctattcggtatcgcccgacaacgtgccctacgtcatatcaggcctcgatggcgagacccaatactccttccgcgtcatgtcggtaaccagtggcgacgacagccgcaactccaaatggagcagcgtctacgccaagaccggaaccgaacagatattctattcactcagcgaaagtgacgtgaaagcccgctcagtcaccatttcctggcccgccggacaggctgcccagcgcatcgtgattaccgatgcttcgggcagcatggtggtagaccatgcgctaacaaccgacgaaatagctgccggacaggccaccatcgacggcctcacgcccgagacggcctacaccgcaaccatgctccgcgccaacggaaagacccgcggcacggtctctttcaccacagccattgagcttgcagccaatgatatcctcgtgaaggcaggcgaagacctcgccgctgtcattgccagcgcagccgacggctcacgtctcgtggtgatgcccggcacctatacgctgcccgatcccgacggcgtggtggctgcaggagccgtagacatcagcaagaatctcaccatcaagggcctccgccagaacgaccatccggtcatcatcggccgattcaccatctccggcggctcggatatcgctttcgaccaggtgacgctcgacggcaccggaacctctggcgaccaggccatcgtgttcaagagcgccggcgactacaacagtctctcggtgaccaacagtgagatcaagaactacagcaagggcttctactacatcaacgtagctgccaacgtgaagaccatcaccatcgacaacaatgtcatctcaagcattgagtgcaatggtggcgacttcttcgactgccgcgcaggtgccatccagaacctcgtgattaccaacaacaccgtctacaacagctgcgccgagcgcgatttcatccgcttcgacgacgcttcaggcagcttccccggcgtgacgccggtcatcaccgtagaccacaacaccctcgacgccgtgtcggcgaaggccgatggctccaagcgcctgctctacatccgctttgccggtaacgccacgacattcaccaacaacctcgtgaccaacaccgccgccaacttctctaaccagagcaagaccaatcccgcaacattcaagggcaactattatttcaacgcccccaacctgttgcccggcggaatcaacggcaagttcttcgataacgatggtaaagtggccgacccgacctacaaagatgccgccaagggcgacttcaccgtaggcaacgacgtcatcattgctgccggcgctggtgctccccgttggctgaaatagcacattcttgaggggcctcacccccctcctattccccccaaacacccatcccccgccaagccttgcctggtgggggatgttgttttcagcctcagcctaccgctccgcagcgcgctccctctctcacgtttccacctatctatatataaagggagggctacatcaattcacattgacgtagcccccaatcatagagaaattataacttactatataaatagtacttaagagagaacaatattcattattccagacccttgaacgggccgtattccggttcctgctccttgctttcgtccacccgttcgagcacaggccggatggcaatgccctgagaagcaacacccggaccatagtgcaggctcaccgtcgggccgaaatacagacagcgattggtgcccgacaaaacagaataagacgtcatatattgggcgtaggcccctgcgtatgccatgtcgcggaacccaatgaccgagcttcccacgttgcgcttaccggtgataggcaggaacagtcccttctgcgccctcaccagagccgtcacgtcgttgtatttatacaggcggcgggcaccggtcgggaagcccaatatacgggtagtgccgggtctacatgtatagaaataggcaccatagaccttgtttcccttgtcggtgtagcagtaggcaggataggcgtgcgacttgtcgattatttttttaacctcctcatatcttggcagtctatatacatgacgatggtccatcgtgtggaaatagggaaggtcaccggttgttgccttcgacttatctgtggtctcaccactcaattccgtatatcccttccagaatcgcatcgcaatatctttcgctgtaccggagaaataatgcgagccattatacaaggcgtcagtgatatatccaaatccaaacacatcctggtcttcctcacgcttgctgtagctcttcgtaaactgtgagcccggggagcggttctgcaaggtattgtcgcaggcatagtcggctatccaccactgcgtgggagcaatgccccaatattctccggccgcgggtgtctcgtaatggatgaagtttccggtggcccacttcacgccctgaacatctacgaaacctgcattggggtctacgggcttcaacttgatgatgtcatcgcgatagacaccgttttccttgaactcacaagttgccagagtctgctcatacatctgcttgcccacaaagacaataatggtcacctcgctatattttccaggcaatactgccgcataggtgtacttgcctccctgagaagaaagcttgcccatggtcttattgggaaccagtttcagcccatagctacgatcttcgtcggtgccaacatacttgcctttctccaggtcgagaatatccaccgatgttacattggctatgagcacagaatcaatgtcggtaagaatctgcttgttttggtcggcaaatcgcaggccccagaaggccaccagtcttttcaatttgcccacttccaccgatacacgcttacctttgatggccttcggtttagccgaagcccactgataatcaaactttttgccaatggtcgcgatggttccatcctgacgctgcaggttcacctccacagtgcttttgatagttgtctgcggcatatagccctttacagttctcttttcgccgtcgtcgtcttttatcgtatatgagccatactccgtgggacgcaccagcaatgtgtcggttgaagcaccaccgggatagaagaagcagagttcgtcgctcattttcagtggattcagagagactatcgaaccattgaaattggcctccttacccttgctgccactcttcaaaaaattatactgttctgccgtgctcttgttgccgtcgctcaggttaaacagcatcagcgtgtcgccctgatgccacagcgagttgacgaggctcgtcgcatcttcctccaaagagcgtgtgccggcaccgacagcctggtcggaagtggaaaccacactctctatctgataagtgaaattctgtgtctgtgtatcttcgctcggcgcttcaatcttgtccgagcaggccatcaggcccaatgtgagggtcacgcccgcagccaaagtgataagactcttgtgttttatgttgcttaaattcttcatactaaaagtcattgtcatgatccgatgcccacatggagcgtttactgtgaaatgcgctgaatggattgtctccgggggtaggagtctcgcctgtggcacttcctttctctgttgggttcccggttcctgctgtaatcgagtgtgcaagtggagtgcaggcctccagatgaatacgtgtgatttctggtttctgatagcgtttctttgtcatcacttaaaacttatacaattaattacatgtgttttttctgttcatcatcttttcatggttcgctcattggattcaagccacacaatggaaaatcgagaatttcgtgtttttgtgctttccaagtatcaccgaatagcttcaccttaggccttgtgcacacacctcaacatctggtgcaatgcgtcgtagaccacttcttaaacaaggattacgacctatgtcatacatgttacaatactgttacacggctgcaaagttataaattttgccatgaatatgcaagaaactttctaattttaaagtttatttaatctttctcctataacgcaaagcatccgaaatacccctattatctgactcaacttcctctcaatatttcgccttatatcctccatcacatgaatatagttgcacaaccccaccatcagtccactatcccaccgtttggtaattgggtagtaatcgtactatgattagtaccaaatcgatacacaattagtacctaatcgcacaacgatttggtactaatctcaaaccggttagcattgggcgtagaaatcagaggagggagaggagagtttaagttggaggatgaagcggggaaaagcgcccgaaacgcaaatccacacccggcaatatagccgatttgtttttatagtgcaagtaagttttggaatattaaattaatctatcattttttcaacattataggatgtaagcaccatcatattatattgatgggaatagcgtccaaagcactacttggacgtattaacatgagaaattggtgagttagcctactcttatcggcaggttgtcatcaatagcgaggctctttgaaaaataaaatgcaatatatcgggaacaaataaaatattttgcttatttttgaaaacataaaaattaaaggcgaggccccttggaaggaaccccagccttgaatgttttcacaacggaattatccttattgtgatttacttgaaaattcttgttgcaaatataggaatttaaaatataataaccaaataaatctatcaaaattttaatgaaaaagattttaggatttgacttaggagtcgcttctataggatggtgtttaatcctcactacagatgaaggtgaaatcgtagatattctggctttgggaacacgcaaaatacccattgacaaccctaccgccaatgactttgcctcggggaaggccttcaccaagaatcaggacgctaccaagaaaaggagtggacgtaggaactacgacaggtatcaactaagacgtcatgacctcactgaaaaactgagagaattggggatgctacccgacgagcacctgattaagctccccgtgtttgagttgtggagcctcagagctcgggcggcaacaaaaggaaaaaaactcagtttgccggaaataggcagagttttgtatcacatcaatcagcgaaggggatacaagcatggaaagaaagactattcggcagactcgaagcagcgcgagtatgtaaaggcggtgtacgagagatacggcatcattcaaaacgagaaactgaccatcggccagttttttgcgaagaaattggatgagacggctgtagacggagagcacggtagattttatgtctatagaatcaaggagcaagtcttcccccgtgaggcttatgaggaggagtttgaccaaatcatggagtgccaacgggaattttatcctgaggtgctgacagacagaacgattgattatctgagaaatcatgtcattttctttcagcgagacctaaagtcttgcaagcatttggtctcaacatgtgagtttgaaaagagagagcatcgtatcaaagatggccatgttgtcattgcaggacctaaggtggctgccaagtctaatcctctgtcccagttggataagatatgggaggaagtcaataatatcagcttattcaacaaaagcggagacgaactctatatctcaaacgaacaaaagcagaaactcgtcgattatctgaatcagaatgaggtgttgaaggcgactgccctctataaaatccttggtgtttcgaagcgggatggctggtatctgaataagtctttggccaaaggactgaagggcaacactacattggttcagctccgtgaggcattgagcgggctcgacaatagcgaggagttgctgaggttttccctggaatatgaggaatcgaagaaagtagatgaggaaacaggcgagatactcaaagttatcagtcccaagtgcatccatcaacccctgtatcggttgtggcatgccgtatattccattgaagacgaacagaatttaaggaagaccttgatctccaatttcgggatagaaaatgaggaggtgatagaaaagctatttaagctggacttcaccaaggaaggttatggcaacaagtcggtcaaggccattcgagagatactgccctatctgcaggaaggcttgaaatatagtgatgcctgtgagtatgccggtttcagacattctgattatctgacaaaggatgaaaaccagtcgcgacaattattggataagttgccgcagattgagaaaaatgaactgaggcagcccatagtcgagaaggtgctgaatcagatgatcaatatcgtcaatgccatcatggctcgtccagacttgggcagacctgatgtcatcagggtggaacttgcccgtgagctcaagatgagtattggcgaaagagatagcatttcgaagatgcaatataaaaggcgcaaggagaatgatagaattgagaaaatattggaggaacaaggagtaagggctaccagaaacagcattgagcggtaccgattatggaacgaatccagcaaatgttgcttctactgtggcaaagtcattggcgagactgaatatttaagtggtctcggggtggaaaccgagcacatcattcctaagtccttattgtttgacaatagttattccaacaaggtttgtgcttgcaaaaaatgtaataaggagaaggacaatactactgcctatgactacatgtgtaccaaaggacaagcctatctggaggattacttgacccgagtggacgatttgtttactaacggtgtcatcagcaaaaccaaacgcgaccgcttgctgatgaaggctgaagatattccgcaggatttcatcaatcgagatttgcgcctcacacagtatatttccagaaaagcaatggagatactgagacaggtttgcagagatgtgacagcgagctcgggcagtgtcaccgactttatcaggcatacctgggggtatgaccagatacttgagaatatcaattttgaaagatacaagactggtgaccttacagagtttagagagtatgtgcataaaggtcagacgcataaaaaggaggttattaaagattggaccaagcgcaatgaccatcgccatcatgccatcgatgcttttgtggtggccatgaccacaccttctatcattcagcgactcaacacgttgaacacaagccgagatgccatgtttaaggaagtagaggcacagagggaaagttggaagaatgattattccttgcttgagcaatggctgagagaaaaaaagcatctcagggtggatgaggtgcaacgtgccgtagagggaatactggtgtctgcccgacccggcgtgaagattgcttccaccggaaccgcagcgacctattctaatggcaaacggaagattgtgcagcgaggagtaatcgttccgagaggtgcgctccatgaagaatctgtttatggtaagattcagttgaatgggaaaaatgaaatagtcatcaaatacaagttgggagtaggaaattctggtttcctttttaccgggaaggaggactataaggcagagtctgtaaaaaacaaaaagaccggccttgtggagataaaggtaatcgataaaatcaaaaatgtgcttgatactatcgttgatggaaatatcagaaagcgggtattggatagattgaacgaaggttttgctaacggacaagattatcgaaatgatcctaaaaaggctttggagaatctaagaaatttggaagaaaaaccggtttatgccgacgacagcaagcatattcagataaagtctatacgttgtacgactgggaaaaccgccgtagttccattgaaatttggggagcatggagagcctgtcagctttgtagttcctgggaacaatcatcatgtctcgttttacaaagacgaggctggacattaccaggagtctatcatcacattgtggcaagccgttgaacgaagaagatttcatgttcctgttatcatagagaatcctgcggaattatgggatagtattcaagataaggaacttccagatacacttttggagtctttgcctggttatcaatggaagcatgtgctgagtctgcaacgcaacgaattggttgttttgggaatggatgaggccgattatcaagaagcaatacgcaagaaagataaggtggcactgaacaagtatctatactccgtacagaatttgtctcactttacctatcgtttttgtctggccacagcagtgggattcgatttaaaattagcgtctaaaaaagacaagagatttctgaatatttcgagcattgcgactttatttaacttaaatccccataaggtgcatatagatatactgggagaaattataacggaataagactatgatcaagaaaacattatgcttcaccaatcccatgtacctcagtctgcgcaataatcaattggtattgcatcttccggatgtagaagccaatgagacattgcctgaggtgatgaagaaggaggccgaacgtacgattcctatagaagatataggggtaatagttctcgataataagcgcatcacaattaccacaggcgcattggaggcgctgttggagaataattgtgcggtggtgacttgtgataaaaggagtatgcccgtcgggctactccttccgttatcgggtaatacagttcaaaacgaacgtttccggcatcagatagagtcttccttgccgctgcgaaagcaactttggcagcagaccgtgagacagaagatactgaatcaagagcatgtgttggctgctaacacatcgcaggaaacccactgcatgaaggtgtgggctacagaagtgagaagtggcgaccctgtgaatatggaagcctatgcggctgcgtattactggcgcaatttgtttccacaggttgtagggtttactcgcgacagagaaggcatccctcccaacaatctcttgaattacggttatgctatccttcgtgcggtgatagccagagccttggtcagtagtggtttattgcccactcttggtattcatcaccacaatcgttacaatgcttattgtctggcggatgatattatggaaccttatcgtccgtatgtagaccaattggttattgatacaatgaagcgggtagaggattattccgatttaacgaaggagataaagatgcaacttctcgggattccgatgattgatgtggtggtcggtggaaagcgtagtccgttgatggtagctgcgcagcagaccacggcatcactttacaagtgtttctctggagagttacgacatatcaattatccagaaatgtagaaggcatgagtagttttgaccgatttagtgaatatcgcattatgtggatactcgtattctttgatcttcccacggaaacgaaaaaggacaagaaggcctatatagactttcgcaagtccttacagcgggatggattcacaatgttccaattctccatctatgtccgtcattgtgcgagcatggagaatgccgatgctcacatcaagcgtgtcaagggattccttcccaaattcgggaaggtggggattatgtgtattaccgacaaacagttttctaacattcaactattctatggaactgctcctcaacgacccaatgccccttatcagcagttggaattattttagagaacgcatggcattggcgtggggggtataccttagtaacagtagggcgtaacacagataccatcctcaatccgttgtgatttgcttgaaaattctt

SEQ ID NO: 3269 - DNA, 14700 bp, synthetic construct
  misc_feature 1..14700: note = Synthetic
  source 1..14700: mol_type = other DNA
caaaggaagcaagcttccttcatgctgcccctcgacttgcatgtgttaagcctgtagctagcgttcatcctgagccaggatcaaactctccattgtaaattttatatcttcgatagaaaatttacgagattccgtcgtcactcggaaatagaaagcaagctctcatttccctcgttcctaggaaccttgtaaaaatcaatctttaatctgtctgttctcagaacgcctatccggtacaatcaacattatcaggctgtaaaggcacctgtacaattacatcccggacttagccgggtcgacggtttcctatacaccagggacatcaggcataaatgcccgacaccccgcttcttgtactacttctctgtcttatgaaatctgtcaaagaactctttcttataccgctctccatacttgcgggatgacccgtttccggaaaagcgagtgcaaaggtacactttttatccgaaccggcaaaacttttcacgatattttttcaaaaaaaatcgatttttctgaaatgacgacaaaacatgggagaggcgaacgactttatacattattatattatataaaggttatgggttcttttagtcggataaagcctttataaaagcggcagagccgagcgataggttcttttccgtttcgctataaaacgcccctatgggtcgagcaagggattataggttataaattataggttatggcagattcctttacgctctgtggacttcttggactttaggacactattatgcttctatccaaaaggcgaacgggtacaaccaacaaaaaaaatccaccgttaaaggacgatggattgggacctaatgttttcacaacggaataatccttattgtgatttgcttaaattcgtgttgcaaatatacaaatattttttcaaacatcaagtgtttttaatattttttatgtatatttgcagcataaatctaatagacaaaatcatgaaaagaatattaggacttgatttaggcacaaatagtataggatgggctgttgtgaatgcagatgagaatggaaaacctgtttctatagaaaatatgggtagccgtatagtgccactttcgccagatgacgctaatgagtttactaggggtaatgctatcagcaagaatcaatcacgcaccgataaacgtactgctcgtaaactatatgacagatatcaattacgacgaggatatcttactgccgaattacgaaaattaaacatgctgccagatgaaaggctaataaaacttcctgtcttggaactatgggaactaagaggcaaagcagcaagcaaaggacatcaattaactttgccagaaattggacgtgtgttatatcatattaatcaaaagcgtggatataaacatgcaaagtctgatgaaagttctgatacaaaacaaaaagcatacgtagcagaagttaatgctcgctatgcaatgacaaaagaacgtaatcagacaattggacagttttttgcagagaaattaaaagaaagtgaaatagaaacaccaaaaggtaaattttacacctataggactaaagaacaggtctttccacgaaaggcttatgaggcagaatttgaccagataatggagtgccaaaaagatttttacccagaaatattaacagaaaaagaaatcaacaaactacgtaatgagattatcttttatcagcgaaagttgaagtcttgtaagcatttagtatctatttgtgattttgaaaaaaaagaatatacaaacaaagaaggtaaaattgttttgggcggaccaaaggttgcccctataagttccccactgtttcaaatatgcaagatatgggaggaagtaaataatttgacattaaagaatcgaaaaaacgaagaattgtacataacgttagatcaacgtcaagcaatggtcgatttcttagacacacatgagaaactgacattaaaagatatgtactctattcttggaatcagcaaacaagacggctggtggggaggaaaagctattgggagaggacttcaaggaaatacgacaaaaatcgctttgagaaatgcacttggtgactttgaacatgcagaacatttacttcagtttaaactacataaaattaatagtgagttattcgatgaagttactggcgaaattatacaagtaatagatcctaagttagaaaaagaacctctttatgatttatggcatacaatctactctctttccgataaagaagaattagctaacgccttgaaaaagaaatataacataaaagatgaagacattataaacaacctgtatgctattgattttgcaaaagccgggtttggaaataagtctgcaaaagctatgcgaaggattcttccgtatttgcaggatggattgaaatatagcgatgcttgcgaatatgcgggtttcaggcattcagaaagtttgtcgaaggaagaaaacaaagcacgtacattattagaaaagttgcctcctattaataaaaatacgcttcgtcaacccattgtagaaaaaatactaaaccaaatgattaacgttgtcaatgctttaatgaccgaatatggacaatttgattctattcgggtcgagttggcacgagaacttaagcaaagcaaagatgaaaggaatgtcactttcttacaaaatgaggcaatgcagagactaaatgagtccatagccaagcgtctaatatctgatggcattacccccacaaaaaaaattatagataaatataaattcatatttccaacaaagggctgtttcgatcaaaggactggtaaatttattacaaaaaactttgaaagtttgacaactataaatcgttgtatttactgtgggcaacctttttctttaagtgccgcacttaatggtaatggatacgaaatagaacatattattccacgagatttaatctgtgataattcacaaaacaataaagtcttatcgtgcagagagtgtaattcaaagaaatctaataaaactgcttttgactttatgcgtagtcaagaatcctcaacatttgaggcatacttagagcgcattgaattatggtataaagaagggattatttcaccagctaaacgtgaacgtctccttctttcccatgaagattatatagaacggaagaagaaaggaaagataactgatgaagataaaaaatactgggaggaatttgtctctcgtcaagcaggagaaacacaatacatctcacgtgaatcaatcagaatattaaaacaatgttgcaggaatgttaacgccaccagtggaagagttacatctaatttacgccgtctttgggggtatgatgagatattacatcaattgaactttgaaagatataaaaaagctgggttgacagaaattgtaacatgggaaagtaatcatggcaagaataaacataacaaagaacaaatcgtagattggtcaaaacgatttgatcataggcaccatgccatagatgcacttgtggttgcatgtactcaacagggcattattcaaagaattaacaccctaaatgcagatgagacaaaggacttaatgaaaaaacaaatagaatcggcaaaagtaaaatatgaagaaaaaaagactctgttagataagtaccttacatcactcgctccattcaagactcaaacagttgcagatacagtaaacaaaatacttgtttcatttaaagcagggaaaaaaacagcaactttagggaaacgtatagtatatataaaaggtaaaaaacatatagctcaagagggtatcataattcctcgaggtgcattgcacgaagaaggcgtttatggagaaattgaaataaatgggaagaagcatatcgtaaaaaaatataagttaggtaaagggtcacaggggtttgtttttacaggaaaagagacatacgttgaaaaaatcaataagaaaactggagaaattcaaattcaggataagataaaggatgtcctcgattctattgtggacggtaatatccgtaaagaaatcctgcaacgcttaaatcaaggttttgaagatggtaaagattatcgtaatgatgtaaagaaagctttggataatctaaataacctagaagagaatccgatttttgcagataaaaataaaacgatacctatccgtaccgttcgttgccgtacaggattatcagctgttgttcctataaaacgcaacgaactaggtgaacccatcggatttgttaaacctggaaacaatcaccatattgccatctatcgagacaaagaaggaaatcttaaagaacatgcagtcactttttggcatgccgtagaacgaaagaaatatggaatacccgtcattatagaaaaccctatagatgtttgggatagaatcattggcaaacaacttcctgaatcatttttggaaaaattgccagatgtaaattggacttatgtagtaagcctacagcaaaatgaaatgtttgttttggggatggaagatagtgcttatgaagatgctatgcgagagcaagatttttctttgattagtaaatttctatatcgtgtgcagagcatctctgaatcagattattggtttagattacatattgaaacccaaaacgacaaaacctctcaggcaaaactggcaaagaaattccatcggatacagagtttgaaggcattatatcaacttcacccacataaagtgcatatttctttgatcggcagaataaaagaattagaatagcctatgattaagaaaaccctgtactttggaaatcctgcctatctctcactgaggaacaagcaactggtggtaaaactgccggaggtggagaaaaacgatttgcctgacgtcatcaagaaggatagcgtcaggacaatacctattgaagacataggcgtaatggtacttgacaatcaacagataactgttacgcaaggactgatggctgcactgcttgacaataacactgcggttattacatgcgacggcagacgcatgccatcaggattgctgctgccactcgaaggacacacgctgtacaacgaacgtttccgcaatcaaatagaggcatcactaccactgcgcaagcaactgtggcaacaaactataaaagctaaaattgagaaccaagccttttgcttgcaaaagaacactcccaagtcttatgcacctctccatgtcatggcaagggacgtgaaaagtggagatcccgataactatgaggcacaagcagcagtttactattggaagaacattttcaaagacaaaccagattttataagggcgcaagaaggagacgttccaaacaatctgctgaactatggatatgccatactccgcggtgtggtggcacgttcacttgtaggcagtggcctcttgcccgtttatggtatccaccatcataatcgttacaatgccttctgccttgccgatgatataatggagccatatcgtccctttgttgacgaccttgtaataaacgtaatgtcacgcatggaagtccatgaagacctcactatagaattgaaacgtgagatgctcaacatccccgtaattgatgttcgcatcaacgggaaacgcagtcctctgatggtggctgtcgggcagaccactgccagtctagccaaatgttttaacggagaattgagaagaatcagttatccagagtttgtatgaacgaacgttttaaccagtatcgcatcatgtgggttctcgtgatgtatgaccttccaactgaaacgaagaaagaacgaaaggctgctgccaagttccgaaaagagatcatggctgatggtttcaccatgtttcagttctccttatacgttcgtcactgtgcgagtatggagaatgctcaggtacatataaaaagagttaaatctttattgcccgagtatggaaacatcggaatactatgtataaccgacaaacaatttggggatattcagatttttacagcaaaaaaagagaagaaaccaaacgccccataccaacaattagaactattctaaaaataaagattccacgttttttcgtggaatcttcattcttcttggcatgtttttttattttctatcatgcctcgtaaacacctcatttacaacctgttgtcccaatcgtggtgtttatccttgtgcaaagatacgaatttttaagcaaatcacaacttgcgttgcggtgtggtagtagtcgctgttggtgtttatccttgtgcaaagatacgaatttttaagcaaatcacaacgtgccggcatacaagtaccaggaggaccgcggtgtttatccttgtgcaaagatacgaatttttaagcaaatcacaacaggctacaggaagaaaaagataggtatgtaggtgtttatccttgtgcaaagatacgaatttttaagcaaatcacaactattccacatcggatgtcatatacaccacggtgtttatccttgtgcaaagatacgaatttttaagcaaatcacaacggcgcaatacattagactgcatgagtatatggtgtttatccttgtgcaaagatacgaatttttaagcaaatcacaactgacttcaccaactacacctcgcacgcacaggtgtttatccttgtgcaaagatacgaatttttaagcaaatcacaacgtagtgcaacgcactcttgacgttcttgcggtgtttatccttgtgcaaagatacgaatttttaagcaaatcacaacctgctgtccgcgcaacaaaagatgaaatcaggtgtttatccttgtgcaaagatacgaatttttaagcaaatcacaacggatgttccattgtcccatatagatttacgggtgtttatccttgtgcaaagatacgaatttttaagcaaatcacaactcaacattctccattaattcattcattgatggtgtttatccttgtgcaaagatacgaatttttaagcaaatcacaactggaggaagacattctgcataaactgggagggtgtttatccttgtgcaaagatacgaatttttaagcaaatcacaacagtgcctggcgtatcaatgaatgaattaaggtgtttatccttgtgcaaagatacgaatttttaagcaaatcacaacccatgaagcgcgatgccgcaagccactccggtgtttatccttgtgcaaagatacgaatttttaagcaaatcacaactatctcgcgttctacattggcatgcagaatggtgtttatccttgtgcaaagatacgaatttttaagcaaatcacaaccgaagtgttcggagaactcgtcatgcaagaggtgtttatccttgtgcaaagatacgaatttttaagcaaatcacaaccctcacggcgtgcaactcctgcacgtgcgtggtgtttatccttgtgcaaagatacgaatttttaagcaaatcacaactagtcacggaagcacggtacttacgtgccaggtgtttatccttgtgcaaagatacgaatttttaagcaaatcacaactgatggacatgatgcgcttgctgccattggggtgtttatccttgtgcaaagatacgaatttttaagcaaatcacaacacaaacaactcgcacaactcaacaacaccggtgtttatccttgtgcaaagatacgaatttttaagcaaatcacaacaagaaacgatgtcggttttgtcgagaaggtggtgtttatccttgtgcaaagatacgaatttttaagcaaatcacaacatcctttggtgttgtcggtgccgacatcgggtgtttatccttgtgcaaagatacgaatttttaagcaaatcacaactaactgttcgatgcactgccttgctgcagcggtgtttatccttgtgcaaagatacgaatttttaagcaaatcacaactgtggtgtagatatagaaactttaaatgatggtgtttatccttgtgcaaagatacgaatttttaagcaaatcacaactccacagtcacagtgttgccggccaagtccggtgtttatccttgtgcaaagatacgaatttttaagcaaatcacaacatagtactcacggatgtccttcgtcctcttggtgtttatccttgtgcaaagatacgaatttttaagcaaatcacaactaatccgtcagcttcgcctttggccatgagggtgtttatccttgtgcaaagatacgaatttttaagcaaatcacaacctgccacctgcacaactcatacagtttcctggtgtttatccttgtgcaaagatacgaatttttaagcaaatcacaacggattgacgcagagggaagcgacaagggaggtgtttatccttgtgcaaagatacgaatttttaagcaaatcacaacacgtggacttctatgccttcgaccctgccgggtgtttatccttgtgcaaagagatacgaatttttaagcaaatcacaaccgcggagtcgatggtgcccatcagcgcccggtgtttatccttgtgcaaagatacgaatttttaagcaaatcacaacagcagattaaaagtgctttccaaactatcgggtgtttatccttgtgcaaagatacgaatttttaagcaaatcacaactggcggacaacaacttcaagttcgcaagcgggtgtttatccttgtgcaaagatacgaatttttaagcaaatcacaacgcttttcagatggtggctcaggtggtggtgggtgtttatccttgtgcaaagatacgaatttttaagcaaatcacaacattagaggaatgtggaattgatgacctgaaggtgtttatccttgtgcaaagatacgaatttttaagcaaatcacaactactcatcaccaacatcacacttcaagagggtgtttatccttgtgcaaagatacgaatttttaagcaaatcacaactgccaagagcagcaatccttacggaatgtggtgtttatccttgtgcaaagatacgaatttttaagcaaatcacaacatagtcatactcataggttcttatctgtgggtgtttatccttgtgcaaagatacgaatttttaagcaaatcacaacaagataacagcactcgtgcagaaggacaccggtgtttatccttgtgcaaagatacgaatttttaagcaaatcacaacatcatccgtcaggcagtcttgaagaactctggtgtttatccttgtgcaaagatacgaatttttaagcaaatcacaacacgtggacttctatgccttcgaccctgccgggtgtttatccttgtgcaaagaggtgtttatccttgtgcaaagatacgaatttttaagcaaatcacaacgtgcattttcttcgggctcattatcaaacggtgtttatccttgtgcaaagatacgaatttttaagcaaatcacaacacggcttgttgtcacccggcttgccgcactggtgtttatccttgtgcaaagatacgaatttttaagcaaatcacaacgcgaaacgatgtcggttttgtcgaggaggggtgtttatccttgtgcaaagatacgaatttttaagcaaaagccccatcgctgactcttcaacggggcgctgtgaaatcaatatcgatgctaactatgtaatacgatatgagcctataaatgttcctatttcagaaaaagcgcggtttagaatccgtttctgttcttcggttaatgtatacacctttcccctcactggatagccattaacacgctgtgtcagccacgacacgcttttcccaaaataattctttgctatgtatgaccaaggaatgagtttatatgccttttcgcttatttgctctcgtatagccaccttcttaatttcctcgttttccacttccatgttagcgagccattcttccataaaagcttctatctccttctcgtgcccttccttatgttcaactatccattgcatgagttctgcttttttcgccccactctgcatgtcgtaatttcctgtaaccgccttcaattcctctaatacttttgttatctcttccataaaaaaatattgtgtttattaagactttactctttttcgtttatttaaagttcagtatctttgattatttcacgttgcaaaaatacatattaatatttatatgtgcaagttttatatatactagtttgggagttgcatacaattatatttctgaccgccttactgtaaacgtgaattagttctatattacctagccctaggcaagcactaagcatgccctaagcatgctgttgagtatgcctagaaggagagaacaaggagagaacaaggagagaagagcgagactacacctagtgaaagtgcaaggagacacaagtggggatgtcacttgtgcctcctgggcagatgagtagtatgttttcattatttcgtttgccataggtcactctccactatgcggcggagtccttcggcgagtgtggctcgcggacatgcgaggttgatgcgtatgaaggagcgccggtgctcgccgtatgcctcgccatcggctatccacaccttgtctttatggtacaggtggtcggcaatggctggcgagggaagtcctacggcggtgcaatcgacccacgcaagataggttccttcgtgcggagcaacccatagttgcggcagtttttcggcgaataggtcgcgcaggtagttgtagttgtcgagcacatagtcgtttaactgcttgagccactctgccccgccatcggtaaatgctgcctctgtggccactattccgaaagggttgacatcacacgtctcaaagatattgatggcgcggtcaatgcggtaacgtttatcgggatcggcaacgatgatgtcagcattctgaagtcccgcgatgttaaacgccttcgacgccgccacacatgtggcactgttctgcaggaactgctctccgagcgatgagaagggggtatattgatagccaggtgcaacgaactcacaatgtatctcatcggagatgacgaagacattatggcggaaacatatctcgcccatgcgctggagttcctcgcgtgtccataccctgccagcggggttatgagggttgcataggaggaagatgcgcaccttggggtctgcacatgctcgctcgaaggcttcccaatcgacagtaaaggcggggagtgcgttgagcggggaacgcaaagaggtttcgttgagaaggagggggacttcctctgcgatgcacccttggttgcggatgcttgagaagaagcagttgtaaacaggcgtcgtcacgagcactttatcgcccggaagtgtgagtgcgtggattattgcggagattgcgggtaccacgccgatggtatagatgaaatgctctcgtttccatccttttgctccgtgacggtcgcgaaaccagcgtatcacggcatcgtaataactctgcggcacgagggaatatccgaacacgccgtgttcaacacgtttgcggagtgcctctacgattccaggatatacatggaagtccatatcggcgacccacaacgggatgatgtcggggtcttctgcttcatcccatttaatgcagttggaccctcgtcgagtaatgatttcgttgaaattgtaattcatagttataaaggttattggttaaaggttattggttaaaggtgttttgccgctctgttatcttgcagtcggcgggttgcttgatgttctcgtcgatggtgatgcggccgatatggtcggccacgatgctgcctgtgcgagggttcttgatttccgtaatagaacctatgattgtggcgcagacatcagaatcctcaaagatgcggtcagagtcggcaccgaaggtgcagtcttcaagcaccagttgctcggcatagcacagcggctgctcgcctgtgatgtgacatctcacgagtcgcacgttctttgagtgccacgcaagatactcgccattgagttcgctatcatatatagtgacattctcaacctcccagaaagagtctttcgtcgttatctttgcgttatgcacctcaacgtttttgcaatactggaacacatacttcgagtcgctcacaagtccgtcaacaaagacgttctcgcagaacatgaaaggataggtgccttcgtgaagtgtgacgttctttatcttgagattcttcactttccagaaagtttcgtcggcatcgttgaaggtgacgttctcaacggtaacgttattcatctcgcggaacagtttcggagcgtctattattgtatctcgcatcaccatatcgttgctataccagatggcggaacgcgagcccacctcgaagtagcagttggttatcagcgagccgtcgacgtgccaccagggatatttccctatgaaacggcatccgtcggcctcgatgtttgtgcagcatttaatgcccgactcgccttctgttatggtgacattctcgagtctggtatcatgaattgcaaagagaggtcgctcgcctccgaattgtttgtcgcgtattatattcattgcagtattatcgttttcgtttgcaaagatacaacaaataatggagaaatgacatacctttttaacggataaaattatcattaatacgaaaataacaaaaagaaagtgctaaaaaagtataaaacggcaattgttcaaatagtttttattaattttgccgcactaatctaaaattcaaattattaggaaaacataaaacaaaagataaatctaaagaaatggaacaacaaaaagttaagcctgcagatggcaaattaggtattatggttgtcggatgtggtgccgtgtcaacgacattcattactggcgtactcatgactcgcaagggtctggcaaagcctgtcggttcaatgacacaatacgacaagattcgcattggtcgtggagcagacaagaagtacatgagttacggtgacatcgtaccattgacaaaactcgaagatatcgagtttgccacatgggacgtttatccacagaacgcttaccaggctgccatgtatgctgaagtattgaaagaaaaggatatcaatcccgtacgcgacgagctcgagaagattgtgcctttgaaggccgctttcgacaagaactacgccaagcgtcttgatggtgacaatgtgaaagactgcaagacacgctgggaaatggtagaggctctgcgcgaggacatccgtaaattcaaggcagaaaagaactgcgcacgtatcgttgttatctgggcggcatctacagagatctacgttcccgttgacgagaacgttcacggaactctcgccgcactcgagaaggcgatgaaggaagacgaccgcgagcacatcgctccgtctatgtgctatgcctacgctgcccttacagaaggcgctccgttcatcatgggcgcaccaaacaccaccgttgacatccccgcaatgtgggaattggcagagaagaccaagatgcctatctccggcaaggacttcaagactggccagacattggtgaagagcggtttcgctcctatcatcggcactcgttgcctcggtcttagcggatggttctcaacaaacatcctgggcaaccgcgacggccttgtgcttgacgagccagcaaacttccgcaccaaggaggtttcaaaactctctacacttgagaccatactgaaagccgacgagcagcccgacctttacaccgactactatcacaaggtgcgcatcaactactatcctccacgcaatgacaacaaggaaggatgggacaacatcgacatcttcggatggatgggctacccgatgcagataaagattaacttcctctgccgcgactccatactggcagcaccgctgttgctcgacctctgcctgctcagcgacctcgctgctcgtgccggacgttacggcattcagcgtttcctcagcttctacctgaagtcgccaatgcacgactacaccgtaggcgaggaagccgtgaacaacctctaccagcagtacacaatgctgaagaacgccatccgcgagatgggtggctatgaggctgacgaggaaatcgactaaaagaaatgtctaaacgtaagaaacagaacccgcgacgtctgctcagatggttgtgggttcttttggtttttgtcgtggtgtcatggataggatggtactgcatgcccatgaccgcaagccagaaagagcgtaacaagactaccattgagtacaggagttgttacgcacttatgtctggcaaagatacattattatatattggagagctgaccaacgactggacacgcacccgactgtcgcctaacgacgagagcaaggtggagaaacgggagaccttcggcggcgcatggcacaacaaatactggcttgtgccatcgtgtttggggcgtatcgtcacttataatcctgactaccgcgccgacagcgtgcttaagatagtcaatgacaccctacccaatcttgtgaaacaacaacagcaactgcttgcagagaagagtaagatgctggagcgaacactttcagaactgcactattacatgcgtgttcacggcgttgccgacgatggatatcatgtcgtggcggcgcattatgtagaggtggaggccgacaaggaacacatagacgccgcactaacggcacttcaaaacatcggcgacaaaccgctgagaatgcaactggtacagcggtatacagccatatacaagaacaaaagaggcaagacacgccgacgcaactgccgtctgctgaaaagcgaaagtcctaccctgctctgtacgatacagacgcgcaaccatctgaaacctctcaacgcatacgcaacattcgcaagcgacccaggcatttacaccgcgcccgagccacagccaacataca

SEQ ID NO: 3270 - DNA, 5200 bp, synthetic construct
  misc_feature 1..5200: note = Synthetic
  source 1..5200: mol_type = other DNA
aacaccccgaccggttgctttacattcactttcattttaattaatttatttggtttaggttatctatctctcttacccccgtccacttttcgcaacggacgggggtttttatatagtagtgttattggttcttcatcaaatttgtccggacatttatgaactgagatcataaaacaaagaagaagtcctataaaaaagaacgaggtataaatctaacgatttaccccccttctacatgttttcacaacggaatactccttattgtgatttgcttcaaaattgtattgcaaaaatagtaattttcttattccatacaattttatacgattattttgtataaattattttttattaatcgaaaatactatatttgaatatctaataaataaatcatgagaaagatcttgggacttgatttaggtacagcaagcataggttgggctgtaatttcggaagagaacgaaaatactcgaattgaggctattggtagtagaataatacctctttctactgaagacgccgatgagttttcaaaaggaaatgctatttccaaaaatgcatcgcgaacattaaaaaggacgcaacgaaaatgctatgacaggtatcagcagcgaagaacaagacttactcaatttttcaagatctatgggatgcttcccgatgaagaattaattaaattagaaaagctacaactttgggggctacgtgctaaagctgtcagtgaaagactaacgttaccggaaattggtcgggtgctttaccacataaaccaaaaaagaggatataaaagtgttcgagaggataataatgataaaaagcaacgagaatatgttgagaacgttttgtcccggcacaaagagatcattaaaagaaacattactatcggtcagcttttttttgaagaactctccaatgattcttcctttcgtacgaaagaaagagtatttcctcggaaagcttatgtggaagaattcgataaaattatggcctgtcaaaagatatattatccgcatgtttttacggatgacaacattgacctcatacgaaatcaaattatcttttatcaaagacttttgaagtcttgcaagcatcttgtctctttatgtgattttgaaaaacgagagtttttgaataaggaaggtagaattattatagacggaccaaaggtcgcacccaaaagttcgccattagcccaaatttgtaagatttgggaaagtatcaataatcttgttctgaagaatagaaggggagaagaattatttataactcaatcacaacgtcaggcaatatttaaccaccttgacaataatgaaatattaggcctttctgatctctatcgaattttaggaatcagcagattggacggttggtggggaggtaaagctattggaaaaggattacaaggcaacacaaccaaaaatgggattagaaaatctatcggagaagaatatcaagatgttttgaaatttgaagttcaactggaaaattcgaatttggtagatgttgaaacgggagaagttgtgcaaattgtatccaccaattatcttgacgaacctttgtataggttatggcacctcctatattctattaaagataaagaagatcttgccaatgctctaaaaaagaaattcaatataacagatcaatcgattgtcgaaaatttatatgcgttggacttcgtaaaacagggttatacaaataagtctgctaagtctatgagacgtattattccctatcttgaattaggattaaaatattccgaagcttgtgaagccgcaggtttcaatcatagcagcagtttaaccaaagatgaaaaccaatgtcgtgaattggtgtcgaaacttcaacccattcagaaaaacgaactaagacagcccatagtggagaaaattctcaatcaaatgatcaatgtggttaatgcgttgatggataaattcgggcggtttgatgagatacgcgttgaattggccagagagctgaaacaaagcaaagacgagcgaaacgaaacctttaaggctatgtctaaggcaaaaaaagaaaatgaaattatagcttcacgaatattatcggaatataaacttaccccaactcgttcccgacttcaaaaatacaaattatggattgaatcccaacaaacctgtttttattgtggacaaccggttagcgtaaatgaatttctaaatggatttgatgtggaacgagaacacattttacctcgttcagtttattttgacgatagtttttcaaataaagtttgcgcttgtcgtaaatgtaataaagaaaaaaacaatcagacggcttatgattatatgttaaataaacctgattttaatgcttatttggagcggattgaaaaactgtataaagaccggaaaattagtaaaacgaagtatgaaaggcttttaactcctatcaataaaataccaacagattttattgatagacaattgagagagagtcaatatatagccagaaaatctcgagagattttagcatcggtttgttataacgtaaccactacgagtggatcggtaaccgattttattcggcgtatttggggatgggacagagtgttgcataatctaaatttcgagagatatcaattggccggtcttacagaaattaaagaacgagaacataaagaacaatttttcaatgaagagataattaaggattggagtaaacgaatggaccatcgccatcatgctattgatgcattagttgtagcttgtacaaaacaaggctttattcaacgaatcaataatatgaacgaattaaaagatgttagttttgcccctaatgctaaacaaagcaaagcatacggagagcggttgactaaactagaaaaatacattctttcacagcaacactttacaactaccgaagttgaaaaggctgtagatactatttttgtttcgtttaagagtgggaaaaaagctgcgacaattggtaagcgatatattcatcgtgatggaaaaagaatattggttcaaaagaagattattatacctcgtggggctttacatgcagaaagcataagtggagaaatttcgagatataattcaaaaggaatattgcagaaggaaaatgtaattaagtataaaataggaattggacaaggatgtctgtttacttcgaaagatgataagaaaaaaattgataaaacaattgattccattgttgataagggcatcgcgaaaattataaaaaagagagttgaagagaggaattacgacttgaaaggaatatttagtgatccgatacgatttaataattcagaaattaaaagtgtaagatgttttactgggaataaagccgtgttacccgtaagaaatggatttgttgttccggataacaaccatcatatcgcaatctatattgataaagacggtaagagacatgagaattgtgtaactttctggcacgctgtagaacgaaaaaaatataacattcccactattatcataaaaccggctgcgatttgggataatttaccagaagatttatcggaagaatttctgaaacaacttccactaccagattggaaattcgaagtaagtcttcaacagaatgatatgtttgttttagggctagatccggaaacattggaagacgctctcaatgaaagaaattattcctgtattggaaaatgcttatataaggttcagaatatttccaccaaaacctataggttttgtctccataatctgactcaatacgatataagtcagtcaaacaaacccgacaggcgtttttttaatattcgaagcattgatacattatttaaatataatccacttaaagttaggatttcacttcttggagaaataacaaaagtatgataaaacgcacattatattttggtaatccagcatttctgagcctacggaatgctcagcttgtaatcaatattccagacgccaatggaatggatgatgcaagcggaaagaatactgtgcctattgaagatattggtattgtagttttggataataaacaggttacaattacacacggagttctcgaatcctttttagagaataatgttgcactgataacttgtgatagcaaccatatgccggccggattgtttttacctttgtgtggaaacaccacacaaaatgaacgttttcgataccagatagatgcctctatccctttaatgaaacaactttggcaacagacggttcaatcaaaaattcagaatcaggcattagttttaaaagagtgccgaggtactgaagtacgaaatatgtttaaatggattgacgaagttcgtagtggtgattcggataatatggaagctcgtgcagcggcatattattgggcaaatcttttttcaaaatttaaaagagatagagaaggagaacctcctaacaatcttctgaattatggctatgctatacttagagcaaccgtggcaagaggacttgtttcaagtggattaataccaacacttggaattcatcatcataatcgttacaatgcttattgtttggctgatgatataatggaaccctacaggccatttgttgatagattggtcgtcaagatgtttgataatggtatagaaaatttggataaaaaagcaaaaaccgaattgttatcaatcccaatgctggatgtaaccattaacggccaacgaagtcccttgatgatcgcagtagggtggactacgtcttctttgtataaatgctttaatggagagaatcgcaaaattctttatccagttgtgaaatgaaacgtttttcagaatatcgtgttatgtgggtacttgtattatttgatttaccaactgaaacccagaaagagagaaaagaatatgctaagtttcgaaaaaatcttataaatgatggttttacgatgtttcaattctctatttacttacggcattgtccttctcgagaaaattccgaagttcatatcaaaagagtaaaagcattgcttcccccaagtgggcaggttggtataatatgtgtaactgacaaacaatttgctcaaatggagattttttccggtagaaatgaaattaaagaacgacatattcctcagcagttagagctattttaaatagcataaataaacccactaaaagaagtgggcttatttataaaacaacctaatttttaaattctaacacagctgctaagttgttgaatttgttttgtttatgcatattgtgctgtactagatatgtcaa

SEQ ID NO: 3271 - DNA, 5168 bp, synthetic construct
  misc_feature 1..5168: note = Synthetic
  source 1..5168: mol_type = other DNA
atttttttgagttttacacccccccttctgtatcgactttgcatttttttatcgttttttacgcgcacccaaaacacgtaagtcgaatttcagaaatgagacttacgaacgggcagaaccgccgggacttgggactggggactcggcactgggggtggaatgaggatcactctgacgactgcatgaaggcgcgcttagcggggagccggaggtgaccggggacccggagcgggcagggactgccaaaatggcagggactagggactgaggacttgggaaaaacgcacggcggaccgggcggccagggggcaggtcggcggcacaaaaaaagaacgccccactgggaggcgttcaggttcgctccgtagagcgttgcctgcggaacaattgcggcttccttgccagccattagcgtggctcagggcacaaaaggacgccgcccgcggactttcatccacaggcggcgttgccctgcgaatcctctcacggccaagccgtgagggccttggtgtgaaaagatcgcgggccagggttggttacacccaggtacaatatggacaatggcggggaatctgtcaataatattcctggttttttgtgcttgccgcccagaaaggggtaaagatgacacggtacacgctgggcctggaccttggatgcaactcggttggttgggcgatgattgcggaggatggcgcggtgtttgacaacgggtcgcgcatcctcacgggtgtgcgtgtcttcccggaaggccttgatacccggaaggacaaggtgggcacgccgccggggcagcatagaagattgaaacgttccgaaagacgttctcattttcggcgctcccagcgacgcaggcaactcctcaagttgctggttggggccggcctcctgcctgcgagttccgatgagcgtcgcgagttcttcaacaggaatccctatcttctcagggcgaagggagtcaccgagcaactcacgccccatgagtttggccgcgtcttgtaccacctgatccagcgccgaggctttcagagcaacaagaggatcatgaagtcgggggatgaagccaagaaggacaaggatgccgaaacgcaggcgaagacactcaaggcaattcttgagaaagagcgcatcactttgggccagtacttggcaaggttcgtgcccaaagacggagacccgacggcccacaaggatgcatcggggcgcaaggaatgggtgcgcaaccgcctgcgcaacgacgcctggtaccaccgtcaggctttccgcgatatgtataagacagagttcgacattctgtggcgcaggcagacattgctttggggcgataccaccaagacctgcgaaccgagtttgaacgccgagttgcggaaagcggcgtacgaagcgattttcaaccagcgccgcgtttggtggcctttggacagcatcggcagatgccacctcacgggcgaggagcgctgcccgaagggccattggtgggcacaggaattcaggatgctatcggagatcaacaacctgaccgttttcaacgcagatacgggcgaagtgcgagagttgacatcacaggaaagaacgaccctggcggataagttgcggatgctcaagagcatgactttcaaggagttgcatgagcaattggtcctgaaaccggaggagagtttccgcagttttgaggtcgacgcaagccgtaaaggacttgcaggcaatgccgttgaagcggcactgctgggaggtggactgcgttcgtggtacgagacctacggcacgctgagagaggaagtctatggtactttggtggatgttgagagagatcaagcccggaaccgcgcctatgccctagacgaagccaggttgcgtcagaagggcaagacttggggcctttcgcacagccaggcagatgaattgtgcaatctgatgcaggagttacccgaagggtacgtccaatactccctctcggctatccgcaaactaatccccctgttgaggcaaggtctgaccgtcgacaaggccgttgccgccgcgggcttcaagcctaagccgacgcccgttcgcgaccggcttcccccgctggaccaggtggatccgtacctgactaacccgcgcgtgcgccgtgcgctcagcgaggcaaggaaagttgtcaacttgttgataagcctttacggcaaacccgaggggatcgtcattgaacttgcccgcgagatgaagcagtccaggaagcaccgcgaggaactcctgaagcggcagaatgaactcgaggcgctgaacaaggaggccgaggaggagatgagcaagttcgggcagccggttaaccaggagaaccggctccgttacaggctgtggaaggagatgatggaggcgaacaaaggaatctgccccagcccgtacagtccgccggacagccaacggaagataacgctcacggacctcttcactccggaagtccaaatcgaccacattcatccgcgttcgctcaccttctcccacgccttctccaataaggtgttgtgctttgcggatgagaactctctcaaaggcaaccagatcccctaccaatggcttcatcacgaccaggggcacatggatgccatgctgcgacgcgtcaggggattgcccaaggagaagaaaaggcgattcgcattgcagtctctggacggccttcaggttttcattgaccggcaacttgatgacgcgcgcttcacagccaagcaagcggtttcgtaccttggtgttctcggccggcccgtgcggtgcgtccagggatacacaacggcaccgcttcgcgggtgctggggcttgaagaagaaccgacttgatcacaggcaccacgccgttgatgccatcgtcattgcgcttaccacggcgaaacacctccatgccctctcgaacctgtgggcggaccgcaaagcgtccttcgcacccccgtggtcatcattccgccatgaagtccaaactgtgatggatgagttggagcgtggggagaagagcgcggtttcccgtcgcccgaaccgcagcctatcgggcgcgcttcacgacgagatggggtatggccccgtacgcgaccgggaaggcagattgcggccggacgtttatgccacgcgtaagaaggtccaggacttgacaccggatatgatcaatgaagacgacacgattgccgatgccacaatccgcggtatcatacgcgcggaatgtgtgactcgcaagttggcgcagcagccaacgggcaagaaggacaaagtatggcttcacgaaggcaagccgtatacaattaaggccaagcccggcagaaaactcgccgatccgcccccggtcttgccgactagaccgcgtaagcccggcgacccgattgcgttcacgcccatcaaacgggcacgcattcatctgaactctcgaacagccgaactcgtgaggaaggacggaggcaggccggccaagtacgtcctgccagatcgcaatcaccacatcgaaatctacaggacgccggacggcaattgggtgggccatcaagtctcctattttgagggtcaccggcgctggcggaaacaggtggcgctgttcaataaaacgcgcgttcgccaggacctggttgtcaatcgtgcagggatcgcaggcgagaaattcttgacttggctgtgcgaggatgatttcgtgcggctgaagaatctcaagaccggcgccagagacctgtactacgttgtgagcaagtctgttgatgaaaataaccgccccgacatctggttctatcatcacaccctcgccaagttgcccgacaagaaagaggcggcccgcgatgaccgggtaaggatgctccgcgaatccctactccaagaagggcgggcagtgcgtgtgcgtaactggcctgaactcatggagaaaagaaaaatggagaaggtgtcagtcgaccccatcggccgcatcttcgcgtgtcatgatcaaacgcacgattgaaatctcgggcaagggcaacgacctctcgattgacgtgggctcactggtgatccggaaggacggcgagccgctggggcgcatccccttggaggacataggcgtcctaatcctagatgcccccactactacctacacgcattcggtgatcaccgaggtcatcgcggcgggcgccgtgatcatcccgtgcggccgcaatcaccatccttgcggcctgtttctgccgcaggataatagcctcatcgtgcaacgcctggcggcgcaggtccaagcgccgctgcccctgaagaaaagtctgtggaagcaggtcgtgcaggccaagatccgcagccaggctgccgccttgggtccgcactcgcccgcggcccgattgctcctgagtctggtgccgcgggtccgctccggcgaccccgcgaacgtagaggcccatgccgcccgaatctactggcccgcgcttttcggggagcactttcgccgcctgccggatggggagccgcctaactcgctcctgaactacggctacatggtgctgcgggcttgtgtggcgcgggcagtctgcggcgccggcctccatccctcgctgggccttcaccaccacaaccgcgggaatcctttctgcctggccgatgacctgctggagcccctgcggccgctggtcgatgcgcgggccaaagccctcgtgggcggcggcgtcatggagatcaaccgcgactcgaaaacccaactcctgtcggtcttgacggaaacggttgaagtggcgggggccaaggggcccctgatggtgggccttgagcgcgtcacggcctcgctggtacggtgctatggcagggagcagaaaaaactcgatctgcccgtcctatggaactgagcggataccgctgcatgtggctcctggcgatgttcgaccttccgacagacacgaaggcggcacggaagcaatacgccctgttccgaaaagccctcattaaggacggcttcaacatgatgcagttctcggtgtacgtacgccactgcgcaagcgaggaaaacacggacgtgcacgagaatcgcgtggtaggcgtgctgccgccggacggcgaggtgcgcctcctcaccgtgacggacaaacagtatgaacggatgcgggttttctggggaaaaaagcgaaagccggccgagcagccgccgcgacaactcgaacttttctgagttcgatttgcggcaactgcccggcctgtcgccactta

SEQ ID NO: 3272 - DNA, 23558 bp, synthetic construct
  source 1..23558: mol_type = other DNA
  variation 15142..15240: note = note, n is a, c, g, or t
  misc_feature 1..23558: note = Synthetic
ttttcaagtaaaataatatgtttattggacgaacggaagaaaagaaagtattgcatgatttttttacaaataatagtaagaaagcagcacttgtatttggtaaaaggcgagtaggtaagactacactcattatagaagcatctagagactttgatggtattgttatattcttcgaatgtggtaaggtgagccttgaaaggaatatagaatccttctcgaaagcagtttcatctgctcttaatataagtcttagttcttctgatttcgagtctattttctctgttttgaaactccttaacaaaaaagttctagtcattattgatgagtttcaatatttgaaaagaaaaacagatgattatgaagcggaatcggcctttaagagtgtgattgataatcttagctccaacataaagattattctcaatggttcgtcagtcagtgtaatgaaagacactctttcttattcgaatcctctctatggtcgttttgatacaataatcaatcttcttgaatttgattattatgactcatcacttttttctccagagctttcagtaagagataagatatctttttgggcaatttttggaggatctccttatgttctttccttagttgactattccttatctttaaaggaaaacataatcaatctcattcttaatcgcaatggatctattcgtacatatattgagtatgtaatttcatctgaattaggtggcatgaattaccttaatgacatccttgatgctcttaaatcatcttctcttaggtacaatgaaatagaagacaagattaaaattagcaaaacaggaatattagctcgctatctagatgctctccttgatttagatgtaattgaaaaacgtaatcctataaacaaagaaggagacaaaaaaaagagattctatacgataaaagataatcttttgaagttctatttctcatatatttattctatgagaggtctcataaatactattggtgaggagacattctacgaaaagaatattgcccaaagcatcaatacattcataagttatcgttttgaggagactgtaaggcaatatttttctcgtcaaagtagaaaaggaaatatcagcctcatcaatataggtacttattggtatgatgacaaaataaagaagacaaatggtgagtttgattgtgttatagagaatagtaaaaaaaagtattctatatatgaagccaagttttattcttctccaatgacaaaagaaaatgttgaagaggagatagataaaataaaacaaattgcggagattgatgttataaaatatggagtcgtttcttcctctggcttcattggccctaagctagatgatgtagattacattacaggtgaagatctctttagctaacaactttctatttttgcttgttttaataaagctgagatgaatatactgattaaatgacaataaaagaatatgtaagtgaattagagactcttttagacatttcctcctatagtgatatatcacttaatggtatacagatagacacagaggatagagaacttaagaaagttgggtttgctgttgatgcatgctatgagacaatagatgaagcagtaaaaagtaattgtgatattcttgtcgttcatcatggtcttttttggggttcgcctctcgctataacatcatcgcactataatcgagtaaagagagcacttgatggaggcctattgctttttgctgctcacattccgcttgatgctaatattccatatggtaacaacgctcaaattgccatctctcttggtatgaaggaatttgatggctttggagagtggaaaggaaagcttattggcctaaagggtaagcttccttttcctatgacaattgaagagataaaagcacttttaggagtaaagcattctgtttttattaatggaaacggtaaagaaaaaatagaaagtgttgctattgtttctggtagtggctcaagtgacacagaggacgctattaagagtggcgttgacttgtttattactggcgaaatacatcacgaagtttaccaccaagcaatggaaaatggcttaagcgtccttgcctttggccactatgactctgagacttttggtgtgaaagctcttaagagaatgacagaaaagagatataatgtggaaactacttttatagatgtggagacagggctttgaacgataagtggaaaagatataaaccattaatactttctctcttaattatcatagtggaccaaataacgaaggcattaattgttaaaacaataagcgagggttcaattggttggagaagtaaaaaggatttattgtggatagtccatgttagaaacaacgccgttgctttctctcttggagagaatgctcctgtcgctttaaagtatgttctcttcgttgctctgcctttagttgtaatggcaggagtttgctacttagtagtttctaagaaatatgataaggagttttccactctagagcgatggtgtcttgccggaatactaggtggaggatgtggaaatttaatagatagactctttaggtctcttagagttgtagattttattagcgtcaaattctatggtttatttggcttagaacgttttcctacatggaatgtcgcagatagtgctgttgtagtatctgtaatacttttattattatcatttataataaaggaaattaaaggaagtaaaaaaaatgggtgaaaagaaaaagattaatacagttctatttatggtagttgctacactttttaatgttgcacttatttttgtattcttcatccttcttatgcttttattgtcacttatcatgagatatacaaatatgggggaaaatgcttttactattggctctgttattgtcattgtattgtcgtttgtgctctctttctttgtttataaaaaggctgttgaatgggcaaataataagtgggatataggaccaaaaggtaagagtgggagagactaaaagatgcgctatcagacgcttgaaaagcttactggtgcctattggtattcttttagcgatgaaccaatagcaacgcgtggagctttaagactatgcgatcctgcatatttacttccagaagaatctcccgacgggctatggcatatgtttgcccatactgctgtcggagttgagcatctttcttcaactagtggactcgagtggaaaagagagcatttaattgttgcacgaggacactctccatgtatttttaaagaaaataatacgtattatcttttttatgaaatacatgatagaacatcattttttaaaaaggatgataatagcctctcttcttctcgtatcatgcttacatctagtacggatttgcttctttggtctgaaccaaagatggttttggactctgagaagattacaagagctcaatataaaaatggtcctgttagaatttctcgtcctcaaataattgagtgggatggtggatacagactatattttggtgcaggagagacgaggctatatgatacaaatcaaaaagcaaccgcacgcttaatgtatgctcagtctgattacttagatagagactatagagttaatccagagcctattttagatattgaacctgatagtttatatcgtaacttagcgacaggttctgtccatattgtaaagtgctcagatggcgttgctgcctttgaatgtgctttttcttatgatgaagagaaaagaaaatctacaacaaacctgttgcttttaactagtctagatggcgtaagcttcacctttaataagctaatacaaaagacacctacagagggttgggctagtagatatataacaagtgtagatgtacgctataaagagtctgaaaatagttggtattgttattattcagctaatggctatgttactgtattgggtcataagtttgttaaagaatcccttggtcttcttcttgcgactgacgcaaaataaaatcgatttttagctgttgaaagatgtcaaatttaccacaaaaaaagagaaaaagttataattgatataatggagaaaaaaatgaaccctatagaactaatagattttgataaatgccaaaagaacctaaggttctatggtggaatgtctggcgacaaatacggaatcgattataataatgagccatatattttgaagtttccgcaaaacacacaaaattttaagttaatgaatcatttgagttacagcaataattcttattcagaatttattggttctcatttttatgaatatgttgggataccatctcacaaaactttacttgggacagcaagaaatcacatcgttgtcgcttgcaaagatttttgtcttgatgaatatgttttaatcgaatttgcaaaacttgcaaatgctgcaaactcagaatcgggaaatataaaaattccttctagtggacacgaagatcgtacaacgattctaagcaatattctcagtattattgaaactcttgatgtgttagcacctctaagagttgaaattaaagaaagattttgggatatgtttgtgatagatgcaattatagcaaatccagatagaaatagtggtaattggggtgtactaaatcctgttggttcaaaaaaacctgaagcgttaaccttagcacctgtgtttgataacggaaatagccttaactgcaagataagtgatgaaacaattgtacaaagttcaagcaaggaaataacagagatatcgttgaaagttgcttctgttttccaacatattgatgaaaaaggtgaagcacacaaaataaatccttatttgtttataaaaaaaatgtcgaataacgattgtaacaaagctgttgttagacttgctcctagaattcaggatgtattaaagaaaataaaggagttgatagatgcactcccgggaatgtcaaatgagaggaaaactttctattcaaattctatgactataagatataataatagtatccttcctgcttataaagagctttcttcaaaagcataaaatctatcgaggatgctcataagatgatactacataaagatattagcatagatttcaaggtttcaaagagcctaaaaagagatatggaagaggctgagaaaatctacgacgaaaagggtggcgaatctctcgattatatctttaagacagatgaaatagaggggcaagcgaagtcgctatattgggctggctatctaacatatgaacaagccgacttaattctctataaatttggtatgtaggtccaaaaaaaatgaatagggctatatgacttatgagattttagtctcattcgtgcaatagcccagtgtgttagatattctctttaagagatgcactaattaaaccaataaagagtgggtgagggcgctgaggtctactcttaaactctggatggaactgaacagcaacaaagaaaggatggtcttttatttcaacttcctcaacaagccttccatctggacttgttcctgcaatatccatctggctattatcgaagagctctctatagtcattgttaaattcatatctatgtctatggcgctcatcaacactagatgtcttatatagctcttcaagcacacttccttcttttatagaacaagggtaggcaccaagcctcattgttccgcctttctttacacctttctggtctggcattaaatctatgacgctgtatttaccatatttatcgaactcggatgagttggcattctcaagctttagaacattccttgcaaattcgataacagcaacttgcatgccaaggcatattccaaggtaaggtactttgtttaagcgtgcatacttacatgcgctaatctttccttcgactcctctgtagccgaaacctccaggaacaagaatgccatcaacatcgctaaagattgttgctgcattttcatctgttacagtttcactatctacccattttatggagcaattagcacccagtgaccaagatgcatgtttaagtgcttccattacagatagataggcatcatgaagctccatgtatttaccaaccatagcgattcttacttcttttgttgctttatggatgttgtcgaccatgttcttccattcagtaaggtcaggctttttgtcatctaagtgtaatatacgacaaacagaatcatctaagccttcgctatgtagcattagcggcgcttcatacaagacagggactgtcttattctctattacacaatctcttttgacattacaaaatagagaaaccttttcttttatcgattcttctattggctcatcgcttctaagtactatgatatctggaaagataccggcagccataagctcttttacagagtgctgagctggttttgatttgtgttctcctgaagcttttaagtaagggacaagaacaacatggataaagagacaattctctggtccaacttcatgtgaaatttgtcttattgcctctaaaaatggctgagactcaatatctccagttgttccaccaatttctgtaataacaacatctgcagagcttgtttttccacatgaatagatgaaatctttaatttcattagtaacatgaggaataatctggacagtatgtccaagatattctccattacgttctttattaaggacattccagtaaacctttccacttgtaaggttagagaacttacttaagttttcatcaataaatctttcatagtgtcctaaatctagatctgtttcagcaccatcttcagtaacaaatacctctccatgctgtagcggagacatagtgccaggatctacgttcatatatggatcaagcttctgtgatgcaaccttatagccgcgctcttttaagagacgcccaagagacgctgccgtaataccttttccaagtccagatacaactccacctgttacgaagatgtgtttagtcataaaacctccctaaaaaaataaggacacctagatggtgtcctctgtataaagtgagaaagagccactctcgctacaaaagcgagtgagaaagaagaagaaagacagctctttcttttctcttttctatgccattgctctattttctggctcatctcttaattcctaaatatggtgtgataatgattctttttgggcttttgtgtcaataagaagaagactaaaaattaaagtaattaaaattcattttttagtttttatgttttgctgtgctataatttttaatgtaagaaaagatgtctagaaatagactacagttttgaaaaaatgattttgctctagtaataggggaagagtatcaatgaaaggttctgagtgcaaatttgttaaatttatggaaggtgctgataagagatttgttattcctgtttatcaaagaaattatgattggaagatagaaaactgtaaccagttgtatgaagaccttaaaaagattatcagggaacacagagaaaatcatttttttggaagtattgtttctgtttttaatcctaatggaaataatgaagaattcctaattattgatgggcaacaacgccttacaacagtatctctattgttcctagcaatgtataatctaatggaccaaggtattgttgttccagaagcttctaaccttaagcaacgaatttttgaagagtatcttgttgataaatggaagccagaggatactcgtataaaattaaaacctgttaagaatgaccaaactgcttttgaaaagttattttctgattcaactgaatatattcgcgattcgaatttgactataaattataattatttctacgacagaattcagaaacaagagattacaattgaccaactatatcatgcaatttgttgtttagaaattatcaatattcgtttagataaagatgataatcctcaacttatttttgaaagcttaaattcgacgggacttgatcttagtgaaggtgacaaaattagaaactatattctgatggggttaccttctgaaaagcagaatgattattatgataaatattggaataagatagaaatttgcactaagtatgatgttagcgcttttatcagagactatttgagcgtcaagcagcaagctattccacagcagaaaagaatctatattaatttcaaggaatttgtcgaacttggaaaaattgcaacagaagtattactcgctgagatgttggcttatgctaagcgatatcaaattcttttgggaggtaattctggtagtactacgcttaatgcatgtattgatagactaaatcgtttggaaacgacagtaacaagacctttcttccttgaagtattacgtttgtatgatgaaaggaagttaacactaaatgatgtcacagatatttttatgatgactgaagactatctcttccgtagaacaatttgtgatttaccaacaaatgccttgaataaaatcttcttaatgctacatagagaaattgttcgatacgatggaagtgaagacaattaccttgaaaagtttaaatatgcattactatcgaagaaagagaaagctcgattcccaaatgatgatgagtttaaaaaagcatttggagaacgacaagtttacctcatgaatagtaagaacaaggtttacatttttgagcgttttgagaattttggtacagctgaagataaagatatataccgtcattgtgatgatggcacctattctattgagcatattatgcctcagcatcttactcctttatggcaaaaacagttgggtgataattacaatcaaattcatgaggagtggcttcataggttagcaaatttaactcttacagcatataactcaaaatatagcaatagctcatttgatgaaaagaaaaacatgccgaatggttttgatgatagtggtatccgcatgaacacttggatagcaaaaaaagacaaatggacacttgatgagctagaagaacgtaatgagtgtcttatgagcaaagctcttaagatttgggaaaggccagagactgaatataaacccaaagagaagcaacttgatacatatacacttgatgatgaaggcgaactaacaggtcgtaaaattgctaagttttcttttaagaatacagaacagccggtaactaattgggtagagttatatcaaaaaattgtccagattctatacgaagaagataaaactataatcactaagctagctttatcagaaaatgagagcaatctactttgttttaatgcaaatcctgatactcttcaaaaatctgttgaaataggggatggtatctatttgctgtcaaacaatagcactcaaaataagcttactttcttaaacaggttgtttaaattgtataatgaagacccgacagatcttgtgttttatcttcgtgatgaaagtgaaaataatatagattatgacgataagtacaatcttctccgcagacgatattgggcttatgcacttcctattataaaagaaaagaatgaagaaaatggtactttctctaatgttaattcttcaaaaggtagttggcttagtggttcttttggtattgggggggttactatctgctgtgtggtaaactatcttggtgttcgagtagaagttctatttggaaagaaaaataaagaagagaataaaaatgcctttgacaatctatataaacaccaaaaagagattgaagtggcattaggaactactcttcaatggaaaagtgatgatgataataagacatcaaaggtatttgttgaactcaagaatgttagtatcggaaatgaaacaaattggctacaaatggcaaatttccaagctacatgggtaaagaaattctatgatgttgttgtcccatacataaaataaatagagttctaaattttactctttatatcgtgaaataagtacatgaaattatatactatctttttatgcacaaggacatattttgacctagtgaatggcataaaataagaacacagcgagtatattccttgtataattgatgtattaggtggcgatatagatttatagaattaattgtaatggaaaaataattaaatagaaaatgggaggggtgtggctttatggagaaagaaaaatcacgtatttatcaagatgttgctagcaatattaagaatagacttagggatagaaattattctattggtttagatcttggtgtaggttcaattggaattgctgttgttgcaatggaacccaacgataaaggaataaattatcccacagaattaatatatgctaattctaggatttttacctcttcaaaaggagccgcagaaagaggacagtttagaggtcaaagaaatagtataagacataaggcacataggttaagaaagctttggcaactactagctactagagggtttatgaaaccatattcctctgaaatagttcaggatccagctattctgagattttcaaaggaaatgataaagtctgatccatatgaattacgacttaaaggattaaatgaaaagctttctatagaagaaataggtgtcgctctctatcatttggcaaatcacaggggttcctcttctgtgcactcttttttggatgaggaaaagacgaaagatgaagaaaaagctgaagagcaaattaaccaaacaaaaaatcttgctaaaaaatatggtgtggatacatatattgagatactaaattgtttcaatatgaatggaataaaaggatatagaaacaaggatgtaagaccttcagattttataatgccaatgccaacaagagatataattcttaaagagtttgagaaacttattaatacacagaagtacttttatcctgatcttttagatgaagattatatttctcaaatacatgatattgttttttatgagaatctcaaaattgttccagaggcagctaattgcccatattttcctgaagaaaaaaagttgccaaaggcatcttttcttaatgaagaacgccgattatgggaagccttgaataatgtaagaattttaatggagagacaaacagaatcagggcatgtctatgtggaaaagatatctttggagaaagatgaaaaaaagcaactctttaaggtattaagagatgggagtgatatttctccagcttacattcgcaaagtctttcctaaatatggaaaattgaaaaacgagaatattctacttcaaggtagtgataaaaagaacacaaatataaaaggatttaggttcaaaaaacttgaagagttgtcctgttttaaagaattaagtgacaatgataaagacaagtatatatcattgtttgttaatactcctgatgatgattcgttgaaaaagaagctaatttcccaacttggattttcagaggaaaaggctgatgatgtaataaaaaatacaccaaagcttataggagattatgctcctgttggaaagacagcaatgctattattaatgcctttcattgaagatggactatctttccatgaagcggaagaacaagcgcttaaagaaggtattcttgaatctcatacagatcaaatagtttatgattatttaccttattatggcgaagtaattcccaattcaacgcagagcctagctggtaaagcatggcactcttcattttatgataaagtaggtaaaaaaggttttattaaacctcatacaaattcagatgaagagaaatatggacgaatagcaaatcctgttgttcatcagaccttaaatgagcttagaaaactagttaatgaagttattagtattatgggtaaaaagcctagtgagataacagttgaacttggtagagaactaaaattaggacaagaggcaagagaaaaactcaatctagataataatatccgttcgaaggaaaataaaaaaatatacgatgagtattgtattcccaatagtctgtctacaaagtatataaagaggtttaggttattagaggaacaaaattataagtgtccatattgtctaaatatgataaaagcaaatgatgttgtttcaggtaatgcagatatagatcatatatttcctgaagaagatactgctgattcatcagagaacaatttggttcttgctcataagtattgtaacgaggtagtaaagaagaaacaaattccaagagtggcttttggttcaaatgttgttttatggaacaaaattgagcaatttatagatgaaacttcctcaatggagagtaagcgttggcgttttgaattgacagaagaaaagtatcaagattacctagcaaaaaacacctttcttaatagatttaaatctgacaatgcttttgctgctagaattgcgtgtgagtatttactttctctttttcctgcagaaaagaagtatacagctgttcgtactataaaaggagctgaaactgctgcattaagaaggtcttggaatttaaatggtataacacagttactagcgtcctttcatttaatggaagagaatgatgattttgtcaatgaaaagaataggttagatgctcgccatcatgctttagatgcaatagttgctgcatattactcctattctgttaagcagatgattaattctatttctaaagaagggagcaatcaaaaggaaatatctaaaagagtaccaattccaaagtattttagaataaataataatttaagtaccacagagcaacgaaatgattttcatgattacattgagaattttttaataagtaacacatttgtgagcagaaaagttgatactgataaaaatggagagttattaaaggccactcagtatttaatattagccatgaaggatgatagtcttattttacttacaaaaaagagattaaagaagctaaaagcaaaaacatttctaggaagtaaatcgggatccatagaacatgaattgagtggaaactatgtaaaacccaaatggcttaataacgatcaagatagggaaattaataattttttgattcacaatcaacaactattcgagttgattttagcaaataaagataaggcaaaagaagaattagaaaaggctaatgaagaaagaatttcagttggtaagaaatccattgaaataaatgaaaaacgaattgttgcaaaaacgattgagattacgggtggaatgtattattccctaacaaataaccaacgcaaaaaagtctttgtagctaaagaaccatcttgttctgagagaggttctgcttttgatacaggtgctaatttcgctcttgatttgtatcatgatgagaaaggcataataaaaggagaggttatcagaaaaattagtgccattgataagaattatgtaccagagtacaaaaaaaagggcttttgtctttatgaacgtatttaccccggagatattcttgaagttgattatgtgccacgatctcctaccaatgcaaagaatgattttgttaaaggaattattactccaaatgcaccacaaggaaagacctttcttgttgttaacacatttacagaaaagggaaaaagtgttcaagtgtattacgattctttgatgtcatcaaaagcaggacaaaaaggatcattttatacgtcggccttaaatagtcaaagcataagaaaagtctgtttatctgaggctggaatagtagtatatcgttcaagactattaaaggatttaaaaaatgtggagagtacttgaaattgccggagatggttactttttgcatgttcgtaataaaaatgtattagtagagaaagaaggaagacctcctttacctatatctttttctgaccttcattctgttatctgtcatgggcaaaatataagtttttctgattctttttttgaagggtgtcttagaaacgagattcctattactttttgcgatgagaagcatcttccattggggatgcttcttcctttttatcaacatacagatggattacagcgtatccaaaaacaaattaatgcaaaacttccaaagaaaaaacaggcatggcgactaataataaaatctaaaatttctgcacaggcaggtgtcttatctttttttgaaaaagaaagttctattattttgaaagcgatggctgaccatgttctttctggagattccacaaatttagaagctcaagcagcaagagtatattttgaatcattatttggggaagattttgttcgctcagatgacgattgcgagattaataccatattaaactatggatattcaattataaggtcaactgtagctcgtgcggtttcttcttgtggattacacccaagttttggggtatttcattcgggtagaataaatccattttgtcttgttgacgatttaatggagcctcttcgtccaatagttgatagaaaagtgtttgatttgtatcagtgtgaaaaaagtatagagctaaatccttacataaagaaaaatttaattggtttaacaaccgagcctgtaaaatttgggccattatctatggaactacctatagctgttagaaagtatgtaatggaatatttgtcatttatttcaggagagaagaacgatattactttcccgaaaatgaaggattaattcagtggcagtaggagtatatgaggcggtgtggctatttgtaggatttgatttaccaacgttgacaaaagaagataggcgaagagcttctaattttagaaaggatttgcttgatatgggttttagaatgtttcaactctctttttatacttattattttagatcaaaacaacaggcagaaactgtagcagatagaatagaaaaactagtcccgaaaaatggaactgtttctatcttttttattacagatatgcagttttcgatgatcaaaaccttctatggtgggaaagtaattgacgaagttgaacctgaacaaggtttattgcttttataaaaagagcctccctttcggaggcatttttcgactaacgtcttattagagatgttacccgacttaaactatgatgagcctattttatcaaattatattagaaaaaagaagtcaaaaaatttaaaaaatgggatttagtacaataaaatatacctaaaatcccaaaattttgaagaagtttttcttctaacttcaataaaactaacaatttaatgctagtaatattgtatcatagtttaaatcgagtagcatccccaacaacaatttgcttacaatgaaaaaattttataattgtatcatagtttaaatcgagtagcatccccaactaggaattaaaagcacttatgagaatacggattgtatcatagtttaaatcgannnnnnnnnnnnnnnnnnnnnnnnnnnnnnnnnnnnnnnnnnnnnnnnnnnnnnnnnnnnnnnnnnnnnnnnnnnnnnnnnnnnnnnnnnnnnnnnnnnaaatcgagtagcatccccaacttagagcactgcataccaaaacaaaaatatattgtatcatagtttaaatcgagtagcatccccaacagacaagttggagtcacgcaaagacaaacaattgtatcatagtttaaatcgagtagcatccccaaccagaagtacagcaagctatctttgacatggattgtattatagtttaaatcgagtagcatccccaacattctgtcatgttatgctcctctgaatagaattgtatcatagtttaaatcgagtagcatccccaacgactaaagaccaaagagctagatctatattattgtatcatagtttaaatcgagcgacatcccacatattataaaggtatataggtaacttaaaggagagagagtcagaattgcaacatggtgttaaaaatggaataatcacctctttatatgcaaaaacttgcatatagaggaattgtttttttattgttttcaaagccaaagtttttgctagatattttgatagcataacttggtttatattttgacagataaacattgaggctttttgctttaacattatctgcagatttaacttctattggtataatttgtccatctttttgaattatgaagtctacttctgctccccgttctgatgaccaatagtatgttttgtagccattggtaatgagagtttgattaacgtagttttctgtcattccacctttaaagtcatttaagtctggagaagagtagatgatatcagaaaaaagaatatctttttttgcacaaagaagcccagaatctgaaacgtagattttgaaggcatcaacatctctatagttttcgagaggcttcattatgttttctactctgtagactttgtttacaatacctgaaagataaagccactctatggcgttttcaaattcagatgctcttgctccactttttatgagtttatattggaatcttgtattctttttagataactggacagttatgttatcatatacaagtcttgttttctttatttctttagtagtattgtatttgctcatatcattaagataacttattagaatattgttttgagagtttctgactagtatgtaatctttagtttgtacatactgcatgacgcactctggcattcctcctactgccaaatattctttgtataaagaaagtgctttatcgtgtaaaacagatggaagaggagtatttgtatcaaatgctttttgtatcatattaacgagctctttttctccatttgcaatgaagaactcgtctatactcattggatacattgtgactatatcaactttaccaactggaaaagaaaaactagatctattgacagcaactcctaaaagacttcctgctacgataatatggtattcaggagcttgctctgaaaagtatttaagtctagttaaagctctttccgaaagttgaacttcatcaaagactatgagagttttttctttcataattgatacccctgccatatgagataaaagaggcaacaaatagcttggttctatgctttcgctgaatgtatcatttaattttggatttgtttcaaagttaaaataagcaacattatcataatgagttctgccaaactctaagattgaatacgttttcccgacttgtcttgcaccttgtactatgaggggcttacgatatttgttttctttccatacctttaaatattcagatattctgcgatacatttgtacattcctaattcttatttatatgtatagtttaacataatttagaaattattcatgtaaaaatacagtaaaaaaatgtgaaaatttacactaagccacattaatattagaaattgtacttatctttgattagcctgaaatagggtgttagctatttaattatgaacatttcttttgataccttctcatatctattgccatgtctatgcttttaattcaattactatagtaagatgcattttcgatatcttcttcaattagaatgataaaagcgattagagttatatattggttcgcccatgatataaaagaagtaagggctaataaattagtcgagtcgtttaggagtatattttgaaaaaggttatattaattccagattcttttaaagggacgatgtcgtctattgagatctgttcaataatgaaagaaaaaataaaaaagtattatcctgattgtgaagtggtatcaattgcagttgctgacggcggagaaggtagtgttgaagcatttttatcttccctcggagggaaaaaggtctatatagaagttactggaccttattggggagagaaagtaagagcttattatggcattcttcctaataacacagctgtaattgagatggcagaggctgcaggacttcctttggttggagataataaagacccatcaaagacaacaacttatggtgttggagagctaatacttgatgcggtaaaacgtggtgctagtaaaataatacttggcttaggtggctcagctacgaatgatgccgcttgtggccttgcttctgctttaggcgtaaaattctatgattcagaagataatagttttattccaacaggcgaaagcttagatagaattgagaaaatagatctatctaatatagatgatgctagagttaagaagactccaatggtaacaatgtgtgatatagataatcctttttatggtaaggacggagctagttatgtctatgcaccacagaaaggtgcaacgccttctatggtagaagatttggacaagaaaatggaaaagctagcatctttaataaaaagagatttcaatattgaccttcaaaagattctaggttctggcgctgcaggcggcatgggaggaggaatggttgcattcttttcttctaaactccaaatgggtatagagacagttttggaaacagtaaggtttgattctcttttatctaatgcagattgtgtttttacaggtgaaggacgattagatagccaatctcttagaggaaaagttgttattggtgttgcaagaaaagcgaaggaaaagaatgttcctgttgttgctattgttggcgatattgctgataacattgaaaatgtgtatagagaaggcgtgagtgcagttttctcaataaatcgagtcgctcttccttattcagagcaaaagaaaagagctaaatctgatttagctctaactatagatagcctaatgcgatatcaaaagatgatagaaagaggataataagtttactctatttattcttaagcatctttaagtattcttctacattttgatactgaatagtatctaccatttgtgtctcgcctctgtagagaacatattttcctgtgattggtccgtagcgatgttctgtttgtgcacatttttctttatcaattagatgtcgatactgcctagaatcaatctctttgctatgcttgatttcaaaaattttgcatgagccaagctttggatcaaatattaccatatcaaattcacctacagaaaattgtaggacaaacacttctttttgtgggtttgctagttttgtctccaataagacaatatcttctagcatccttcctttaatttctgtgagtatccgttcttgtataaaagttcgctctttcagagataatgcactaaatgtctcatctagtaacaaactctttattaaagcttctgattgcgcatatctaagaccaggttgagcaattacagtgcgactagatttctttttaacatctggtaacgagaaaacatcaatatctttggttaaatctaataaatccaagtattcttttatctctgttacatgtgcattatctaatattactgtctgttcttctttgtttttgatttctaggagcttccttacgttgtttgtaacactagcgatgtcgatattatctaaaatatctgtcggttttttgctatctcttcgaagattgcttcttgaaattcctaagtcatgggatttccattcttctgtcaaaacttctagtgtgaaacgatggtttatatcttctacaacgcgatttattgcactagttaattcatctttttcatacaagtcttttagatttcgaaaatgttctccattttgataacagcaaagagcatgttgaatgttgtgtgcaattgcagtatcaacatactcatcggcattctttttgcttgcaaatgttgagttttcattatagttgattccactaaggctcattgttcctccatagtggatatactcatcaatcccacaaatgttaagcacatactcgaagtctcggtatggaataaatgttgtatgcataagaatgcatctgtcataaagttgttcatcttctgtaaatataaaacccaaagagtccgtacctgacaatactattttcatgccacatgttgcaaatacatcagaaaatagtgctgcaccttcaatgaagtcatccattactgtcacttcatcaagaaatacgtaacataccccatgtctttccaattctttaaggtcatgatttatatctgctaaattattttttaccgttatttgaatgaatgctgctttctccaactcttcatcgttcatttctgcaaaaatctgacgaatcatagttgtctttcctgttctacgtaaaccgtacaaaatgaaaaccttgtcatgattctcgctataaataaagttatgaagttgttgaaaacactctctctttcgatagtttttgactggagctgaaaaagaacgtagcacgcttcctgttaaaacgtttgtaataaaagaagttgtgtttaccttttgtttttttggtaagctagtttttatctcttttaacttattttctaacttttttctttcttctatcagtgtacgatagttttctacttcatcgtttggaatatatttttctcttcgcttcctattctcagtccagcgatgatagaaataaacttttccgtttacattctttttcgtaatagaaccaggtggtagattagaaatcttttgttctaattcttttatatggacttggattttagatgattccattatttgcctctttgaataagttgttctatcttattatacccctttatactcatatcaacaagggtataataaggtttgctgtagaacagtgtgcaaaaggctatatgatgacggctactttaagtggtcggtctacttctattgacaggtacaacaacttgaaaaatgttaaaaatatattcggaaaaatgtgtaaaactatgttgtgatattaaggaaaaatgtgtaaacaaaattattgtttaatgagaaaaaaggtgtacttagtgataagaaatgcaatcgaaaatttgatttattattcaaaataaaaccgagataatacctgttgaagtaaaaggaggagaagacaaatcagctccttcgtttaagcgatatgttaacactcataatccagaacatgcacttcgtttctcaaaacgaggctatcgtaaggattgtagtattacaaatgttccactttatttagttgatataattaaagatcttttgtgatagtataaatctttgaatgagtctcttattttattattatataaataaatatacatcaagtattgagcttagattacttaaaagttaggattattaactaattaagagtttccttttttgtttttactctaatggattttataactgttattagataatatcaaaagagggaaagaataatggaaacagtaagagattattttggttcacttgtattcaatgatgaagttatgttagaacgccttcctaaggatgtatataaggcactaaagaagacaattgctgaaggaaaagatttagatttaaacgttgccaatagtgttgctaatgcaatgaaaaattgggcagttgaaaagggtgcaacgcactttactcattggttccaacctcttactggaatgactgctgagaagcatgatgcttttatttctcctgttgatggaggaagagtaatacttgagttttcaggtaaggaactaataaaaggagagcctgatgcatcctcttttccttctggaggtctaagagcaacatttgaagcaagaggatatacagcttgggatccaacaagctatgccttcattaaaggtgatactctttgcattcctacagctttctgttcttattcaggtgaagttcttgataaaaaaactcctctcttaaggagtatggaagctattaatgaatatgctttaaaggtgctttctctctttggtaagaatgatgtaaagagagtaaatgcaactgttggtcctgagcaagaatacttcttgatagatgaaaatgattataaaaaaagaaaagatatcatcctaacagggcgaacactatttggtgctagaagcccaaagggacaggaaaaggatgatcattattttggcgcactacgaacacgtgttgctgactatatgcaagacttggataaggaattgtggaaacttggcataaatgcaaagactagccacaacgaggttgccccatgccagcatgagcttgctcctgtttatactgtttgtaatgttgctgttgaccataatcaaataacgatggagcttatgaagaagatagcagagaagcatcattttgcttgtcttttgcatgaaaagccatttgctggttttaatggctcaggtaagcatataaactggtcgcttgcaacaacagatggcgttaacctttttgaaccaggcgataaccctaaagacaacttaatattcttactatttttcgtagctgtaattaaagctgttgatgagtatcaagacttactacgcataagcgtttctagtgcaggtaacgatcatcgccttggttctagtgaagctcctcctgcaattgtatctatgtttattggtagtgacttagaagatgttttaaactccatcgctgaaggtacagtttttgaagagaagaagaataagaaaatgaaactaggcgttcatgtacttcctgaaatagctaaggattcgactgatcgtaatagaacaagtcccatggcatttacgggaaataagttcgagttcagaatgccaggttcttctttctctgtctcaggtccaactgtagttattaatacggcagtagcatcttcacttaagagtttctatgaagaactcaagacatgtgatgatatttcatctagtgtgatttctttagttggaagggtttatcttgaacacaaaaggattgtatttaatggtaatgcttattccgatgaatggagagaggaagctgagagaagaggactaatgaatctagtcggagctcctgaagcttttgatagatatacttctgaaaagaatattaagctttttgaagagtttggtatttattcaagaaaggaagttgagagtagaaaagagattcatcatgaagagtattcaaagactgttaatattgaggctctttctatgctcgatatagctttaaaacgtatctatcctcaagctgttaagtatgcatcattcttggctgagtcaataaagaatgttaaagatgttcttccttcttctgttactgagccaactcaggaactcttaagtcgagttttagatctctcgaatagcttatacaaggaatgctctatattagatgtaacaataaaggaagctctttctcttagtggttctgaacaatctcactactattacagtcaagttattcctagaatgaaagaagtcagaaagtatgcagatgacctagagctaatcgtctctaaagaatattggcctcttccgacttatagtgatattttgttctacaactaatatgattatttatctaacacaaaatgaaataaacatattatgtaacaaaaaagagactggctattaaccagtctctttattatttaatcttattttatttccaagaatgctttataagcatcattagcagaaataatgtcttttaccgatgagatttcccaaggtgcatgcattgagagaattgcaactccgcagtcaataacttgcatgccatagtaagctgagaacttagcaattgttccaccaccaccaacatcaactttagccatttctgccatctgataagatacattttttgcttctagtgctgctctaatttttccaataaattcaggattagcatcacttgctccgctctttccacgtgcacctgtgtacttattgaaaactacgccaccagcaaggaacgaagaatttttcttatcataaagagatgcatttaatgggtcaaacgcactgttaacatcagaagaaagcatcattgaattctttagtgctctctttagagtaagagaagaatactttccga

SEQ ID NO: 3273 - DNA, 14951 bp, synthetic construct
  misc_feature 1..14951: note = Synthetic
  source 1..14951: mol_type = other DNA
  variation 7361..7362: note = note, n is a, c, g, or t
accatatcgcgaccttctctgtcaggatctgcaagcactccctgctcgaatattgcagagccgtctgagaatgcaacagaatatgaaagcgaatcgaaggacgagcggttttcgattatatcaccagaagaaggatattgcttcaggctgcgctctgtgatgccggcttcgatacgaacatagattttagtagtgagcccttgcataagctctatacctgagataccgaaatcagcccaaagagaaagaggaaatgaattgaatgcaaaatcgccaagataagatgcatttattatcgtttgataaaatgactccttggcatagccaggtacaaaagaaagaatcaaaaccaagacagaaatcaatatcctcttttttctcatagtgcaaaccaaaatatccaaataaacctctttttatacggtattaaaaatgctaggatatttcaacttcaaataggagagcaaaaatggaaaacaaggtcccggagaacccttctaaaaaccggataggcgacttctcgccacttctggttgtctcatcaattttcgtaacattataccttatcgcaaacatcatggctgtaaaaattctcagcatcggctctttgtctatattcgatgccggtacattgacattccctttcgcattcatgctaggagatgtcatctctgagatatggggatacaagacagcaaagaaagttgtaatcttgacattctgttgcaacgcaataatggttgcattcacctttgccgcaatttacttgccatatcctgattacatggaaagcactcagcaagcttatgagacaatctttgcatatgtgcctagaatagtatttgcatcattgatttcatttcttgcaagctcactcgtaaatgcgaaagtccttgtcataatgagagatcgatcaaaagacagaaagcacctctgggcaagaacgattctgtcgtctatggctggatatgtatttgacactgtattcttcgtgctcattgcgtttgctggaacagccccagcaaaggatctatggtcgatgatttgggtacaatacattgcaaaagtatgtatcgaagctattgctggaactccactagcatattgcgcgattggtgtgataaagagaaaatacctcaaagcatagcaactgttgctgtagggtttttatttgacagccatttatcataaatgatatcgttatagacagcgtacaaaacagatgtacttaatttttttcagctaaaagaggtttacacatgccttcagatgacaagaatattgtagaattccctaacaaagcaaaggaagagaacccaaagaatgggaaaaagaacaagcaagcaaaggaaagaaagccacataaatcgattggatggataatcggtgtcataatcttgatcttgatttcaatcacattcattctacctacaacaattttcacgtcaacaggctcttcccagattgtattcggaaaatacaatggcaagaagatctcactcgaacttgacaatttcttctactaccagcttcagacaatagcaaactactatgcacagcaatatggtggcactcttcctcaagctgcatggggccaagtgtactaccaagcattccaaagctctgtcatatatgaagctgtctcagaaatggctgacaaagcaaagattgaaccttcatcagatgctataacaaaagctgtaatcgacttaggctattacaatgatgaaaatggcgatttcgattctgaaagatataagagcgcaacagatagcgagaaggcatctgctcaaaagatggcagagctttcactgccatacactatggtcatgtccgatatccaagcagctaagataccttcagcagagactgatttcatcgcatctctctcaaacgatgcacgttccttcgactatcttgttatcggagctgagaactatggagacgaagaagcaaggacttatgcgaacaacaacccagagccatttgtgcaaattgatctttctgctgtgacatatgcaacagaggctgaggcaaatgacatcctagcttcattgacatcgggagaaactacattcgaaagcgcatctgaaacaagtgttgatggatacaaatcaaacaaaggcaagattggtcttgtattcaaatacactctcgattcaatgctatcacaatcaggtgttgcagatgcatcagacttggtgttctcaacagcaaaaggaagctacgctggaccttattacacatctgcaggatatacaatattcagagtcgacgagtcccctgcaatggctgacttgagcgatcctagcgtactatctgctgtaaaagagtatattgcagcaaatgacaatgcaataatggcagcgtatcttgctggagttgcaaatgatgcttatgctgttgctcttgaggatgttgataaggctatcgccgatttcaatctagagtactactctgtcgatgatgttgcaaagaatagtggcaactctggtcttgtatactctatctctacagccgattcagcaggatatttgacagctgcaataagcgatgaagaatacctaaatactctatatagctctgagattggaaaagctattgctcctcaggtttctggctcatcatatataatcacactcccagaggaagcatcagagagtagcgatgaatctacaacttatgcaagctatataaagaagatgattcctacaatgtatcaatcatatgctgggcagttcgagcttcaggatcttcagaactcgatctttacgtcagacaaagttgagaacaacttctttgaagcatattactcaaaaatccttggatcatctaattgactcaaagaccaatagagaaaaaaagcaatacatgggaaagtcctgtattgctttttttgttataagagttcttcaagcttgccacatttgacaaggtagcttgagccagctgtggccttcgatggattgtcagagagagatgcaagcgacaaagggtatgatacaagcttcttgcctattgaccttgcgacagatatggcctcttcttttgcattctcttcaaattttgcatgctctgggtacattgcaacaggtacaacatagatcttctcttttgacacaagacatgcaacattagatgaaaagagtctgaatctcgactccacaaagcaaccatcatccaataaaagcttggttgcaatgtttgtcgagaatgataagaactcaccaagcgacatgtcctttcctacattttctttttgagttatatgatcgaaaaccaaagcttccatttatctcaaagcctcgaaaacacccttttctcggtttttccttacattgtcgtaatcaaacactctcccacccattgctatgtacacgccaggaggcagaagctgtactgcagctattgcaaagcctagattgaattccgcatctgagttctctagcgaatatgggatcattgctcctgtgaggactactgtttttccctctatagctggatcttgtgcaatgacatttgcacttgcaaccatagtatcggtgccatggataaccacaactttatcctctgttgatgccgagcaatgctttgcaatcaataccctttgcgcctctgtcatattcaagctatctacagcaagcactgtttccaacgttatttcaagagaagtcctcgattgctgcaatactcttggcaattgagactcacgaaatgtcaactcgccttttatcgcatcataaagcttatcgaaagttcctccagttgttattatcctaatgccatgcatattttccctctcttatgatatattatagatgctatgagcgattttacagttttaaatctcttagatatagacctaaaggaacacaattacctgtcgttaagttgcgtctcagggcgctctggactctctagagcaataacaaagccaaagataaatagaccaggattggcactttcagggttcttcgatgattttgcaatctcatcgatacaagtattcggccatggcgagattgcttacacaaagttattggaaaacaagaacaactacaaaactatagaaaagctgttctcataccaattgccatgtatcatcttttgcgaaggctctactccatctgaacatctaatggagctttcagagacgaatgcgattccaattttaaaaaccgatcttgattcatcagatttctctcggcgtctctatactatactcgatgaggttttcgcgaaaacagagacaattcatggagtccttatagaagtctttggaattggtgttttgatcacaggtggaagtggaatcggaaagtcggaaacagcattggaacttgtagaaagaggacataggctaatatcggatgatactgtaaaattgaagaatattgctgatacgactctaataggttctggagcaaatccggaatttgctcacaatatggagataagaggaatcgggataatagatttaagaaacatatatggcgttggtgcaataagagagaaaaaacaagtgcaacttgagatacatctcgaaacctgggatccagaaaaaaactatgacaggattggaggctcagagaaatcaacataccttggcatcacgattcctaaggtcactattcctgtaaagcctggaagatatattcctattcttgtagagacagcctcaagaaacgagagattgaagaagttgggataccactcatcaaaggaattcgacagaaacatatccaattggcttgaagtcgagacagcacgaagaacatactttggtgctgacaatgaggatcaatatggtaactagggaacttacagtactaaatagagctggcatacatgcacgcccagctgctgagattgcaaaaacagcacaacgcttcaagtcagagatatcactctctttggatgctatgactataaatgcaaaatcaataatgggtgtaatcacacttggagcaatctacaagacaaagctcaagtgcacttgcgatgggcccgatgagcgtgatgcaatcgatgcaatcgatagactttttgcaaacaggtttgagacttaatgaaagaactgacaaaaaggcaaaaagagatagtctctttcatcaaaagctatctaaacgataatttgcaaatgccgacgcaagaggagattgcaaaacatttctcgtttacgacagcagctgcacactaccacatagtcgcacttgaaaagaagaaagccatctctcttgagaagggggaatcaagaggcataagactatgccaaagcgacagagagaaaagagagaatatcgaaatcgattttttccaatcggaaccatcaatcgatgatttagataaaatcaatgcaaaaagctactatatacctagaagcatgaagcttgaaaagccctttgcatttactgtcacatcgctttcgatgaaagatgctggaatactcataaatgatatagcaatcatggagaaaacatccaaggcaaacaatggcgatatcgtgcttgcatatattccaaacagccagaacaagatagaattgagacgcattataaaaacaccccatttcttcgaattccaaagcgagaatgaaaacatgggcaatataaaaagcatgaacgctattatctatggagtgctaaaagcaatcaggaggaactactattgatttatctcttgcttggtcctgaagagggcgagaaatccgagtggctcaacaaagaaaaagaacgaatcaaaaaagagcacccagatgttgaaatctcgacattctttggaggagatgaagacgggagcgagctggcgaatgtgctttcgcaaagttcccttttctcttcatttagacttgtaataataaagcactacgaaaatgtaaagaaaacagatgctgtctcaaaggtaatcgaaaactttgcattggataatcaagaagatgctgagctgatcattctatcatcagagacctccacatcatcttttgcgaaggctgtcgtagacaaggcaaaggacactactctaaaattctgggaacttgatgatgataaaaagaagagctggatacgtctatatgcaaaaaaagaaggcttcttgatcacaaaccaagcaatcgatgagatactttcttctgttgaaaacaatacatcagagatgaaaaacctagtctcttcgataatctcatttctgaggacaggcaatagcgggcgaaacacaatcgatatagatgacattgagaattacacaactagagtcaaaggagagaatggttttacgctttttaaagctgtagctgatagaaatctcgaaaaatcgcttttgatcgtatcatcaatcttgctttcggattcaagagatgccataccagcttttacagtgctcataaaccaattcaggcttttggaagcgtgccttgagatgaaagggcaaaacattcctgagcgtgatatattcaagaatgtaagctatgtccagacatcagcctcagcaagaaaaactgtgggtattttcttcaaagaccaagatacattcagacgtgcaatgagaaactactctctttttgatacaagagcaataatcctttatgcctctggaatggacagtgagataaaaagtgccggcgatatgctaagaatcacattagagaatgctatatacaacataatagtcaataaaggaagaaagataaaaattactcttgatgcgcctggcctttgatcaaaagttcaatttccttaggattctttcagcaacagaaagtggtacttttgcaccctttgccaattgctcaggtgtcaatgacaatatattctcgatacttccaaaactttgcattatcctcttcgatctttcctttcccacaccatcaatagactccaagagcgagaatgatacttccttgcttctcatgttctggttgaatgtagttgcaaacctatggcactcatctcttagagcaatcaacactctaaggcctgggtcagagtggtcgagaaacaatgatggacgatccggaaatactatctcctcatgctcttttgcaagtcccactacaggaaaatgcaaatcaagctctgaaagagcatcaatagctgcgcttacttgcccttttccaccatctaccatcaacaaatctggcatctccgatccttccctcttaagtcgcgaatatcgcctatatacagcctccctcatagattggaaatcatctattttcccttccaggctctttatagaaaaatgcctatattccttattggatggatttccatctcgaaagacaatcaacgacgcaactgtgtattttccagatagttgggctatatcaaaaccctctatatgtcttggtaaaacatctagttggnnctcttctttcaatgcttccaatgctggtgtattgtcgatatccttaagtcgcttttcaacgtccctagatgcattctcctctgccattcgcaaaatcctatagtgctttccatcctttggaactgtgacatagatcggcgacttcaactcatccgagaagaacttcgacaacaaatttgcatctatctcatgtgatacaaatagctcatcagggagtgcctccccgtccgaataatactgaatcaagaaagaaagcaatgtctctgtctcatctccaagacactctgagcgatagagagcctttccaataagacgtccatttctaaattgcatcaaagctatcgtacaaagataagctctcatctcgattgcagcataatcacggctgtcttgatctgcgaaatcctctacaagttgattctcttgcattgactcgagatccttcaaaaggtctcttttatgtgccgctgtctcaaagtcaagtttttttgatgcctcaagcatctctttctcgacatttttgactatactagagtcatcgccagagagaaacttctcaactccctttatatattcgccataatcttttgctgatatggctcctatgcaaggacctgagcatctatggatatggtagtacaggcacggtgtctcgcgttttttcaatgcaccctggcaaaggcgcaaaggaaatgtctcagatagcatatctagataagcattaagccttttctctccaggatatggcccatagtacttagaaccatcctttataattcgtcttgttttgaaaacccttggatactcttcatttgttattcttatcacaggatagctctttccgtctttcaagagaatattgtaatgagggttgtatttctttatcagattattctccaatacaagcgcctcatattcatttcctgtgattatatagtcaattttcgcaatcttttcgacaagagcagctgtctttgcattcctatttgggagaaaatacgatgtaaccctctttttcagattcttagccttgcctacatagattacagtcccctctttgttcttcatcaaatagcaaccgggattgtccggcaacgagtatgcttgctctcttgcactttccatgagctaaaattaacacgaaaaatgcaaagataatagactgaacgtaaaatgatatctagaatatcaacgatgaatgctgttgacgatattctggaaaatcttcccatcgaaacaaagaaagaacttgtagatctatttgagaaaatacatttcacttcatctcaaaagcttgaaatagtaaaagacgaggcagatttgcatcaatggaaagaaaagccatttgtatcgctattaagtctggatgaagttcaatcaaaagatggcagaagtggtgagcgttatatgaaaaaactgagagaccatatgctcacacttcgcaaagaagaaacagactactcgtcattttttccaaaaagaaagcaacatccaaaaacaaaagcgacagttgatgatagtgcaattttaatcgggcgttgtccctgtcctgtggatggcgaaaagactcgctgttgcaaactcaggacgctagatgctgtacaacaatgctcttttggatgcgcgtattgctcagtcggagcgttctacaacaaaaacgagataagagttgtcgacaatctatcaaaacgacttgatgacatcgaactcgatagcgatatatggcatataggcacaggacaagcatctgattcccttttatggggcgatgactttggtacactatcggctctctccgattttgctaacaaccataaagacataataatcgagctgaaaagcaaatcaaaaagagatgtttttgatagaaaatacccaaagaacatggttttcacatggtcactaaatgcacctacaataatagaaaaagaagagcatttgacagcaaagcttgaagaaagacttgaatgcgccgaaagagcaagagacaataataatctggttggtttccatattcatccaatggtctatttcaaaggatggcaagatgaatacagagaagttgtgagagaaatagaaaaacgcttctctcctgataacatcatgatgatctctataggaacactgacattcacgaaagctgtgctaaaaagacttagggaagaaggcgaagaatcaagagtgcttgaaatggaactaacaccagcagcaggcaaattctcctaccctcttgatataaagaaaaagatgttctcacatgtctactcatttttctcgaaagacttcaaagacaacatcttcttctatatgtgcatggaagatccaagcctatggcaaccagtattaaacagaagctaccaatcagacaaagacttcgaagaagatatgaagagacattactttgctaagataaataacaagtcatatgggcaattcaaacaaaaccaatgacttatacagaatctaaaaacttgatcattacaccacgcccccatgtttatgctatgtcaaatccttttcagcataaaatcaatacgatattttcttacaacattttataataaacaatcgatgattaaaaaattttacttttctttatttatatcagataatattcaaataaaggaattggcaaataatgaaaaaagaaaaatcgctaacatatcaaacaagtatggaaaatataagaaaaagacttgattcgagagaatattccattggattagatcttggtgttggatcaataggaattgctgtagttgcaatggaacctgatgaaaatggaacactttatgctaatgacattatttatgcaagttccagaatctttacatcctcaaaaggagcttctgatagaagaaaatatcgtgggcaaagaaatagcatacgacacaaggcacacagactacgaaagctttggcaattgttagcaacaaagggattaatgaagccatatagctctgaaacagtagaaaacccagccacactaagattttcaactgaaatgctaagaagagatccatacaaattaaggctcaaaggcttaaaaaataaactttcgctcgaagagattggggttgctttatatcatatcgcaaatcatagaggatcttcttctgtcaggtcttttttaaatgaagagaaaacaaaagaagaagaaatggccgaagagcaaatgagcaaaacccaaaatcttgcaaaacgatataatgtagatacatatatagaagtgcttgattacttcaatatggatgagataaagggatatcggaataaggacacaaggtcctctagcttcataatgccaatacctacaagggatataattcttagtgaatttgaaaatttgattaatactcaaaaacaattttattcggatatacttgatgataatttcatatcaggcttacgagagataattttctatgaaaaccccaaaattgttccagaagctggaaattgtccatattttccagatgaaaaaaaattgcccaaggcagcattcattaatgaagaacgccgattatgggaagctttaaataatataagagttttgatagaccgacaaacagcaaacggactaatatacacagaaaaaatgcctctcgaaaaagatgaaaaagaaaaactgtttattgtcttgagagaaggcaacaatgttactccatcatttatcagcaaagcatttccaaaatatggaaaactaaaaaaggataatatcttattacaaggaagcgacaagaaaaacacagaaataaaagggttcagattcaaaaagttagagcaattaccatatttttcaattctaaaagatgatgataaagataaatacatatcactatttgttaacacgcctgatgacatctcattaaagaacaaacttatttctcagctaggcttttctaccaaaacagcagagtcagctatcctagatacaccaaagctagtgggagattatgctcctgttggcaagaccgcaatgacactcttaatgcctttcataaaagatggcctttccttccaagaagcagaacaagaagctattcaagaaggaattattgaatcacagatagaaaagaaagtttatgattatttgccttactatggcgaagtagtaccaagctcaacacagagtctagcgggcaaggcttggcactcatctttttctagcaagattggcaaaaaaggattcataaaacctgatacgaataaagatgaagaaaaatatggccgtattgcaaatcctgttgtacaccaaaccctcaatgaactcagaaaactagtcaatgaagtcattaaaatcatgggtaaaaaacctcatgaaataacagttgaacttggtcgagaattaaaacttggcaaagaagcaagggaaaaactaatacaagacaacaataacagagctaaagataatgaaaagatatatactaaatattgtgttccaaataatctaccaacaaaatatatcaagagattcaggcttttggaagaccaagattataaatgcccatattgcttaggttcaattaattgcaatgatgttatttcaggaaatgccgacatagaccatatatttccaaaagaagatactgcagattcatcggaaaacaatttagtgcttgcacataaaatctgcaatgaaaatcgaaaaaagaaacaaattccacaaaaagcctttggttctgatactgttctgtggaaccgaatcgagcaatacctagataacactcctaaaatggccaataaacgatggcgattcgaaatgactgatgataaataccaacaatatctcgctaaaaatacttttctcaatagatttaaatcagataatgcctttgtagcaagaattgcctgcgagtatttgctttctctttttcctcctgaaaacaagttcattgcagtgcgaactataaaaggggctgaaactgcggcgttgagaaaagcttggaatttgaatgggattactaattcattagcttcacttcactctggagaagacaatgatactctggatagcaagaacagaacagatgctcgccatcacgccctggatgcaataatcgcagcatactatacatactctgcaaaacagatgattggttctatttctcagaacaactgtaaccaagatgagatagctcaaagagtaccaattccaaagttttttagaagaaacaaaacacttagcacatcagaacaaaggaaggattttcgaaaaacaattgagaattttataataaataatacttttgtaagcagaaaagttgacatcaatagaaatggagaactattggctgctactcaatattcaatattagcaataaaagatgagaacttgattctttatactaaaaaacgattaaagaatatcaatgcatcaacattctttggaaacaaatcaggttctgtagaatatgcattaaatgggaaattttcaaaaccaaagtggataaatatggaacaagaaaaacaaatagataaactactagagcataatcagcaattatttgaatctattatatctaacaaagataaagcagaggaagaattgcaaaaagaaaattacaataggatttcaattggcaaaaaaacaatttctattgatgaaaaaaagattgtaacaatggctctgaagcttacaggtggcatatattacaccttaacaaataatcaacggaagaaagttttcattgcaaaggaaccgactttaacagaaaaaggttttgcctttgatactggtgaaaacttttctcttgatttatttcatgatgagaacggtaaaatcaatggggaaatcattagaaaaataaatgctgtaaatgcaaaatatgttccacaatacaagaaaaaaggcttcagtctttttgaacgtatatacccaggtgatattcttgaagttgatttaattccgcgctctccaactggtgcaccaaaagactttgtaaaagggattaagtctcccaatgcaccacttgacaagacttttctagtcgtcaaaacatttactgaagcaggtaaaagtatccaagtatattatgattctctaatgtcatctaaacccgaacaaaaagggtcattttacatatcagttttaaataaacaaaatattcgaaaagtctgtttgaccgaagcaggcctgttgatatatagatcaaggttactgaaggatagagagaatgtggagagttcttgaaattgcaggtgacggctattttctacatgttaataatcgaaacatctttgtcgaaaaagatggagaaatagctttacctatagcctttgcagatgttaactctatcatttgtcatggtaaaaatctgaggttttcagagtcatttcttgaaggttgccttaagaatgaaattcctctaaccttctgcgatgaaaaacacattcctctgggaatacttcttcctttttatcaacacacagacagcttacaacgcatagagaaacaaattacagcaaaattaccaaagaaaaaacaagcttggcaactgattataaaagccaaaataaatgcgcaagcaaaagtcttgcattattatggaaaacagcaagctggactaattctgaaatcaatgtctgatcatgttctttccggcgattcatcaaacctagaagctcaagccgctaaattgtattttacatcattatttggtaaaaatttcatacgtgcagatgatgatgacagtataaacatccttttgaattatggctattcaatcatacgatcatctgtggcaagagctgttgtgtcatgtggattatatcctggatttggtgtattccattctggacgaattaatccattttgccttgtagacgatttaatggaaccactacgtccattagctgacaaaaaggtctttgacatatataaacacaatgaaaatgtaaaattaacgccaccaataaaaaaggatctgatttctttagccacagaaaatatgagatacgggaagtcgtcaatggaattatctacatctacccgaaaatatgttatggaatatttgtcttttatatcgggcgattctagacatattacttttcctgaaatagaggatacctaaatggctgtaggagcatatgaggcagtgtggttatttgtaggatttgatttaccaaccctaaccaaagaagatcgaagaagagcttccaatttcagaaaagatttgctcgaaatgggttttagaatgtttcagctctccttttatacttattatttcaaatcaaaacagcaagctgaaacagttgcaaatagaattgaaaaactggtaccctcaaatggttctgtatctatcttctttataacagacatgcaattttcaatgatacgaacatattatggagggaaaactattacagaaactgagccagaacaaggcattcttcttttataaaaaagagcctccaactaggaggcatttttcgactgatgtcttattagagaaaccactcgacttaaattgtgatgtttagagtataactctttttggtataatttgaaagtaaaattttaaaaaaaagggattcatcctacaaaatacgtacggataaatccaaaattgtaactattcagtcgcata

SEQ ID NO: 3274 - DNA, 12907 bp, synthetic construct
  misc_feature 1..12907: note = Synthetic
  variation 2900..2901: note = note, n is a, c, g, or t
  source 1..12907: mol_type = other DNA
  variation 4080..4124: note = note, n is a, c, g, or t
  variation 5764..5788: note = note, n is a, c, g, or t
tacagatcttctgttttatctccgtgatgagagtgaaaataatatagatgatgacgataaatacaatcttctccgcagacgatattgggcttatgcacttcctattataaaagaaaagaatgaagaaaatggtactttctctaatgttaattcttcaaaaggtagttggcttagtggttcttttggtattgggggggttactatctgctgtgtggtaaactatcttggtgttcgagtagaagttctatttggaaagaaaaataaagaagagaataaaaatgcctttgacaatctatataaacaccaaaaagagattgaagtggcattaggaactactcttcaatggaaaagtgatgatgataataagacatcaaaggtatttgttgaactcaagaatgttagtatcggaaatgaaacaaattggctacaaatggcaaatttccaagctacatgggtaaagaaattctatgatgttgttgtcccatacataaaataaatagagttctaaattttactctttatatcgtgaaataagtacatgaaattatatactatctttttatgcacaaggacatattttgacctagtgaatggcataaaataagaacacagcgagtatattccttgtataattgatgtattaggtggcgatatagatttatagaattaattgtaatggaaaaataattaaatagaaaatgggaggggtgtggctttatggagaaagaaaaatcacgtatttatcaagatgttgctagcaatattaagaatagacttagggatagaaattattctattggtttagatcttggtgtaggttcaattggaattgctgttgttgcaatggaacccaacgataaaggaataaattatcccacagaattaatatatgctaattctaggatttttacctcttcaaaaggagccgcagaaagaggacagtttagaggtcaaagaaatagtataagacataaggcacataggttaagaaagctttggcaactactagctactagagggtttatgaaaccatattcctctgaaatagttcaggatccagctattctgagattttcgaaggaaatgataaagtctgatccatatgaattacgacttaaaggattaaatgaaaagctttctatagaagaaataggtgtcgctctctatcatttggcaaatcacaggggttcctcttctgtgcactcttttttggatgaggaaaagacgaaagatgaagaaaaagctgaagagcaaattaaccaaacaaaaaatcttgctaaaaaatatggtgtggatacatatattgagatactaaattgtttcaatatgaatggaataaaaggatatagaaacaaggatgtaagaccttcagattttataatgccaatgccaacaagagatataattcttaaagagtttgagaaacttattaatacacagaagtacttttatcctgatcttttagatgaagattatatttctcaaatacatgatattgttttttatgagaatctcaaaattgttccagaggcagctaattgcccatattttcctgaagaaaaaaagttgccaaaggcatcttttcttaatgaagaacgccgattatgggaagccttgaataatgtaagaattttaatggagagacaaacagaatcagggcatgtctatgtggaaaagatatctttggagaaagatgaaaaaaagcaactctttaaggtattaagagatgggagtgatatttctccagcttacattcgcaaagtctttcctaaatatggaaaattgaaaaacgagaatattctacttcaaggtagtgataaaaagaacacaaatataaaaggatttaggttcaaaaaacttgaagagttgtcctgttttaaagaattaagtgacaatgataaagacaagtatatatcattgtttgttaatactcctgatgatgattcgttgaaaaagaagctaatttcccaacttggattttcagaggaaaaggctgatgatgtaataaaaaatacaccaaagcttataggagattatgctcctgttggaaagacagcaatgctattattaatgcctttcattgaagatggactatctttccatgaagcggaagaacaagcgcttaaagaaggtattcttgaatctcatacagatcaaatagtttatgattatttaccttattatggcgaagtaattcccaattcaacgcagagcctagctggtaaagcatggcactcttcattttatgataaagtaggtaaaaaaggttttattaaacctcatacaaattcagatgaagagaaatatggacgaatagcaaatcctgttgttcatcagaccttaaatgagcttagaaaactagttaatgaagttattagtattatgggtaaaaagcctagtgagataacagttgaacttggtagagaactaaaattaggacaagaggcaagagaaaaactcaatctagataataatatccgttcgaaggaaaataaaaaaatatacgatgagtattgtattcccaatagtctgtctacaaagtatataaagaggtttaggttattagaggaacaaaattataagtgtccatattgtctaaatatgataaaagcaaatgatgttgtttcaggtaatgcagatatagatcatatatttcctgaagaagatactgctgattcatcagagaacaatttggttcttgctcataagtattgtaacgaggtagtaaagaagaaacaaattccaagagtggcttttggttcaaatgttgttttatggaacaaaattgagcaatttatagatgaaacttcctcaatggagagtaagcgttggcgttttgaattgacagaagaaaagtatcaagattacctagcaaaaaacacctttcttaatagatttannttttaaatctgacaatgcttttgctgctagaattgcgtgtgagtatttactttctctttttcctgcagaaaagaagtatacagctgttcgtactataaaaggagctgaaactgctgcattaagaaggtcttggaatttaaatggtataacacagttactagcgtcctttcatttaatggaagagaatgatgattttgtcaatgaaaagaataggttagatgctcgccatcatgctttagatgcaatagttgctgcatattactcctattctgttaagcagatgattaattctatttctaaagaagggagcaatcaaaaggaaatatctaaaagagtaccaattccaaagtattttagaataaataataatttaagtaccacagagcaacgaaatgattttcatgattacattgagaattttttaataagtaacacatttgtgagcagaaaagttgatactgataaaaatggagagttattaaaggccactcagtatttaatattagccatgaaggatgatagtcttattttacttacaaaaaagagattaaagaagctaaaagcaaaaacatttctaggaagtaaatcgggatccatagaacatgaattgagtggaaactatgtaaaacccaaatggcttaataacgatcaagatagggaaattaataattttttgattcacaatcaacaactattcgagttgattttagcaaataaagataaggcaaaagaagaattagaaaaggctaatgaagaaagaatttcagttggtaagaaatccattgaaataaatgaaaaacgaattgttgcaaaaacgattgagattacgggtggaatgtattattccctaacaaataaccaacgcaaaaaagtctttgtagctaaagaaccatcttgttctgagagaggttctgcttttgatacaggtgctaatttcgctcttgatttgtatcatgatgagaaaggcataataaaaggagaggttatcagaaaaattagtgccattgataagaattatgtaccagagtacaaaaaaaagggcttttgtctttatgaacgtatttaccccggagatattcttgaagttgattatgtgccacgatctcctaccaatgcaaagaatgattttgttaaaggaattattactccaaatgcaccacaaggaaagacctttcttgnnnnnnnnnnnnnnnnnnnnnnnnnnnnnnnnnnnnnnnnnnnnntttacagaaaagggaaaaagtgttcaagtgtattacgattctttgatgtcatcaaaagcaggacaaaaaggatcattttatacgtcggccttaaatagtcaaagcataagaaaagtctgtttatctgaggctggaatagtagtatatcgttcaagactattaaaggatttaaaaaatgtggagagtacttgaaattgccggagatggttactttttgcatgttcgtaataaaaatgtattagtagagaaagaaggaagacctcctttacctatatctttttctgaccttcattctgttatctgtcatgggcaaaatataagttattctgattctttttttgaagggtgtcttagaaacgagattcctattactttttgcgatgagaagcatcttccattggggatgcttcttcctttttatcaacatacagatggattacagcgtatccaaaaacaaattaatgcaaaacttccaaagaaaaaacaggcatggcgactaataataaaatctaaaatttctgcacaggcaggtgtcttatctttttttgaaaaagaaagttctattattttgaaagcgatggctgaccatgttctttctggagattccacaaatttagaagctcaagcagcaagagtatattttgaatcattatttggggaagattttgttcgctcagatgacgattgcgagattaataccatattaaactatggatattcaattataaggtcaactgtagctcgtgcggtttcttcttgtggattacacccaagttttggggtatttcattcgggtagaataaatccattttgtcttgttgacgatttaatggagcctcttcgtccaatagttgatagaaaagtgtttgatttgtatcagtgtgaaaaaagtatagagctaaatccttacataaagaaaaatttaattggtttaacaaccgagcctgtaaaatttgggccattatctatggaactacctatagctgttagaaagtatgtaatggaatatttgtcatttatttcaggagagaagaacgatattactttcccgaaaatgaaggattaattcagtggcagtaggagtatatgaggcggtgtggctatttgtaggatttgatttaccaacgttgacaaaagaagataggcgaagagcttctaattttagaaaggatttgcttgatatgggttttagaatgtttcaactctctttttatacttattattttagatcaaaacaacaggcagaaactgtagcagatagaatagaaaaactagtccagaaaaatggaactgtttctatcttttttattacagatatgcagttttcgatgatcaaaaccttctatggtgggaaagtaattgacgaagttgaacctgaacaaggtttattgcttttataaaaagagcctccctttcggaggcatttttcgactaacgtcttattagagatgttacccgacttaaactatgatgagcctattttatcaaattatattagaaaaaagaagtcaaaaaatttaaaaaatgggatttagtacaataaaatatacctaaaatcccaaaattttgaagaagtttttcttctaacttcaataaaactaacaatttaatgctagtaatattgtatcatagtttaaatnnnnnnnnnnnnnnnnnnnnnnnnnatagtttaaatcgagtagcatccccaacaatatcctgcttaacgacgccattagaataattgtatcatagtttaaatcgagtagcatccccaacacacttcaagaaaaaacgcttggccgatacattgtatcatagtttaaatcgagtagcatccccaacgcatgcatccggcaccacagagcaagccccattgtatcatagtttaaatcgagtagcatccccaacgccaaggaagttgttttagaagaggcgttgattgtatcatagtttaaatcgagtagcatccccaacaaaaagcttacgataaaaagccctcaatctattgtatcatagtttaaatcgagtagcatccccaacctcaagatgtatataacgctcttctctctcattgtatcatagtttaaatcgagtagcatccccaacggagaaaacataagaactactagaaagcatattgtatcatagtttaaatcgagtagcatccccaacatataaatgaagtaaagttttgcaattattattgtatcatagtttaaatcgagtagcatccccaaccaaagagaacactcataaacagaatggcaaattgtatcatagtttaaatcgagtagcatccccaactaggaattaaaagcacttatgagaatacggattgtatcatagtttaaatcgagtagcatccccaacggataaaggtagaacaattccttttcaattattgtatcatagtttaaatcgagtagcatccccaacttagagcactgcataccaaaacaaaaatatattgtatcatagtttaaatcgagtagcatccccaacagacaagttggagtcacgcaaagacaaacaattgtatcatagtttaaatcgagtagcatccccaaccagaagtacagcaagctatctttgacatggattgtattatagtttaaatcgagtagcatccccaacattctgtcatgttatgctcctctgaatagaattgtatcatagtttaaatcgagtagcatccccaacgactaaagaccaaagagctagatctatattattgtatcatagtttaaatcgagcgacatcccacatattataaaggtatataggtaacttaaaggagagagagtcagaattgcaacatggtgttaaaaatggaataatcacctctttatatgcaaaaacttgcatatagaggaattgtttttttattgttttcaaagccaaagtttttgctagatattttgatagcataacttggtttatattttgacagataaacattgaggctttttgctttaacattatctgcagatttaacttctattggtataatttgtccatctttttgaattatgaagtctacttctgctccccgttctgatgaccaatagtatgttttgtagccattggtaatgagagtttgattaacgtagttttctgtcattccacctttaaagtcatttaagtctggagaagagtagatgatatcagaaaaaagaatatctttttttgcacaaagaagcccagaatctgaaacgtagattttgaaggcatcaacatctctatagttttcgagaggcttcattatgttttctactctgtagactttgtttacaatacctgaaagataaagccactctatggcgttttcaaattcagatgctcttgctccactttttatgagtttatattggaatcttgtattctttttagataactggacagttatgttatcatatacaagtcttgttttctttatttctttagtagtattgtatttgctcatatcattaagataacttattagaatattgttttgagagtttctgactagtatgtaatctttagtttgtacatactgcatgacgcactctggcattcctcctactgccaaatattctttgtataaagaaagtgctttatcgtgtaaaacagatggaagaggagtatttgtatcaaatgctttttgtatcatattaacgagctctttttctccatttgcaatgaagaactcgtctatactcattggatacattgtgactatatcaactttaccaactggaaaagaaaaactagatctattgacagcaactcctaaaagacttcctgctacgataatatggtattcaggagcttgctctgaaaagtatttaagtctagttaaagctctttccgaaagttgaacttcatcaaagactatgagagttttttctttcataattgatacccctgccatatgagataaaagaggcaacaaatagcttggttctatgctttcgctgaatgtatcatttaattttggatttgtttcaaagttaaaataagcaacattatcataatgagttctgccaaactctaagattgaatacgttttcccgacttgtcttgcaccttgtactatgaggggcttacgatatttgttttctttccatacctttaaatattcagatattctgcgatacatttgtacattcctaattcttatttatatgtatagtttaacataatttagaaattattcatgtaaaaatacagtgaaaaaatgtgaaaatttacactaagccacattaatattagaaattgtacttatctttgattagcctgaaatagggtgttagctatttaattatgaacatttcttttgataccttctcatatctattgccatgtctatgcttttaattcaattactatagtaagatgcattttcgatatcttcttcaattagaatgataaaagcgattagagttatatattggttcgcccatgatataaaagaagtaagggctaataaattagtcgagtcgtttaggagtatattttgaaaaaggttatattaattccagattcttttaaagggacgatgtcgtctattgagatctgttcaataatgaaagaaaaaataaaaaagtattatcctgattgtgaagtggtatcaattgcagttgctgacggcggagaaggtagtgttgaagcatttttatcttccctcggagggaaaaaggtctatatagaagttactggaccttattggggagagaaagtaagagcttattatggcattcttcctaataacacagctgtaattgagatggcagaggctgcaggacttcctttggttggagataataaagacccatcaaagacaacaacttatggtgttggagagctaatacttgatgcggtaaaacgtggtgctagtaaaataatacttggcttaggtggctcagctacgaatgatgccgcttgtggccttgcttctgctttaggcgtaaaattctatgattcagaagataatagttttattccaacaggcgaaagcttagatagaattgagaaaatagatctatctaatatagatgatgctagagttaagaagactccaatggtaacaatgtgtgatatagataatcctttttatggtaaggacggagctagttatgtctatgcaccacagaaaggtgcaacgccttctatggtagaagatttggacaagaaaatggaaaagctagcatctttaataaaaagagatttcaatattgaccttcaaaagattctaggttctggcgctgcaggcggcatgggaggaggaatggttgcattcttttcttctaaactccaaatgggtatagagacagttttggaaacagtaaagtttgattctcttttatctaatgcagattgtgtttttacaggtgaaggacgattagatagccaatctcttagaggaaaagttgttattggtgttgcaagaaaagcgaaggaaaagaatgttcctgttgttgctattgttggcgatattgctgataacattgaaaatgtgtatagagaaggcgtgagtgcagttttctcaataaatcgagtcgctcttccttattcagagcaaaagaaaagagctaaatcagatttagctctaactatagatagcctaatgcgatatcaaaagatgatagaaagaggataataagtttactctatttattcttaagcatctttaagtattcttctacattttgatactgaatagtatctaccatttgtgtctcgcctctgtagagaacatattttcctgtgattggtccgtagcgatgttctgtttgtgcacatttttctttatcaattagatgtcgatactgcctagaatcaatctctttgctatgcttgatttcaaaaattttgcatgagccaagctttggatcaaatattaccatatcaaattcacctacagaaaattgtaggacaaacacttctttttgtgggtttgctagttttgtctccaataagacaatatcttctagcatccttcctttaatttctgtgagtatccgttcttgtataaaagttcgctctttcagagataatgcactaaatgtctcatctagtaacaaactctttattaaagcttctgattgcgcatatctaagaccaggttgagcaattacagtgcgactagatttctttttaacatctggtaacgagaaaacatcaatatctttggttaaatctaataaatccaagtattcttttatctctgttacatgtgcattatctaatattactgtctgttcttctttgtttttgatttctaggagcttccttacgttgtttgtaacactagcgatgtcgatattatctaaaatatctgtcggttttttgctatctcttcgaagattgcttcttgaaattcctaagtcatgggatttccattcttctgtcaaaacttctagtgtgaaacgatggtttatatcttctacaacgcgatttattgcactagttaattcatctttttcatacaagtcttttagatttcgaaaatgttctccattttgataacagcaaagagcatgttgaatgttgtgtgcaattgcagtatcaacatactcatcggcattctttttgcttgcaaatgttgagttttcattatagttgattccactaaggctcattgttcctccatagtggatatactcatcaatcccacaaatgttaagcacatactcgaagtctcggtatggaataaatgttgtatgcataagaatgcatctgtcataaagttgttcatcttctgtaaatataaaacccaaagagtccgtacctgacaatactattttcatgccacatgttgcaaatacatcagaaaatagtgctgcaccttcaatgaagtcatccattactgtcacttcatcaagaaatacgtaacataccccatgtctttccaattctttaaggtcatgatttatatctgctaaattattttttaccgttatttgaatgaatgctgctttctccaactcttcatcgttcatttctgcaaaaatctgacgaatcatagttgtctttcctgttctacgtaaaccgtacaaaatgaaaaccttgtcatgattctcgctataaataaagttatgaagttgttgaaaacactctctctttcgatagtttttgactggagctgaaaaagaacgtagcacgcttcctgttaaaacgtttgtaataaaagaagttgtgtttaccttttgtttttttggtaagctagtttttatctcttttaacttattttctaacttttttctttcttctatcagtgtacgatagttttctacttcatcgtttggaatatatttttctcttcgcttcctattctcagtccagcgatgatagaaataaacttttccgtttacattctttttcgtaatagaaccaggtggtagattagaaatcttttgttctaattcttttatatggacttggattttagatgattccattatttgcctctttgaataagttgttctatcttattatacccctttatactcatatcaacaagggtataataaggtttgctgtagaacagtgtgcaaaaggctatatgatgacggctactttaagtggtcggtctacttctattgacaggtacaacaacttgaaaaatgttaaaaatatattcggaaaaatgtgtaaaactatgttgtgatattaaggaaaaatgtgtaaacaaaattattgtttaatgagaaaaaaggtgtacttagtgataagaaatgcaatcgaaaatttgattttattattcaaaataaaactgagataatacctgttgaagtaaaaggaggagaagacaaatcagctccttcgtttaagcgatatgttaacactcataatccagaacatgcacttcgtttctcaaaacgaggctatcgtaaggatggtagtattacaaatgttccactttatttagttgatataattaaagatcttttgtgatagtataaatctttgaatgagtctcttattttattattatataaataaatatacatcaagtattgagcttagattacttaaaagttaggattattaactaattaagagtttccttttttgtttttactctaatggattttataactgttattagataatatcaaaagagggaaagaataatggaaacagtaagagattattttggttcacttgtattcaatgatgaagttatgttagaacgccttcctaaggatgtatataaggcactaaagaagacaattgctgaaggaaaagatttagatttaaacgttgccaatagtgttgctaatgcaatgaaaaattgggcagttgaaaagggtgcaacgcactttactcattggttccaacctcttactggaatgactgctgagaagcatgatgcttttatttctcctgttgatggaggaagagtaatacttgagttttcaggtaaggaactaataaaaggagagcctgatgcatcctcttttccttctggaggtctaagagcaacatttgaagcaagaggatatacagcttgggatccaacaagctatgccttcattaaaggtgatactctctgtattcctacagctttctgttcttattcaggtgaagttctcgataaaaaaactcctctcttaaggagtatggaagctattaatgaatatgctttaaaggtgctttctctctttggtaagaatgatgtaaagagagtaaatgcaactgttggtcctgagcaagaatacttcttgatagatgaaaatgattataaaaaaagaaaagatatcatcctaacagggcgaacactatttggtgctagaagcccaaagggacaggaaaag

SEQ ID NO: 3275 - DNA, 5836 bp, synthetic construct
  misc_feature 1..5836: note = Synthetic
  source 1..5836: mol_type = other DNA
agtgatgatgataataagacatcaaaggtatttgttgaactcaagaatgttagtatcggaaatgaaacaaattggctacaaatggcaaatttccaagctacatgggtaaagaaattctatgatgttgttgtcccatacataaaataaatagagttctaaattttactctttatatcgtgaaataagtacatgaaattatatactatctttttatgcacaaggacatattttgacctagtgaatggcataaaataagaacacagcgagtatattccttgtataattgatgtattaggtggcgatatagatttatagaattaattgtaatggaaaaaaaattaaatagaaaatgggaggggtgtgactttatggagaaagaaaaatcacgtatttatcaagatgttgctagcaatattaagaatagacttagggatagaaattattctattggtttagatcttggtgtaggttcaattggaattgctgttgttgcaatggaacccaacgataaaggaataaattatcccacagaattaatatatgctaattctaggatttttacctcttcaaaaggagccgcagaaagaggacagtttagaggtcaaagaaatagtataagacataaggcacataggctaagaaagctttggcaactactagctactagagggtttatgaaaccatattcctctgaaatagttcaggatccagctattctgagattttcaaatgaaatgataaaatcagacccttataaattgcgacttaaaggattaaaagaaaagctttctacagaagaaataggagttgccctatatcatatggcaaatcatagaggttcctcttcggttcgttcatttctagatgaagagatgacaaaagatgaagaaaaaactgaagagcaaattaatcaaacaaaaagtcttgctaaaaaatatggcgttgatacatatattgaagtacttaattgcttcaatatggatggaataaaggggtacagaaacaaaaatgtaagagctactaattttgtaatgccaatgcccacaagagatattattcttaaagaattcgaaaagttcctcgacacccaaaaacagttttatccaagtcttcttgatcctgattatatctctcaaatacgtgatattattttttatgagaatccaaaaattgttccagaggtagctaattgtccatattttcctgaagagaagaagttaccaaaagcatcatttcttaatgaagaacgtcgattgcgagaagccttgaataatgtaagaattttaatggagagacaaacagaatcagggcatgtctatgtggaaaagatatctttggagaaagatgaaaaaaagcaactctttaaggtattaagagatgggagtgatatttctccagcttacattcgcaaagtctttcctaaatatggaaaattgaaaaacgagaatattctacttcaaggtagtgataaaaagaacacaaatataaaaggatttaggttcaaaaaacttgaagagttgtcctgttttaaagaattaagtgacaatgataaagacaagtatatatcattgtttgttaatactcctgatgatgattcattgaaaaaggagctaatttcccaacttggattttcagaggaaaaggctgatgacgcaatagaaaatacaccaaagcttataggagattatgcccctgttggaaaaacagcaatgctattactgatgcctttcattgaagatggactatctttccatgaagcggaagaacaagcgcttaaagaaggcattctttactctaacacagataaaatggtttatgattatttgccatattacggtgaagttattcctaattcaacacagactttagttggtaaagcatggcactcttcttttcaggaaaaatttaagggaaaaggttttataaaacctcatacaaacccagatgaagagaaatatggtcgaatagcaaatcctgttgtacatcagactctaaatgaattacgaaaattagttaatgaagttattgagattatggggaaaaagccaagtgaaataactgttgaactaggtagagagctaaaattaggtcaaaaagcacgagacgaatatgtattagacaataacaaaagacttaaagaaaatgaaaaaatatataaagagtattgcgtacctaacaatttagccactaagtatataaaaagatttcgattgctagaagaccagaattacaaatgtccatattgtttaaatgcgataaattcagatgatgttgttttaggatatgccgatatagaccatatatttccaaaagaagacactgctgattcatcagaaaacaatttagttctcgctcataagcattgtaatgaggaagtaaagaaaaaacaaattccacgagtagcctttggagcagatcctgttttgtggaataagattgagcagtttttagataatactcctaaaatgaagaacaagcgttggcgttttgaattgacagaagaaaagtatcaagattacctagcaaaaaacacctttcttaatagatttaaatctgacaatgcttttgctgctagaattgcgtgtgagtatttactttctctttttcctgcagaaaagaagtatacagctgttcgtactataaaaggagctgaaactgctgcattaagaaggtcttggaatttaaatggtataacacagttactagcgtcctttcatttaatggaagagaatgatgattttgtcaatgaaaagaataggttagatgctcgccaccatgctttagatgcaatagttgctgcatattactcctattctgttaagcagatgattaattctatttctaaagaagggagcaatcaaaaggaaatatctaaaagagtaccaattccaaagtattttagaataaataataatttaagtaccacagagcaacgaaatgattttcatgattacattgagaattttttaataagtaacacatttgtgagcagaaaagttgacacagatagaaatggagaattgttagcagcgactcaatattcgatattggctactaaagatgacaatcttattctatttacaaaaaagaaattaagtgatttaaaggcatcgacatttttggggaataaatctggttctgtagaatatacgctaaaaggaaattttccaaaaccaaaatggcttactgctgaacaaaatgagcaagtagaaaaatatttagaatataatcgacaattattcacattagttctctctaacaaagacaaagcaaaaaaagaattagaagatgataatgataagaaagttttaattgggaaaaaaaccgtttcgattgatgaaaagagaattgttgaaaaagcacttaaattaacaggaggaatatattattccctaacaaataatcaacgtaaaaaaatctttgtatctaaggaaccaactgctttagaaaaaggatctgcgtttgatacaggtgaaaactttgctcttgatttatatcacgatgaacatggaaaaattaatggagaggttattagaaagattaatgcagtaaataaaaagtttattcctgagtacaagaaaaaaggttttaaactttatgagcgtatataccctggcgatatacttgaagttgattatgtgccacgttcccctgttaatgcaaaaaatgactttgtgaagggaatagtttctcctaatgcaccacaaggtaagacttttcttgttgttaagacatttactgaaaatgggaaaagtattcaagtatattacgattctctcatggcatcaaaggttggacaaaatggatcattttatactgctggcttaaacaagttaaatataagaaaggtctgcttatcggaggctggaatagtagtgtatcgttcaatgctattaaaggacttatgaaatgtggaaagttcttgaaatagcaggagacggttatattttgcatgtccgtaataagaatattttagtagaaaaagaagggataccttctttacctatatcatttgctgatctccattctgttatttgccatggtcacaatataagcttttcggagtcattttttgaaggctgtcttaggaatgaaataccaattactttttgcgatgagaagcatcttcctttggggatgcttcttcctttttatcaacatagtgatggattacagcgtatccaaaaacaaattaatgcaaaacttccaaagaaaaaacaagcatggcgactaataataaaatctaaaatttctgcacaagcaggtgttttatctttttttggaaaagaaagttctattattttgaaagcaatggctgaccatgttctttctggagattccacaaatttagaagctcaagcagcaagagtatattttgaatcattatttggggaagattttgttcgctcagatgacgattgcgagattaataccatattaaactatggatattcaattataaggtcaactgtagctcgtgcggtttcttcttgtggattacacccaagttttggggtatttcattcgggtagaataaatccattttgtcttgttgacgatttaatggagcctcttcgtccaatagttgatagaaaagtgtttgatttgtatcagtgtgaaaaaagtatagagctaaatccttacataaagaaaaatttaattggtttaacaaccgagcctgtaaaatttgggccattatctatggaactacctatagctgttagaaagtatgtaatggaatatttgtcatttatttcaggagagaagaacgatattactttcccgaaaatgaaagattaattcagtggcagtaggagtatatgaggcggtgtggctatttgtaggatttgatttaccaacgttgacaaaagaagataggcgaagagcttctaattttagaaaggatttgcttgatatgggttttagaatgtttcaactctctttttatacttattattttagatcaaaacaacaggcagaaactgtagcagatagaatagaaaaactagtcccgaaaaatggaactgtttctatcttttttattacagatatgcagttttcgatgatcaaaaccttctatggtgggaaagtaattgacgaagttgaacctgaacaaggtttattgcttttataaaaagagcctccctttcggaggcatttttcaactaacgtcttattagagatgttacccgacttaaactatgatgagcttattctatcaaattatgataaaataaagaagtcaaaaaataaaaaaatgggatttagtgcaataaaatatacctaaaatcccaaaattttgaagaagtttttcttctaacttcaataaaactaacaatttaatgccagtaatattgtatcatagtttaaatcgagtagcatccccaacttggagttgactcttcaccttttctaacgtattgtatcatagtttaaatcgagtagcatccccaacatggcaaagaatctaaagaagttgacgctgattgtatcatagtttaaatcgagtagcatccccaactctacactagaattgcttcttccattcttaattgtatcatagtttaaatcgagtagcatccccaactcatactctgtccctacgaatccgatagagattgtatcatagtttaaatcgagtagcatccccaacatctatactgtatatatatttatttgtcagattgtatcatagtttaaatcgagtagcatccccaacaatcaacagccttgcaagcatttgtaaatgattgtatcatagtttaaatcgagtagcatccccaactcttgcattggaaaagcgaagccattatgcattgtatcatagtttaaatcg

SEQ ID NO: 3276 - DNA, 4318 bp, synthetic construct
  source 1..4318: mol_type = other DNA
  misc_feature 1..4318: note = Synthetic
tggtcaaaggtggaacaatcggggcgatagtctcaatttcctccaggttcacgctctcttcattgagaaccttctcaacaacagtggacttttccttgtctcctccaaggatctcttctattccgattcccagtacttctgatagaagtgtaagcttactgatatcaggcatagagattcctctctcccaattgcttactgcttgatagcttactcccatcaaatcactgagctccatctgggtcatgttcttcttcgttcttgcttctctgattgtttttgctgtctttaacgtatcaaacataacatacctccgaatactttctgggactttcatcatccctaccaaataatcaaacgggattccccaattgagctatcaagcatcagttgaatgatgatatttcaattgatagttgaaaagaagaatatacctatattaattatcggagggcttagaggaaaaggttagaaaaaattgttcgttttttattagttcttcctatttgtgctattctatgttcatagggggaacatatgaagttttctgaatcttatacatatcagtcgatggcaaacgaattaagaaataggttgaatggcaggccatactcaatcggtttggatcttggagtaggatcaattggaatcgcagctgttgctatggaacctgattttaggggaaatctattccctacgaatttggtttatgcaaactctcgaatgttcaaatcttctgaaggtgctgcagatagaaggcaggcaagaggacaaagaaattcccttcgacataaagcaaatagactaaagaaaacatggaaaatcttatcagaaaaaggacttatgcttccttattcagaagattatgctgacaactcagcaactcttcgtttctcggatgaaactctgagaaaaagtccctatgagctacggtataaaggcattcatgaagagatttctctggaagaacttggttatgccttataccacatagcaaatcataggggatcatcctccgtcagaacttttattgatgttgaaaagactgaagacgagaaaaaagccgaagaacagagacgtttgacagaaaaccttgttgcagcctctggtgcaaatactttcattgaagttctttgggccttcaataaagatgatttcaaaggatatcgaaataccaaaacaggaggggaaccacgaaaggctccaattccaacaagagacataatcgaaaatgaagtgaatgtactcctaactaaacaaaaggaatatcaccctgaactatccgatgaatacatcgaaagaataaaggaatcgatattcttcgaaaatgaaaagtttgttccagaaccaggtcactgtccttatttccctaatgaaacaaagcttccagctgcatcttttcttaacgaagaaagaagactatgggaatctctgatcaatgttcgagtcgtcagagaaacaagatctctaagtggaataacccgcagaaccaagctttgtctgtgtgatgatgagttggatcttctcttcagtcatttgagaatgggcaaagatttgacgcctgcttctattaagaaaattctacctaattataaaaacgatgaaatcattcttcctggtaacaaaaagagcccaaagattacaggattcagattctgcacattggaaaagaaaccgtattgggaaagactggatgagaatcagaaagatagattcatagctttatacgttaacactccagatgataaaacattgggaaaactatacaaaaacgaattaggactatctgatcaggaagttaatgacgttcttaatactgtatcgctgattggtggctatgctcctgttggtaaaaccgccatgaatattatcctcgaaagaataaagagagataaattaacttatggcgaagcagaaactgcatgcattattgaagaagaattaatcgattccaacacaaaaatcatgtatgacagactcccttattatggtaaagccattccaacatgcacacaaaacttggcaggaaaggcttggcacacgatgtttgccgaaaagattggcaagcctggttttattaagccaaatactaatccagaagaagagttgttcggtaggatagcaaatccagtagttcatcaaacgctaaatgaactacgaaaacttttgaatgaagtcatggatatatttggagctaaacctatcgaaataactgttgagatagcaagagagctgaaggtcggcacagagaaaagggaagaaatatcaaagaataatgctgagaaagaaaaacgcaacataaaactttacaatgagtattgtgttcaaaataacctatcaaaaaaatatgtaaagaagttccgtatatgggaagatcaaggtcgcagatgcccatattgcctcaaacagattagcgttaatgaaatcgtaaacggttcatgtgactatgaacacattcttcctgaggaagaaacaggagactcttccgaattgaatcttgtcatagcacatggccaatgtaattccataaaggataagagaatcccttttacagcctttggaggtaatcctcagatatgggaaaagattgaacagaatctggattcctgtgacggaatgaaacaaagaaaacaacgattcttaatgacacaagaggattatgaggaatacctggaaagaaaagattttatgtccagattctcctctgacaatgcctacattgccagaattgcgtgtgaatatcttagatctatatatccaccagatgaaaaatattctgagagatatgtcagaaccataagaggtggagaaaccgccctcttacgttcagcttggaacttaaatggggttacagcatctttaggcttacaacataatcctgaactattaaattcaatcgatgaagacaaaaagtctagagaagacatcagacatcatgctttagatgcaattgtagcggcatattacacatattctgcaaggcagatgattgaaacagaatctgcccaaaatacaaatcagtctgagataaagaaacgtatccctattccaaggaacttcagaaaaaactcttctctttccacaaaggaagagcgaatcctcttcagacagtatatagaggactttatactcaataaaacttatggaagttggaaaatggatacatcaaaaaatggacaactgacaaaagacacccaatatgctgtcttcgctcaaaacagcaatagctgtatcctttttacaaagaagaaaataacaagtattagtgcaaaaacactacttggaaaaaagtctggttcagtcgagcaggctctttcttgttgcaatgcgccaaaatggcttagtccaaaagacaaagaaagatttgataccatttgtgaagcaaacagaaaaaagtttgaagaaataaatgcagcccttgataaagctgaaagccagttgatagaagaaaacaagcaaagagaagaatcaggaaaatcgaaggttacgataaatgagcaagcaatcatcaaaagagctttaagccttgttggaggatgctattatatattaaggaataatactctctcaaagttggctccgaaatgcaaagacaaaaaagtaatttctgcttttgatacaggtgataattattgtatcgatttcttcagagaaaagaatggagacatcggattcgagatcttaaggaaaatcaacgctctttctgatagttttgtcccggaatataaacaacgaggttgtcaattgattgagcgtttgtacggaaaggaaattctcgaaatggatgcagctcttttatctccagattctgacctaggagaaataaacagaagcatcagatgtccaaatgccccaatgaatagaacatttttaattatgactaagtatacagaaacaccatcaggattcaacataaaatatgattctatgatgcactctaaaccagctcaggaaggttctatttccagaagttctctatctcagttacatatcagaaaggtcacactttctcctgcagggcttgttgtatatcgctctcctatcataggagaataaatatgtggagggtaattgacttatctggagagtgttatcatcttcatgtaaagtcaatgaacttgaatatcaagaaaaatggtatggatattatgtccgtaccatttcaagatattcactccatcattattcatggcagggagaatactttttcagaagctttttttaacttttgccttcgtttttcaattccagtattgttttgtaatgatgaacatttaccaaacggaatgcttctgcctttctatcagcatcaggatag

SEQ ID NO: 3277 - DNA, 23441 bp, synthetic construct
  source 1..23441: mol_type = other DNA
  variation 13622..15376: note = note, n is a, c, g, or t
  misc_feature 1..23441: note = Synthetic
cgtgattgtcccaacctttgaagcccatcaaggcaggcactactaaggaaacaagggtcgcgaaaagggcggcatttttactgcccagatatttttttgcccagtcccaaatggcaatcacgccaaagccgagccacatacagaaggcataaaacgaacctgcatacacatagtcgcgctcacgcggctcgatggggggtgaattgaggtacaaaaccagcccaatacccatgataaaaaagagccacaagacaactaagaagttttttgaatcgcgcgtagattgatagaacaagcccaacatgcccaataaaagcggcagcatgtaaaaattatcgcgtgccttattgcctgcaatatctacaggcagttcttggttgaggtcttcaaggggtgagagccaacctgcttctttttcgtcgctttgtctgcctgcaaaattccacataaagtagcggaaatacatgtgtccaagctggtgcgaaaagaggaaaaagaggttgtcgccaaaggtgggttgttcgccttcctgcaagcctaactttctgcgatagagttccttgtggttttcgctttggctataaatgcgcggcaggagcatctgattttcactatcatagataggaatgtattttttgtcgatgggttcgtatttttccgtaccctttctataaatgacttcgccgtattcggtatcggtgcgttcggctacaaaggtgggaccaaaaagcaacggacggtcgccgtactgttcgcgtttgagataggaaataaaactcatgacatcttcggggttgttttcgtcgatgggcgtgttggcattcgagcgaatcacaactaaggcataagaggtatagcctatcagaataaaggcaaaactaagcaaagcagtattgaggagtacatttcttttttggagagaataaaaaatgccataaaccaaaccacctacgatagcgaaggtaaaaaagatagcaccactgccaaagggcaatcctaagccattgacaaagaccacttcaaactttgccgccaaagagggcaaccctggaatgaccccataagtaaccaaaacgactaaaaagccactaaaagcaagtgtagtcagatagcccaacgtattggtctgcttgtattttttgaaatagtagagcaagcccaaggcgggaattgccaaaaggttgagcaaatgcacgccaatagaaagaccgaccatataagcgataagcaaaatccacttattcgcctgtttttcgtcctcaatcgtatcccaacgcaacatcgcccagacgacaaaggcggtaaagaaagacgacatgccatagacttccgcttctacggcagaaaaccagaaggtatccgaaaaggtgtaggctaaagcaccgatagcacttgctcccaagataacgatttgcttttcgagcggatattcgcctgtcttttcgtcgggtgcaaccacttttcgcgccaaaaagctaatgctccaaaaaaggaacaagatagtgaaggcactcgaaagggcagagagcatgtttatccaaaaggctactttggtaacatcaccgaaggcaaggaacgaaaatatcctacctaccaaaagaaaaaaaggcgcaccgggcgggtgtggcaccatcaatttatacgaaacggcgataaattctccgcaatcccaaaaactggcagtatcttctacagttagggtataaactaaggcagcgatagcaaaaatgccccagcctatccacttattgagggttttaaaattcataacaacgcgattagttcctttcagaaggcttcaaaaaacaaagtttgggtaattcaaaatgcgaaattagagaattatttggaaatgacaacttttaaatagctgctcctttcctaaaaaaatgtaaagccctaattaaaaggctctacttgtggctttttcctgccaagaagtttgaagattcctaccaaaagcagaagtaccgcaggctaatagtcgaacatttgggtaggacgtgccaattttttagcctacaaatccaaatctgcaccgttctgtatcgcttcggaaagcatggaaggcgtggcaggggcaatttttttgaagagtgcgtctaagcgcacattttctatcttttcccaattcaaatcaaaaaacaagcgatgcacatcaatcggctctacttcgggcaaacattctaaggcgtgataagtgccatcttcctgcatcaaatagctattttgattgtccatcagattataggctaaaatgctaattgcctcctgacgcgcttgcggctcgatgatttgaaagagcgactcgatgcgcctatcaaaacttcgcaccatggcatctgcactgccaccataaaccaaaggctcgcctgcattgtgaaaataaaaaagacgcgcgtgttctaaaaagtcgcccacgatagagcgcaccgcaatattttcgctcaaacccttgcgcttagggcgcaggcagcacacgccacgcacgataagctcgatgggtacgcctgcctgtgaagcactgtaaagtgcgtcgcaaaattcttggtcttgtagggaattgattttgatacaaataccgctgggtagcccctgcaaggcgttgtttttttcgttttcgataagattgatgagctttttacgcatcaaattgggcgcagtaataagctggcgatactgttcgggtacggaatgacccgtaatggcattgaaaaattcggaaatgtcttgggcgtagatttctttggtagaaagcaaactcacgtcggtataaagacgcgccgtatcttcgttgtagttgccgctcgacatgtggacgtagcgcacgaccctatccttttcctttcgcacaatgagcatcaatttggtatgcgtcttgacgttgctaatgccgtagatgacaaaacagcctgcctgttgcaatcgttgggcttctctgatgttattttcctcgtcgaaacgtgcctttacttcaaaaagaaccgccacatttttaccattttcggcagcacgaagtagcgcgttggtaatgcgtgagtctttcgccaagcggtaaatcgtgattttgattgccaatacgtcggggtcttcggcggcttcttccaaaagatgcagaacaggctcaaagctattgtagggatgatgcaaaagcaaatcgcggcgtttgattttctgaaaaatatcgccttcggtctgaatttgaagtgccaacggtgcaacggcagagggcattttcttgatgtccgaactaaggtctttgttgcggacaatttgccaaagcgaggttaggtctaaaaggtagggaatctcgaaaatattggcatcatctatatcccagcgcgatttgagtaggcgcaaaagccaagtggaataattgccctgctcgatttcgaggcgcaccacacgccctgttttgcgcgttttgagcttgctttttagctcctgcaaaacatctacttccaaatcgtcgttttcttctaagctaaaatcgccattgcgcgtgatgcgaaaaagcgttaccgaacttatttccacattcctaaaaatcatatccaaataattgcgaatgataagctcgatgggaataaagacgatttcgcccgaattgcgctcgatttcgaaaaaacgcggcagattttgcggaatctgcacaaaggaggctttgcgattgtttgcctcgctgctgctttcgttgcgtcctttggttacgatacccaagaccaaaatcttgttcatcagtatcggaaaggtatgatggttgtcatagaccatcggggtaagcattggaaagatagtcgcatggaaatagtcgcgcactttttcgcgctcctgctcgctcaaatcttctaaggtagtgaggatagaaaagccactatcggcaaacttgctcaccaagttttcgataaaataagcgtacagattttctttaaattcctgacattgggcgtaaagggtttggcgaaaaggctcctcacgtaggtttgaaaaatcgttgcgctgtttgttgtagtccaaataattatacagactgccgacccgaatcataaaaaattcgtctaaattagaagccgctatcgctataaatttgagccgctccaaaagactgcgcctttcctttttggcttggtctaaaacgcggtaattaaattgtatccaacttaaatcgcgactgatgtagttgctctcttgtataatctcctgtattttttccaaaggtagcatggcagagggtttttagggtgggcaaatcttttgcaaaaataaaaaaatagcacacatgggcaagtgctttcgctggggcttcacttttttttcataaaaagttccacaaaaggcaaaaacgcaaggcaaaaacccacaacgggcatttttgccaaaatgtcagttgtgttacaaaacagcacattctgcctgtacattctgtccgtttttagccctgccaaaccaaaaaaggcaaggcgtttttgataagaaaggaaaaatactgcttgtttttttgttaatctttccaaaaaaagcaagaaaatcgccgaaaaacagacaaaaattgggcgtgtaagcctttttaagactttttcttaacatatttgccctgcttttgcgtatagaaaaaaggcagcctaatataagtgttgcctttatggacttctccaaatccgtcttttccgtctgattttcttctaatttattcctacttgtcttactcaaattatttcacctcaaattgtttcacttatgctaaaaaatatgcgattctttttcgcccttgtcttagcagctatcttagggggcggcgtttcactctttacctatacctattttgtaagaccacagacccaagtttcaagcctcaacccagatgcgtcgggcaatttcctaacaacgagtttccccaatccgatgggcaaccccagcggaacagaaaattttgtggcggcggcagaaaaagctacccctgcggtggtgcatatccgcacctttggcaaggtaagcaaccgcacgcgcggcaattattatatgatggaagagcttttcaagcaattttttggtgaggagatgcccaatcgtgagcgcgaacaagggggaggcgcacaggagcgtccgctttcttcgggttcgggtgtgattgtagatgccaaaggttttatcgtaaccaacaaccacgtcatcgagggggcagaccgcattgatgttgtcatggacgaccgccgcagtttcgaggctacgctcattggcaaagacccaacgacagatttagccgttttgaagatagaacccaaagaagatttgcccttcctttctttcggcaattccgaccaagtgcgggtaggcgaatgggtattggcggtaggcaatcccttcgacctgacctccaccgttacggcaggtatcgtgagtgcaaagggtaggaacatcaatattttgaggcgcaacgacggcatgggcatcgagtcttttatccagaccgacgcggcagtgaatccgggcaatagtggcggcgcacttatcaataccaacggcgaacttatcggtatcaataccgccatcgcgactaacacaggctcttatgcaggttattcctttgctgtgcctgcaaatttggcaagaaaagtagtttccgatttgaaagagtacggcgcagtacaacgcgctcttttgggtattcgcattgccgaaatcacttctgaattggcacaagaaaaggatttgaactccactaagggcgtttatgtagcagaggtaaatgccgcttcgggtgcagccgaggcaggactcaaagagggcgatgtcctcaaaaaaatagatggtgtcgaggtcaatacccctgctgaattgcaggagcgcgtcgcacgcaagcgtccgggcgaaaaaatcaaggtcttatacgagcgttcgggcaaggcgtatgaggcgatggtagagctaaaaaatgctatcggcacaaccgaaattatcaaaaatgacgcttccgtttcgcttttcattcccaatatcggggcagaggttgccgccctgacagatgacgaagcagaaagatttgggcgcaaagggctgaaagtaaaggagttgaaagatggaaagtttaaagaagcccagattcccgaaggtttcgttatcacccacatagacaagaaacccgtaacgacacctgccgaattagtagggctgctgcgtgaaaacacaggcggcggcttgctcatagaaggcttcttccccaacggcagacgcggatttttcgctatcggaatttaaaagcaaccgtcggcgaggctttttaactgtagcgcgaagctccagcttcgcgcttcaaacaagttaaaccgtcggcgaggcatttagccgtcgccgaggttttttatttatttcgtatttgtattagccccatttcctaacccctaacctctcaattctcaactctcatttgtgaattggttgcaaatgtggtttaaaccgtcggcgaggcatttagccgtcgccgaggttttccctctttttttttgtattagccccatttcctaattctcaattctcaactcccagttgtgaattggttgcaaatgtggtatctttacagcgggttactcatgctatcttgaataaggttcgttgtgaattggttgcaaatgtggtatctttacagcttgactaccccttcgtccttcatgtttttaagttgtgaattggttgcaaatgtggtatctttacagctggtcaaaaaattgaaatcgtcgtcgaagggttgtgaattggttgcaaatgtggtatctttacagctgaagcgttattatatcgagggtttggcttgttgtgaattggttgcaaatgtggtatctttacagctcgcaggcgcgtttggcttggtcgttttgagttgtgaattggttgcaaatgtggtatctttacagctttgatggcgaggacgctacaataatgtagttgtgaattggttgcaaatgtggtatctttacagcctttttcaaaaaacaaagccgaaaaaaaatgttgtgaattggttgcaaatgtggtatctttacagcttttatcgctgccaaaattgcggttcatcgttgtgaattggttgcaaatgtggtatctttacagccgacgacgaagatgatgactacgacgacgacggttgtgaattggttgcaaatgtggtatctttacagcgcatagaacttcgcctgcactgtgttgaagttgtgaattggttgcaaatgtggtatctttacagcattttctaaaatgcacacgccttgcggttggttgtgaattggttgcaaatgtggtatctttacagcttgtcttgggcggacttgctttgaaaacaagttgtgaattggttgcaaatgtggtatctttacagctaggtggtgcttcaatcggggcatagtagggttgtgaattggttgcaaatgtggtatctttacagcccaaaaaggttgtaactttgcattgttgagttgtgaattggttgcaaatgtggtatctttacagcttcataaaaacgcgctttttcctttttcggttgtgaattggttgcaaatgtggtatctttacagctcctcgtcatttttcataaacagaaagtagttgtgaattggttgcaaatgtggtatctttacagccttgcttgttttttgaaatttctggtcttagttgtgaattggttgcaaatgtggtatctttacagctttcgcctgtttcggggttgatttgttctagttgtgaattggttgcaaatgtggtatctttacagccaaccgaaatggacaaataagcctgaatggttgtgaattggttgcaaatgtggtatctttacagcggttcagacttggaggcttatgttcaatttgttgtgaattggttgcaaatgtggtatctttacagcagatagtgccaaaaaagtggctctacatagcgtagaagggcgtttttgggcaaaaataggattaaaaaaatgaggttttcgaggcgcaaatggcgcaaaaaagtcgatttttttaatcctaccaaaggctaaatacaccccaccccaaacccctgcccccaaagggaggggctttgattcggcattatttttttgcataaatgtaaaaaaataacttgtatttcgaaccctcccataacggggggagggcagggtgggggtaaattgaaaaaagttttcaaaaaatttggtgctttcaaaaaaaataactacctttgtagtaccacatttgaccgtcttttttaggcacaagtttatcgctgtaaagataccatctttgaccttttcacagtaaggagtaattccgaaggtttaaataccttagcaccgtttccgacggtgctttttttgttcgagcatttcgaaacaaacaaaaaacctaagcgtcttcaagacgcttaggttttttgttaaaacatgtgcagttgcggtggtgttttggtagggggcttttcatactctgccgagtgaaaatgctttatcataccaaactgtttatctgtaaaagtcaggacgctaatttttcctttgggcggtaaaaaactttccaaacgtttgaggtgcatttctgccacttcgcgcgaggcgcaatggcgataatagaccgaaaattgaaattgtccgtacccttctttcaatattttttttcggaaaagggcataattcctacgctcctttttggtctgcataggcaaatcgaaaagtacaaaaagccacataatacggtatttgtttaaacggttgtttttcataattggcaatttttaaaagaataaaacagaggcttttaggtgcaaaagaaacctttttgcagtttatcagaccctaatcgtggtttttacgcaaagcaggcaatcaccatttgggtagtgatagctttttgacagtgccttcaaaacatttttgcagggaagccgccgtagcagaaagagcaagcatcagcggtttggtttctttgccgagctttacatctgcaaaaagtacctccaaagcggcttttttatgctctgtttttagttcgctttcaaaatcattgtgggctaccttctgacaaacccagtcatctacccaagggcgataggcttccatcatatcatctgccaaacagtaggcgttatatctattatggtgaaaaatgcccaaagttggtagcaagcctgcccccactaaggcacgtgccatcgccgctcgcaggagcgtatagccatagttaagcaaatgattagggggcagtccgaaacgctcacgcacaaaatcgggacaataaggcaaaaaaatatgctgccaatagaggcgtgctgcttgtgcttctgcattttgcgcgtccccactttttacgcttttggctaaaaaaagtaacttttcggctactttttccgactgccacttttctaagagagctgcctgattcaggattttggcttctactacctgcttccaaagttgttttttgaggctttcgctggcttctatttgcgccctaaaacgctcattttgtagcgtatttgcttccaaaggcagcgtaagtccgataggtagatgtttttcgttacaaaaaacaagggctacattttcggtaagtagtttttctattgccaccatcgatatctgaatttgggcatggtctaaaaccaaaaatcccaattcttctatcggcatttgttttaaaacagttccatttttggggtctgcaataagcagttggctattttgtgtaaaaagccgctgagattgactgatatagacaatttgttttatcataactttttcttttaggttgtataatttgagtaggggcaaaacaatatttacaaaaagaaaagttcgaggatagcgaaaaaaagtgctgattttcagacttttagctttgttctttttaaatagaagcagggctatcaaaatgcaaagattttttttcgattttttctttcccaaaagcgtaaaagatactcttttttcttatatttgcttttttaacttaaaaaccattttaacccaaattttgctatgaaccagaaaggctattttgtattaggcttagatgtaggcacaaattctttgggttgggctttgctcgaccttgtgagtcaaaaaattatcgccgcttcggtggcggtctttgcggcaggcaaaaacaaaaccccaacgggtaaagaagagtcgcgcaatgccgttaggcgtttgaagcgcggcatgcgtaggcagttttttcgccgccgtcagcgcaaagccgcccttttagaggcacttcaaattttgggctggatagaaaaagacttgccaaaacaagggaaggcttgggaaaaatggcttgctctctgcccctatcagttaagagctgaagccttagaacgcaaacttactttggaagagttggcacgtgttttctacaatttagcccttaaaagaggctttaaaagcaatagaaaagccctttccgaagaagaaggtagcaaaaaagaggaggatacagaaacaaaaaaaacaacaaagaaagcaaaatcggataaaaaagaagatgccaaaccttcaatggaggagatgctgggtgctacccgaaaagccttagcagagggcggtttccaaaccttaggacaatacctttatagcctgcaaaaaatagaaagcccacaggcagcagggctaaaacccaaaatcagaggcaatcatcgagccgagcgcaaactctatcaagaagaatttgatagaatatggcaggcacaggtaggattttttgcagcacaggaaatagacctcaaccaacattcgcgctttgaagacgtgatagaaaaagtagtggcaggcaggtttcaaaacgaagtgcgaagcaaaggattggcgtatctttttaaagaatacctcgtttttttccaacgccctctaaaatcgagccgacaccttatcgggaaatgtaccctttttcctaccaaaaaaagagcggcaatgagtcaccctttgtaccaaaagtttagaatttgggataagttggcacacattcgccttacgggggcaggtatgcaaaacgaacccctttcgatggacgaccgccacaaaatagtccaaaaactcgaaacggtagaaaagcaaaccatcaaacaaattttgaaattgatagataaaagcgactatcaaaccaatttcaaagaaaccgacatcgtgatgggcaacaagacggctttgaagatgcgcaaaatcttcgacccgcctaagcccgctgccaaaaatgcaaaaaacagaaaagagcgaaaccaacttttcggaatagtgccacagtccgaagaagcggacttttatcagtcgtgggattctttttccgaagaagagcaaatcgagatttggaacgcgatagaaaacattgcccaagacaacgaatggcttgccgagtacgcacgcaagaagtggcaactttcggaagagcggattcagattttgaaaaagacccacttcgaagctccttatgggcgattgagtgtcaaggctttgcgccaaattttgccctacatggaaaatgaaggcatggatttttctaacgcctgcgctgctatcggtttgagccatagcgaaggcataggagcgcaaaaccaagactttttgggcgaagtgcctaatttgcgcaatccgctggtgcaacggtctttgtcggtgataaaaaaagtagtcaatgagattatcaaaaaatacggcaaacctaatgaaattcatatcgagctggcaagggagctaaaattgcctttacaagcgcgtgaaaaaatagacaagcaaaatagagaccgcgccgccgaacatgaacgcatcaaagatactttgcaaaatgatttcaaaatcatatcaccttcgcgccaagatattatcaaatacaagctatggaaagagtgtgacgaaacttgtccctatacaggcgataagattagaaaaagcgaacttttttcgcacacctacgaagtggagcatatcataccctactcacgctcgcttgatgattcttttggcaataagaccctctgccgcaccgatttcaaccgcaaaaaggcaaatcttacgccctacgaaatgaaagaaaaagggctaataaaagcacccgaatacgaggcaatgctggagcgtgtccgaaatttcaaacctttttcggctaaaaaattccaacgttttaccaaaaatattaccgactttacagaaggtttcgaaaaccgacagctcaccgatacggcttatattggcacagaaacacgcaagtatatgctgcaaattgcagaaaaagaaaccgatgttatcctaaccaatggcggcactactgccgaactgcgccgactttggggcttcaattctatcctcaaagacgaggaaacagatgaaaaaaagcgtgacgaccaccgtcatcatcttattgatgccattgtcatagccctgacgaatcgctctcttatcaaacgattagcagacgaaaatcaggttagcgataagctaaaagccctattaagcacaaaagaccaagacaagcgattttcctaccccaaaggttgggagagtttgcgccacgaggtaaaagaggttgccgaaaatgcccttgtctatcaccatttccgcaagcgcaaacgcggcactttgcacgacgattcgctttatggtagagcctatctgccttttagcggcaagcccaaagaagatgaaaaggggcagccctattacaccatacgcaaaaaagtggaggcacttaccattcccgaactctctaaaattgctgataaaaccattcgcctgatggtctttcaaaaattagaagaggggggaattagcaaagaggttttggataaccttaaagaaattgataagcgggaaaacacgctgcgcaaaaaactcaaaaaagaaagcccccccaattacgaagaaagagctgaacccaaaaccacaatggagcgcatcaaagaggtgctgcaaaacctaagcctgccttctaaaaacccctattttcaaagcgtgcctatcaaaaaactgcgcatacaaaaccctgaaaatacctttgtttttgtaaaagggcgaaaggcatacgttgcacccaatggcaatcaccacctttgcattatagaaaaagccgatggaaaaaggcgggcagagatgattacgcgctttgctgccaatactcgaaaaggcgaaacctttgccccaccgcccttagcaaaaggcgaaaaactgctcatgacgctgatgctcaatgaattgcttttggtagaaagccccgccctttcgctcgaaggcttggatttggaaacagcaaataagcagttgctcaatcagcatctatatagggtaaagaaaatgagtggagttacaattacaatgcggcactacctatcagcaaaagatgatagtaccgtttttagcaaaagtagtaacgagttgaaggctcgcaaagtcaggatttcgcccacaggtgaaatttcttgggcttgatagtctttaaagattttgtgataaaacaaaaaacctaagccacttcaaaaggcttaggtttttttgtgggtttggttttattcgcttcgaaatgctcgaacaaaaaaagcaccgtcggaaacggtgctaaggtatttaaaccttcggaattactccttactgtgaaaaggtcaaagatggnnnnnnnnnnnnnnnnnnnnnnnnnnnnnnnnnnnnnnnnnnnnnnnnnnnnnnnnnnnnnnnnnnnnnnnnnnnnnnnnnnnnnnnnnnnnnnnnnnnnnnnnnnnnnnnnnnnnnnnnnnnnnnnnnnnnnnnnnnnnnnnnnnnnnnnnnnnnnnnnnnnnnnnnnnnnnnnnnnnnnnnnnnnnnnnnnnnnnnnnnnnnnnnnnnnnnnnnnnnnnnnnnnnnnnnnnnnnnnnnnnnnnnnnnnnnnnnnnnnnnnnnnnnnnnnnnnnnnnnnnnnnnnnnnnnnnnnnnnnnnnnnnnnnnnnnnnnnnnnnnnnnnnnnnnnnnnnnnnnnnnnnnnnnnnnnnnnnnnnnnnnnnnnnnnnnnnnnnnnnnnnnnnnnnnnnnnnnnnnnnnnnnnnnnnnnnnnnnnnnnnnnnnnnnnnnnnnnnnnnnnnnnnnnnnnnnnnnnnnnnnnnnnnnnnnnnnnnnnnnnnnnnnnnnnnnnnnnnnnnnnnnnnnnnnnnnnnnnnnnnnnnnnnnnnnnnnnnnnnnnnnnnnnnnnnnnnnnnnnnnnnnnnnnnnnnnnnnnnnnnnnnnnnnnnnnnnnnnnnnnnnnnnnnnnnnnnnnnnnnnnnnnnnnnnnnnnnnnnnnnnnnnnnnnnnnnnnnnnnnnnnnnnnnnnnnnnnnnnnnnnnnnnnnnnnnnnnnnnnnnnnnnnnnnnnnnnnnnnnnnnnnnnnnnnnnnnnnnnnnnnnnnnnnnnnnnnnnnnnnnnnnnnnnnnnnnnnnnnnnnnnnnnnnnnnnnnnnnnnnnnnnnnnnnnnnnnnnnnnnnnnnnnnnnnnnnnnnnnnnnnnnnnnnnnnnnnnnnnnnnnnnnnnnnnnnnnnnnnnnnnnnnnnnnnnnnnnnnnnnnnnnnnnnnnnnnnnnnnnnnnnnnnnnnnnnnnnnnnnnnnnnnnnnnnnnnnnnnnnnnnnnnnnnnnnnnnnnnnnnnnnnnnnnnnnnnnnnnnnnnnnnnnnnnnnnnnnnnnnnnnnnnnnnnnnnnnnnnnnnnnnnnnnnnnnnnnnnnnnnnnnnnnnnnnnnnnnnnnnnnnnnnnnnnnnnnnnnnnnnnnnnnnnnnnnnnnnnnnnnnnnnnnnnnnnnnnnnnnnnnnnnnnnnnnnnnnnnnnnnnnnnnnnnnnnnnnnnnnnnnnnnnnnnnnnnnnnnnnnnnnnnnnnnnnnnnnnnnnnnnnnnnnnnnnnnnnnnnnnnnnnnnnnnnnnnnnnnnnnnnnnnnnnnnnnnnnnnnnnnnnnnnnnnnnnnnnnnnnnnnnnnnnnnnnnnnnnnnnnnnnnnnnnnnnnnnnnnnnnnnnnnnnnnnnnnnnnnnnnnnnnnnnnnnnnnnnnnnnnnnnnnnnnnnnnnnnnnnnnnnnnnnnnnnnnnnnnnnnnnnnnnnnnnnnnnnnnnnnnnnnnnnnnnnnnnnnnnnnnnnnnnnnnnnnnnnnnnnnnnnnnnnnnnnnnnnnnnnnnnnnnnnnnnnnnnnnnnnnnnnnnnnnnnnnnnnnnnnnnnnnnnnnnnnnnnnnnnnnnnnnnnnnnnnnnnnnnnnnnnnnnnnnnnnnnnnnnnnnnnnnnnnnnnnnnnnnnnnnnnnnnnnnnnnnnnnnnnnnnnnnnnnnnnnnnnnnnnnnnnnnnnnnnnnnnnnnnnnnnnnnnnnnnnnnnnnnnnnnnnnnnnnnnnnnnnnnnnnnnnnnnnnnnnnnnnnnnnnnnnnnnnnnnnnnnnnnnacccatcacgctcctgagctgtaaagataccacatttgcaaccaattcacaacacctgccacaaacgatttgcctaaggcaaagctgtaaagataccacatttgcaaccaattcacaacgggagcggctcgacccttatcgcagcacagggctgtaaagataccacatttgcaaccaattcacaacctcctctcgtgagatacgtgcagcctcgcgtgctgtaaagataccacatttgcaaccaattcacaaatgagagttgagaattgagaggttaggggttaggaaatggggctaatacaaaaaaaaagagggaaaacctcggcgacggctaaaagcctcgccgacggtttaacttagcctgattacggtttgaaacgcgaagctggagcttcgcgctacagttaaaaagcctcgccgacggttgaacttaaattctaaaaacattccgaaaatgtagggacaaggcactgccttgtccttgtattcgctgtatttgcgcccagtcgttggtgaggacaccaacaacggcataggagagaattaggaaataggggctaatacaaaaaaaagataaaacctcggcgacggctaaaagcctcgccgacggttgcttttaaattctaaaaacattccgaaaatgtagggacaaggcactgccttgtccttatatttgccagtcgttggtgaggacaccaacaacggcataggacaccaacaacggcgtagaaaaagaaaaaaacctcggcgacggctaaatgcctcgccgacggttgctattttttgattttttaaaacgaaatgcttacctttggtcgttttcgcatttcttgtttatttcggctgcttatttttcctgctcccttcgttgttatgtcccatactcctacgccttcggcttctcacttagagaaattgcaacaaacggttcaaaaattagacctgcaaagtcagaccttgcaggcacttgccagcgtctatgcacgcatggaagcgacagaagcgggctatgcccaaaatctgcaagctctacacgatttgcaggcgcagttggctgcccacaaagaggctttggctgcacaggtatcgcacctgctcaaagaaaatcagcacttggagcaaaaggtggaaactgcctatcagcagatggtagaaaaacacacccaactcactgatttagagggacatttgcaggcacaagtagaagccttacaacagagaactgaccaaaataccgcccaattccgacaagcctttcaaacccatcaacaaggtttggaagaaaagctaaaagccctcacgcagcaaaatgaaactttctaccaacaaaccgctgaaagcctcgattttcgcctgcaaaatgtgcagcagcaggttacgcaattttacgaacagaccaaaagccgtttggaagaacgcctcactgccttaggcacacaaaacgaaaaccatcacacccgtatccaaactgccttagaagggcggctgcacgaactttttacccaacaggcagcctaccttgcgcacctcgaacccactacgcgcactttggcgcaaacggtagccgaattggataaatacggcaggcatctatctgaatatgagcgtgttattgcacaacagggcgaacagcttgcgacgctcgcaaatccgatacagggcatagaccagtaccaaaagcaagcctttaagcatctctatcaggcattgatacaggaaggaaaggtcaatgctgataagttggcgcagtctttttcagaggcacaaaaccaaacaagcgacgcactaaaagaagatttgaaaagcggtctggaggctttgaaaaatagggtagaaagcgaacttcagacccaaaaacaagcctttggcgaagccttacaagagcagggcaggcaggcgcggcagaattttgaagccttgcaagaaaaaatcgaaaacatagaaaagcaacatttggcgcattgggaggtcttttccgaaaatatcaacaaccaacttgcgcccatagagcagggtttggaaatgaaactcaaactcgaaacgcaggctttgggcaagcgtctgcaacagcaaagtatctttctttgggttgcgataggattgggtttgctcaatttggtggtgcttttgcttttatattttaaataatgaaaaaggcaaattttgtgtcataaactttgtatcacaaattttacagtgcaaaagttgccgctccaaaaaatgacttatccatcttttcttttttcaaatgaaaccttcttttctaccattttcgttttctttcttacttttaatcacacttttggcagacctcaaagcccaatctgctcctaagtatagcaatgaatttttagcgattggggtgggcgcacgtggcttgggcatggcaaatacgcaggcggcggtaacgaacgacgttacggcggcgtattggaatcccgcagggctgcttttggcaagcgaaccctatgaactttccctgatgcacattgcctatttcggggggattgcgaattacgactatggcggctttacggctaaaattgatagtacaagccgtttggctgtatcgcttattcgttttggcatagacgacattcccgatacgcgcttcctaattgatgcggacggcaatatcgattatagccgcgtggggtcttttgcggaggcttcctatgcttttatgttttcgtatgcaaaggcagtaacgctcaaaatcaaggagaaaaatacggcaaaagggacaattcctgcacgctatatccctttgcgtttgggtgcaaatgccaaaattatcaatagaagtgcgggtgttttttctaatgcttggggcttcggactcgatttaggcgtacagaccgacttaggaaagtggcaacttggcatcatggggcgcgacatcacaggcacatacaacgcttggaattttaataccgaggcggtagctgatgtctttgcgcagacgggaaacgaaattcctaccaattctattgaaatcacgctcccacgcctgcaaatcggactcgcaagggctttcagaacccaaaccgaccaaatcggactcctgaccactatcggactcgaaaccaccttcgacggcaagcgcaatactttgctcaaaacgaatcttttttctatcagccccagcgcaggagtggaaattgattacaaaagaacggtttttttaaggggcggaatcggaaatttccaacaaatcaccgactttgaccgtacttataccaccttccaacccaatttcggaatcggtatctggattaaaaaattcaaaatcgactacgccctaaccaatgccttccaacaggctgacctaccgctctcgcatgtcttttcactttcagcgcgttttaatcagagcgatttacagaaattggcgaaaaagtagtaccaaaaagtattcttaaaatgctcctttgtgatataaaaatttctttttttacttcctttttgcttacttttcaatgaccaagaacaagaaaatcatcttaggcgtgctaaccttctcgcccttatttttgatggtgctttattttattgccttttttctctttttcgtttctaccctgcttacgggcggctatcaggcgcaggtaatctcacagggcggcacgccttcggttttccctatgctttcgctgctgggtagtttttcagtgctttttattttggtttcacttatgggcgttatttcggtaggaataatgggttattatctttatgatgccatttccgacaaaaacttagacgacacagaacgccttatctggattttgctcctgctgctttcaggcggcattggctcgatggtttattggtacatgcgcatttggaaaagagaaaaagatttgcttgttaggtaaaaatagcccctaagtgtttttaggaattttaaagtcgcttaggggtcatgtttttttgaggcgacatacaaactaatttttaatatcaaataaaaatgagaaattggctaaaagagctaaatggaaaaacggtcgacaaaatatatcaagttgattttaatgaaaataggcaggaagacttttatttgccttggcttttttttgtaacatttatagattttggtaaatttttagaaatagaaggagattttgatggagagcgcataaaggtaaatctttatgataattcgcaacttgataataaaataaaagaaaataatctaattgacttgccagactgttggcgtgtgtatgataccaagcaagacgagatgattggtcaatttttgggacaaaggattgagtttgtggagtatggcattgataaaaaagagtttgaaatcgacaaaattaaaatcgaaggacaagaaaatattttcaattttatacgatttaattgtgaaaaaataaacttaacaatttttgaaggttctgcaactggacttggggtttcagacgaccctaacgtaaagctaaattttgaggaaacatttgataagtacgatacaagataaaacgcctttttctgtcggcattggctcgatggcacatttggaaaagggaaaagatttgcttgttaggtaaaaatagctcctaagccgcttacctgcactttggctttcttttgcattttccctttcaacgctcttacaaattttaactacaaaaaagtagaaaaaaaattgcgccctttggggaaaaggtgtaacttgtggaactaaggttctttgggtttgctaaggaacaagaaacaattttgtactgtgcaataacttgcacataattacctatttgcatcaatattatgacaacactacaaaaaattattagcttcttgacattaatggcattttgcgcgtgcaacacctcatcaactaatacaactttggcgacccaaaccgacagtgttattagcgacacgacaggcttttccacttacatagctgatacatcaacatttgaaaatgaagaagcagaaaaaaaagccgtttacgcatttacactaaaatttaacgaactttcaatttctatctataatttcagcactgatagagagggtggagaggcagaccaaattcagggagatacagttgaaatttatgctgaactgggcgaaacaatagaaggacaacttatttctgtttcaagcgaccaactcacagacttgcaagttgagcaacgttacgaaacaagtgttaccattatgaacgaaggaccgcattgcgacctaaaagattggaagcatttttactctgaatggaacaaactgcaagtcaatagcgaaggagaatttacttgcgatgaatacacagaaaaagaatctgaaaaattcccaaaaatatcaattaatgatttgaagcaaacagtaaaagaaaaatgtagcgaaggttggcttgaactgatagaaaatataaagaaaccaactgaatatccaagcggtgtaactattagtcgctattacctacgggtaagtgggcaacgcaagaacaacgggcagaccgtaaccaagttaataattattgaaatgccgatgggctgctaattaacacaagaaacacaaagccctaacggttttcaaaaaaacgttagggctaaacccaatccctaaaagacacttacaaattttaactacaaaaaagtagaaaaaaattgcgccctttggggaaaaggtgtaacttgcagctgctaaaagcgtatgaaggtttgaccttcgagagttttttgtgtgaatagtattattcaaagctctttggatatgatggtgaacgcggaaaagttttgaaatgtgtatgggctgtgtgtaactaactacctcttaggagtaagcgtaggacgacactcgtgcagcctgatgcagtaagaattagacgttgaatgattgtccccattttggtttttggggcagacttggaatatagtcctttaagttcgctctatcttcgttcagtgttgggagacagtaattcaccgtcttacgaacttagttaaacggtttgataatcataccgaaagaaaataactaataattgtaatatttatttatatttacacattgataaaattttatgactgaaaaaattcaaaaaactatcatcagtaaatacttagctttagctgaaaaggacacagtaaatgaaaccgatttatcggacttacttatagccgttgaaaatctttacaagaacagaattttaaccgaaagcgacatatatctaaacaaaattgagttgatacgaacaagcatctcaacagacttggaaacactacgaagaaaacgaacaaacaaagaaattaaacttacaaccaacaagagttttttacaaatactgacatcagacattgaagcagcaaattatggtaatacagatttgtctgacattgataaatttgagaacgacaaagaagtttccctatcggcagacaacgttttacgagtgcttgaaaatttgattattccaaaacggagaatttctgaagaaaaagagtttgaaaaatttgttcacgaacgacttacaaaagtttttggcaaagagagagttcacaggcagtatagcataggcggctttttagctcttaagtccgatattgatgttggcaatgggcaggttggaattgaactgaaagttgctgacaatcttagttcaacagatatgcaacgactcatcggacaagtggtttattataaacgtagattttataacaataatcttattctttttatagcaagtaaaaatacaatcaatccaacaataaaagaattgttaggctttgttgatgaacttgaagtaaaaactgttttcacaacagcaataagtttatagcgacagaaatctgaccaaaatgtaaggcaagccgttaggtgttgcacctacgacctatcaattcagctagccttagattttaggggctgctgctaccgaagcacctaaaaaatagcatttcgtatttgctttttgctatttttgtggtatcttaagaggagaaatataaggtttgtcctattacttagtaggtcgcagtatcaggctacgtttaatggaaaactaaaacgttcagggttcattgcaccaaaaactacaaatggggtaatatggactttcctacagattattaaccaaagctatatggatattgaagaatatatcagtagagttatatcaaaagtatacgagaaagataaaactctttttttattaaaatatttggatttagatacttttgagaaaatgactataaaaattcactatgaaaatgtaggaatagcagatagttatttgttttacacctttccattttggaaaagtataaactacgaaaatttactaaatattttttacagatttatattgatacacaagaaaggtagtttatttggttttgagtgttttatgaattttttttatatattccttaaagtagatttaatcaaggtgtatgctgaaacaactattgctaaccaacagttaagagattgggtattagaagggtacataaaaggagcaggctctttgttttattatctgtcctgtcgcaacacatttgaagaaaaattaagatactatgatttaagttatgaaacattagaggaaatagggcaaaaatttatcaatcaaggtgcttataaagcagataaaattccatacataaatgaagtttataattatgatagagcggtaggtattccaaacaactggaaagcatgggctaaagagtataaaaataaataaaaacttcagctaaaattatccttgcaaaaatatggctaaggcgtgaggcaagggaagtgctaaaaaatccgcccttcatcaagcctcttttgtttttgcaccaaaacgataaaatcccaataaaattcgtaactttgcactacaacacgaacctacgaaaaatgagcaaaatcaatccgaaaatagatttagttttcaaaaaactttttggttcagaggaaaataaagacattttactgtctttgataaacgctattttgcccgcagaacagcaggtagccactattacgctaaaaaatccctacaatgtttccgactatgccgagggcaaacttacgattttagacattaaggcagagg

SEQ ID NO: 3278 - DNA, 17724 bp, synthetic construct
  source 1..17724: mol_type = other DNA
  misc_feature 1..17724: note = Synthetic
caaattcgtggcaatccaaaggtaaatttgcgtttaaatttatagattgccacgcaaatttttgtaaaatttgctcgcaatgacagcatattagacattttgcgaagctcgcccataacgatagcgtatcaagcattttgtaaagttctctcgtaatgatagtatatcaagcattttgcaaggctcgtctgcaatggaaaacttgtggattgccacgctcaaaaggctcgctcgcagtgagactttggcaaaaattcagcccatattttcaaaaagggctattaaaaattcaatagccctttttagcgttttaagcaaaagccctaaaaaagcatttcttcgtcttttggcaaggcgtggatactgcgctgtggaaaggggcttgtaggcgtgtaaaattcgctttcgccgttgtagttgcccttgcttacgccacttggcactttaaaataacgcctcgtgtttggaaaggcgcgcacatattgagtgataaattccctaaacacaggcgcactcgttctcgcaccgccctctgtggctttcatcggcttgttgttgtcgttgccaaaccacacgatgccctctatctcaggcgttatgccgacaaaccaagcgtctatgctttcgttgctcgtgcctgttttgcccgctatttcgatgcctcccacgcgtgcgtttgcgcccgtgccacgcgcgacgacattttgcatcatcgaaagagttaagaaaacttgctctggctcggctacctttgtggcgttgccctcaaagtgcaggatttcgttgccctctttgtccttgacgcttttgattaaaatcggctcgtgaatcgtgccatagtccccaaacattgtgaaaaatttagcaaattcaagtggagaaatcccaaagctaccaagcacgatagaaaggtcgtttggaatgctcgggctaaacccaaagcccatcagtttgttatagacattgtttagccctatgtcgatggctaaatttatggtggcaaggttgcgtgaatgcgtgagcgcgtctttaagcgtaacgatacccttcattccgcccccaaaatttcgcggtttccaaatctctttttcgtcctttttgcccccttgttttggctcttcgaacacgcgtgaaatgtccgctacttcgctcatcggcgagtagcccatatcaatggcgatttgatacaaaaagggcttaaatgagcttcccggttgccttaaactctgcgtggcgcggttgaaattgcttttgttataatccacgccgcccacaagggctagcacttcgccgctttgattatccactacaaccatcgctccattaagcgtgctcaaattcgcgtccttatcgcgcttgataatctcatcatagccaaagcgcaaggcgttttcagccattttttgcacgcgcaaatcaagggcgagttctatggtgtagcccgcactctttaagtcaggcagcacaggctctaaacgctttatcacctcatcaactacataaggggcggcattttgcgtgagcgtatcatcgtaaatagtaggcacaaagctcatcgcttgcttatactcagcctctgaaatccagcctatgctaaacattctttgcaagacattgttcgcccgcgaaagcgataaattcaagtttctcgtggggtcatagctgcttggcgcttttggtaagcccacaagcatagcgatttcttttaaattcagctcgtctaaattcttgcgaaaataccctttcgcagcggttttcacgccataatacccgtgtccgaaaaagatatgatttaagtagcgttctaaaatctgctctttgctgagcttgatttcaagctgataagctaaaagggcttctttgattttgcgtgaaatagtgcgctcgggggttagctcggtgtttttgacaagctgttgagtaagcgttgagccgccctccacagccttgcccgctcgtagcattttaagccctgcacgcaaaatcgcatcggtattgacgccgttatgctcgaaaaatgccgtgtcctcgatggcgattaaggcttcgattaaacgcggtggaatgtccttatattcgacataaaagcggtgttctttgtcgaaaatgttagcgacaaggttgccgtttttgtcataaagctgagtgcttaaaggcggtttaaagtccttaaaggtgtagttttccacgcctgaatttgaaaagagataaaacacataaaccccgcacccgataacaacaatcgccgctagggagataagaaatttcacaatgttactcataatctgcctttatagtttgtctttgatgagcttcaaagcaagctcacaagcgttttgaatttgacttatgtccttgccgccagctgtggcaaagtcatctcgcccaccgccactgccgccaagcacggctgctactgcttttactagctcaccagcctttatgggagcgttttttgcgccagctgcgagcattatcttgccatcttttacctgcacgagcaagatgacagccttttcataggcatttttaaaatcatcaatcatcatttttatgtcgccctcatcaaccctagccacgcacacacgcgtgctgtttatgtctatgcttaccagctcgcttttagcggcgtttttgagcttgtttttaaattcagcgttttgttctttgagctttttaagcgcgtttgaaatgtcgtttgttttcagctcaaatttaagctctttgatttcgttgataaaggattttgcgtagtttaaagctgctaaactcgccacagcttcgattcttcgcacgccagagcttacgccactttcttttgtaatgtaaaaagagccgatttcggcggtgttttttatgtgcgtgccaccgcacaactctttgcttgccccaagcgtgagaacgcggacaacgccttgatatttttcgttaaaaagcgcgatagctccgctttttttggcttcatctaaactcatcttttccaaaatagcattatcagcccttatcacgcattcattgacgagcttttcgattttgtcaagctcttcgtttgtaagggcgtttgggtgagtaaagtcaaagcggagtttgttaaattcgacaagtgagccagcttgtgctatgtgagtgcctaaaatttcacgcaaagcatagtgcaaaagatgagttgcgctgtgatgacgagcgatttgagcgcgtttaatctcatcaatgtgcgcttttaccttgtcatttgcctttaaagtcttgttcgctcgcaccgcgcttaaattcagcccaaagaatttttgagtatcaagcacttcgctattgtccaaaaagcccgtatcgcctacctgtccgccactcatcgcgtaaaatggcgtaaaatccagcatcacccagcctatctcaccactttttagctcattgatgcacttaaaatcctcatcaagcaaggctagaattttgctctcattttccattttttcatagcctatgaatttattttcgccaaatttttcaagcaaaattttaaaatccccatttacagccttgtctccgctgcctttccagcttgctttggcgcgttttttttgctcattcatcagctcatcaaatttagcctcatcaacgcttaaatttttctcacgcaacatatcagcggtcaaatcaagcggaaagccgtaagtgtcataaagcttaaaggcaacctcgccactaaaaaggcttttggtgcgttttagctcatcgttaaaaatctcaatgccattttctatggtgcttaaaaaacgctcttcttcaagctgaatttgggttttaacaaagtcttttttttcgtttaaatagctataatgcccgcccataagcgcacaaaggcaatcaaccagcctaaacataaaaggctcttttaagcccagcaaatatccgtgtcgcaaggctctgcgtaaaattcgccgcaagacatagccacgcccttctttgtcaaagcttaccccttgcgcgagcaaaaacacggctgagcggatatggtctgcgatgacgcggtagcttgctccgctttcataaaggtattttttcttgcaaagtgcttctatctcgttgatgagtggcataaaaagtgagctgtcaaaattgctgaattttccctctttcaaggctacaacgcgttcaagtcccattcccgtgtcaatgcttggctttggcaatttactcatcttgccatcagcacttcgctcaaactgcataaaaactaaattccaaatttctaaaaagcggtctccgtccccgcccatataatcttcgctcgtgtgaaaatgcgcatcgccttggtcgtaaaaaatctcactacaaggtccgcaaggtcctgtttcgcccatttgccaaaagttgtccttgtcgccaaagcggtaaattcgctctttgcttaaatgcttttgccagagtttaaaggcttcatcatcgttttcgtgcgtggttacatagagcttgtcctttggaaattcaagcacttgcgtgatgaattcccacgcataatcaataacctcttctttaaaataatccccaaagctaaaatttcccagcatttcaaaaaaagtatgatgccgtgcggtgtagccgacattgtctaagtcgttgtgcttgcccccagctcttatgcaggtttgacagcttgtgttgcgtggcgggtttgggcgcggaatttcgcccgtgaaaatgcttttaaaaggcaccattccagcatttgtaaaaagcaaactcgcatcatcaggcacaagcggagctgatggcactatggtgtgtcctttgcttgcaaaaaaattcaaaaattcagcacgaatgtctatattttggtttgcgttcatcaaaaatcctaaaaaatttttgttatcatagcacaataatttaaatttagctagtttttggctataattttgcgtgagtttgcttataggttaaatttctggctttgattaagggtaaaaaatgaacacttattaaatttattttgaagatttaatgctttttgacgcgctcatttacaacacggacaggcatttggggaattttggcttgatttttgacacgcaaacgggcgagattttgcgccctgcgccgatttttgacaatggttgtagcttgttttctttgctgcaaaaagatgatttaaaggacatatttggcacactatgcgtgcataaatcttattttgaccttgcttttatcgaccaaatagtgctttttgtgcgaaaaagacatatcaaaaatttgcaaaaattgctgaattttagctttaaacggcacgaaaaattcaaccttaatgatgaatggctcgtggctgcggagcagtttataagaaacaatgccaaatacgccttgcattttgcaggctatgacagaagtgagtttgaaaactttgacaaaaatagctaaatttcgcttaaatttaaacgaggtttgctaaaattagctataatgcgcttttattttatgagaaaggtttgggtgatgaatttcccttttatcgacttaaaagctcagtataacgcctacaaagatgagatagataccgccatagctggcgttttgcaaagcacttctttcatcggtggggcggcgcttgatgaatttgaagcaaatttagccaaatatgtaggcgtgaaaaacgctataggctgttcgagtgggacttcggctcttgttttagcacttttagccctaaatatcaagcaaggcgatgaagtcatcgtgccaagctttaccttcatcgctacggctgaaatggtgagtttgctgggcgcaacgcctgtttttgcggacattagtttagatgattataatgtgagcgttgagagtatcaagcaccttgtgagtgaaaaaacaaaggcggttatcgctgtgagtatctttgggcaaatgcccgatttgcttgctttgaatgaattttgcaagagtaaaaatatcgttttgatagaagatggcgcgcaaagttttggcgcgacacaagacataggggggggggagttgaaaaagtcttgttctattgccccactttcttgcacgagcttttttccgtcaaagcctttgggcgcgtatggagacgctggggctgtttttaccaacgatgacgcgcttgctaaaaaaattcgcaccattttaaatcacggacaaaaagagcgttacaagcacgaaatcatcggcattaacgggcgacttgatagcattcaagcggcgattttaaatgtgaaattaaggcatttagatgatgagctggcaaaaagagagcaaatcgctcaaatttatcaaaaacggctgcaaaatgccattttaccacacattaaaaagggttttacgagcgtgtatgcgcagtattctgtgcgggtgcaagagcgttctaaatgtatagaaaagctcactgcaaagggcattccaacggcgattcactaccccttagggctacatttgcaagaagcctttaaatcgcttggctacaaaaaaggctcactgccaaacactgagctggtaagcgagcagattttatcactgccgatgagtgcctttttagatgaggctcatcaaaatgaggtgattaaggcttttgaatgaaaataggcattgctgggcttggcaaaatggggacaaaccatttaaacgagctgagaaaagatgatgaattcaaagtcgccgccctttatgatttgcgccaaaatgctgaatttaaagagccattttacacgaatttagatgaatttttaaaggcaaatttagacattgtcatcatcgcaacgcctactagcacgcatttagagctggcaaaagccattttagcaaaggtaaaatgtgtgcttatcgaaaagcccttggcgatgaatttaaaagagatgaatgaaataaaagagctggctaaaaagcacgaaagtagcgtagctgtgggatttagtgagaggtttaatcctgcgattttagccttaaaaaaagagcttgcaaatgaaaaaatcatcagcataaacataaaacgatactcgccctttcctgcgcgcataagcgatgtagggattttgcaggatttaagcatacacgatattgatttagtgggctttttaagtggagaaagctttgtaaagcaaggacttttgagcctaaaaaaagatggcagagagatagaggcgattatcacgcttcaaagtgggctaaattcaaagcaaaatatcatcgccacggttcatcaaagctggaactgcgccttaaaaattcgccttgtgagcgtgataacggaaaatgctttttttgaggcggatttaaacaatttttctttgcaaaaaaacggcttgccacttgccttacaaggcgcaagtcctttatttagcgagcataaagagcttttgggcttagctaaaagcggcaaaatggggcgtttggcaagtatcaaagatgcgcttaacgcgcaagcgtgcttggagtgagcttgaagctggttttgtttttaaatatgggaggtgttagcaagcgtgaggattgcgagctttttttgaaaaatatgtttaatgataaatacattttgacgataaaaagcgacattttgcgctcttttgtggcatttttcatcacaaaatttcgcgctaaaaaaatgtggcaaaattatcttaaaatcgggggcaaatcgcccttaaatgacataagcgcaaggctttgcgagaaactaaatgctgaatttttaaatcaaaatttaaaaaataatgctaaaaaaatgagtcaaaattcagccctaaattcaaaaactcatcacagcaaaaagggcgaaaatttagagcttgcgcccaaagaaagcaaaaatttaaagttcaaatcacagcttaaatttgattttatcaacacctatgtgccgccctttgcaagcgaagttttaagcaaatatgagcttacaaaagatgatgaaatcgtgctttttccactctatccgcaccactcgcaaaccaccgtgctttcatcacttgaatgcgttaaaggcgagattttaaaggcgcaaattcaagcaaaagtgagcgaaattcctgttttttttgagaacgaaatttacaacgaaatgctgataaagcacattttaaaggcaaatgagacttacaaaaaagcgcgcaaaaaaacgctcattttttcagcgcattccatacctgtatcgactataaaggctggggatatttaccaaacgcacattgaaaggcattttgcgcttttaaaagagcgtttaaagccttattttaaggacatagtgcttggctatcagtcaaaactaggacctgtgaaatggcttgaaccaagcactagcgagcttttggctcagcttgcaaatgaagcacttgtttatccgctgtctttttgcgtagattgcagtgaaaccgcttttgaactagaaatcgagtatagaaaaatcgccgcaaaggactacaaagtcatcgcctgtcctaatgatagtgctgaatttgtggagtttgtgaaagcgtatgtaaaggacagatgatgaaaaaatacctttttgttttgcttttagccttttcaatggcgggctgctcggtaacgggcgataggcaagtcgatgcgatgattgataaaatgggcattgaaatcatacacgatatccccatcaacgacaacacaaaggctggcaagcatatagacaacaccatacatatgaaagcgcgctcattttaccccgacaaacagcagtatttgctggtgcttttgcacgagatagcccatcacataggctctttaaacaagcgcgtgtcttaccaactctactcacaaagcgattacaggctacttgaagagcttatcgcaaacaaatacgccacaacaatgatgaaaaaatttggctacaaactgcgctttaactacgacaaactcaacaaagagtatatgaacgaactgacaacgcagcacggctactccaaagaacgcgtcaatcaatatgtcaatgctgagctaaaacgctgcttgcaaacaagcgataggcttttgaaacgccgaatttagcgtgcttttgcgttgatttggcataatgagagcataatgcaaatttaaggagtgtgtgatgagagttttagggtttgatataggtgtagcaagcataggctgggctttggtggaggatagcatcataagagatgagtgcaaaatcattgattgtggtgtgcgaactttcgagtctgtgggcgaaaagcacaaagagcgtggagaacaaagacgcgctaggcgcaatgtcgcacggacaaagtctaggctaaataccatcaaaaggtatctttttgagaattttgctagtgcgcaaggtgattttgcggattttaacgagtggcaaaagaaactttttgccaaaaataacgagagcgaacaaaaagaacaagaactatcaactccttatcttttgcgtaaaaaggcactaaaagaacaaataagcgttgatgaactctgccaaatcatcattcatattgtgaaacatagagcatataacgatagcggcaaggaatatgaagccgaaaatatcctagaagcgcaagatgagacaatccaagcagatagcaaaagcataaaagaaaaatcaaacaacaaagatgagaaaaaagataaaaatgcagataagaaaaaactaaaagctgcgatgaaagaaaatgtcaagcaagtcagcgacaaagcctatcttaatgagtatatttacgataggcaaaaaagactagcacaagagaatgctgagattaaataccaaaaattgcttgaaaaatttaaaaatgaatcaaaatacgaatccgtgcataaattagaagctaaaaaagagagatggatagcaacaaccgccgagcatagcataaaaatgcgtaatggttcagttgtaaggataaataaaaacggcaaagaagtggaggagcaaagctatgttaattctatgcctagaagtgcgataaaggctgaactgcaaaagattttagatacgcagattgcaaaagcaaagcaagacgaatcatacgcccaaaagctagaaaatttaaaaacagagctgtttgcagaaaatgataatgggcttgggtttttgcaaaatcgtccgctaaaaagttcgcaaaatttgcttggcaaatgcagcattgatatgagagaatatcgcgcaagcgcctttgctcctagcgtgatagaatttaatctacttgcaaaacttgctaatcttttgatttatcttaatggacaacacaaagatttggatattgactacgaaaagacaagtgaaagtgcgataagagcattgcaagaaaaacaaaagctagattttagcgatattagaagttgtatttatctaaaaagcggagaaagtctagcacaaacttatgaaatagaattgttaggttttaacaaaaaagagacaaaagcaaataaaccaaaatccacaaagagaactcaaaacaaagatagcgacaaacttcttacacaagagaaaaacgcgactttttataatcctagcaaaaaattagctttgctggaagcgacttttggtaaggatttttggagtcatcaaaaagatattgacaaattaacgggaattttatctgtcaataaacgcaaaaaggacattcaaaagaagttaaataaacataaatatagccgcattgatgataatctaaaaacaaaggctctaaattcacttggggctgggtttagcgggacaagtgcgtattgtcttaatgtgatttgggagtgcctagaaaagatgcgtttgggaaaaagtgaatacgaggctacgacagcttacaaggcaaatctcaacgaggatagaaaatatcaagaatttatgagtcaatttacaaagtctttaaaactgcctgcctttgaagaaacaccaaacgcaaatcttaatcacatttgcgctcaaatgcgtcaaattgcaaatgctatttttgcaaaacacggcgaagtggcaaagattcgtatagaattactgcgagaagtaggacaaagtgagaaacaaaaagccgaaatagtaaaaacacaaagagaaaatgaaaaatttaatgaagttgccacaaagatttgcgaggaaatcgggctaaaaacaacaaacaaagataatatcacaaaagttaagctgtggattttgcaaaatgagtgtgatatttatccaagcattcaaaaaggctcacaagataaatttaatgccaaagaattttacgctgattataaaaataagttatctattgatgtttatggttttaagaaaatttcactgcaagatttgtgcgatgaaaatgccttgcaaatcgaccatattatccctaaaagcaaggttttggtcgatgaatttacaaataaagtcttaacttttacaaacaacaatgctacaaaaacttcgcaaactccatatcaatggtttggtgcagataaagcaaaatggaaggcttttgaaacaagggtaaagatgactaatttatccaaaaaggcaaaagacaatctgctcaaacaagaaatagatgatattaagccaagcaggttgctcaatgacacaaaaacagcgtctgtgtatattaaaaattatttggaaaaatatgtgaaatttgcggacattcctaatgatttgcaagataacgaggaaagagaatcaaagcaaattcggcgaattgaagtggtaaatggcagacttacttctacattaaggcatttttggggcattggcaaaaaagataggacaaatcatctgcatcacgcgcaagatgctgtaatcatagccttttgtagcagtaggacgatacaacattttgcaaaatttttgcaaactgaggaggacaaatcacaagcaaaattaaatagcgaggagataactaaaattatgaaacaaaatgcaaggggacgatgggtgtttaggcgtccgtttagtggttttgttgctgatttgacgaaaagaatttatggtgatgaaacgagcgaggggatttttgtaacttttagtaaaaagcacaagacgacaggtaaattgcataatgaaaatcctatcaacataaagcaaggtgttgaagaggcgcttaaacaaaataaagacacagcaaaacatctcaaaaaagaggatataaaagaattaaaaaaacgattaaaaaacgcgcaaagtgagattttattgtgtgtagagcaagaaaaagaaaagctagggcgaaagctaagtggcgaggaatacggcaaaattaaaagcaagatagaataccctataaaagaacagttatacaaagaagtcaaacaaagacaaattcaaaacaatgtgtggatagaaattagagggcatatttatgagattgatggaatgactaggattgatatttttcgtctcaacaatagatattatgctgtgcctgtatttatcacagataaagagctatcacacattgcaaagcccgataattgcgaattagacgataaagactttttgttttctcttcatatcggggatttgatagagtttgggtatagcgatgatattaaacgatatggatattatagaggatttaagcaaaatggacaaattaaaatttatcatcatagtggatacttaccaaagcaagacttttggaaagataaaacgctagaaaatggaaaggaaaaatcacagtttccgcaaaaagttataagcattagtcaatttaaatccctaaaactctgccatatcaatgcactaggacacagacaaacacttaaagtattagagataaaagaaggcgatagagtgcgaggtaaagctcctttgtgtggcactttgggcaaaaagaaaataaagtttaacataacaaaaaaggagacacaatgagctttgatgaagcctttaaaagcgtgattatcgcaaatgatgcgaagttgagtttaaaacaaaatcatttgcatatttttcaaagcgacaatgaggcgaatctctatttaaaagatttagcttttataatccttgaatcgccgcaaatcacgctcacttcggcacttttaagcgcactagcaaagcacaatgtcgtgcttttaagctgcgatgaaagccacttgccaaatggcgtttttatgccctttttaacgcactttcaagccgcactcaccgccaaagaacaacttggggcaaagcctcaaacaaaggctattttgtggcaaaggattgtcaaaaacaaaatccgcaatcaagcctttgttttgcgtgaggctggctttgaaaaagaagcgggcgaacttgaaaatttagctaaaaatgtaaggcttaatgatggctcgtatatggaaagccgcgccgctgcgctttattttaaaacgctttttggctcaaattttagccgtgatgagctttgctttgaaaattcagctctaaactatggctacgccgttgtgcgcgctgctgtggtgcgtgccgtgtgcgtgagcgggcttgtgagctgggagggggtaaagcactctaacgcttttaatcaatttaacctagccgatgatttaatcgagccttttcgcgcctttgtagatagctgtgttttggggttttgtgctgaatttaagggcgatgagtttttgcaaaaagagcataaaagaacgcttgttgaaaacttgcaaaaagcggtgtttgtaaatgagcgcaaactgcctttaatccgcgctgtaaatcatttcgtgcaaagttttaaaagcgccttgctcaatggcacagagcttgcaaatgtcagctttgcttgaagataaatttatgcgcgttttgctgctttttgacctgccaacaacgagcaaaaaagagcaaaaacacgcggcgaaattccgcaacgaactcataaaacttggtttttttatgatgcaatttagcgtgtatatgcgaatttgcaagggcttggtttcggcaaatgctgtgatttcgcgtgtgcgtggtattttgccgccgcttggcaatgtgcgcgcgctcatcatcactgaaaagcagtttgacaatatgcaaattctgcttggaagtgcgggttttaacgaaagcgtgaatgatgataaaaatctcgtgctgtttgcgtttgatgagaaaatcggggattatcggtatttgggcaacggacaaggtgagcgtgatgagggcataaaaaatgacgaaaatgcttgtgggagcgaaaatgcgccaaaatgtgaaaatttggatttttcaaagggcgaaaatgctgagaaagaggattttgtaagcaaatcaaaacgcaaaaagccacaagagcaaagtttgtttgaattttaagcttttagtggctttatgtgggctatattttaaatttggctggtaaattgagcgttaatggctttgatgaatttggcttttgtgggtggattatgcgtgttttggtgctatttagccttttgtaagagtgtattttgagtgtttttcgttatttaacttttttaaagcgtgctttgtatgtgtttttaagttttaaaatttatttaaaggcttgtaaatacgctatttgatttattataaattgaaatttgctactaaaatgcgtgataacacctttttaagcaagtgtaaagtgcctttttatcgcaataaattacaaacaaaaaacggcaaaggcacgtttatcctttgtcgcaagtgctaaaaaagagctaggcaaagcaaaatcaatgcttttgccttgcaaagtgtcgcaaaaagcctttgtaaagccactgcataaggcttgtagaaaattcgcgtaaaatcgggtgggcttagggattgactagcttgcctcccttgaaacaagcataaccctgcggggcgcccacaaccccttattttagtcccttgttaattctttatgccataagtatagcaaaaaatcgtatatttttgcctaaaatttcgcaaaaaccttgaaaaattcttactctatggtgggtgtattttaccataaaaagaattaacaagggactaaaacttaaattaagatgcactgccgcaagctctcattttaccataaaaagaattaacaagggactaaaaccattcctatcaacgccaaaaatgtcgggttattttaccataaaaagaattaacaagggactaaaactcggctttgtgtattgattatcgctatatgattttaccataaaaagaattaacaagggactaaaacttgtttggcttgcgttttcttgtgatacttattttaccataaaaagaattaacaagggactaaaactgacggctagttttctttttgcaggtggtagattttaccataaaaagaattaacaagggactaaaactcgttactgcgccagatggcggttggcaggattttaccataaaaagaattaacaagggactaaaactccattgctggacgggctagcgtttttttaattttaccataaaaagaattaacaagggactaaaacgactcctgatgtcggtattcattataatttattttaccataaaaagaattaacaagggactaaaactaagtgcagctgcttcaaaggctgctagtaattttaccataaaaagaattaacaagggactaaaactatagtattaaaaatgttacaataaaaaacattttaccataaaaagaattaacaagggactaaaaccgcctttatgagtaaggttaccgattttttattttaccataaaaagaattaacaagggactaaaacacccattgcggctagatgttgtgtatttacattttaccataaaaagaattaacaagggactaaaacctatggtgatgacacatataaagatgaataattttaccataaaaagaattaacaagggactaaaacagcttgcctaactatcaagttgaaacaaaaattttaccataaaaagaattaacaagggactaaaacgggcaaacaatcctgaacgtaaaagggaatattttaccataaaaagaattaacaagggactaaaacacgttcagctttttttgaaacgttttcgtaattttaccataaaaagaattaacaagggactaaaacggtctcggcgcagatagcgcaagttttagattttaccataaaaagaattaacaagggactaaaacctgtttagcaggcgttcctttgtccttgttattttaccataaaaagaattaacaagggactaaaacaccttgtgagtgcataaaatatctttcagattttaccataaaaagaattaacaaggactaaaacttatagtagcgttgaaaaagcacttcttgcactttgtttatatcaagctcaaatttcgctagcggtatgtcaaggttcattatgttggagtgaaaattttgtccgcctgctaaatccccgcccactcgtcccattatttgctcatctaatccgtctctttgaatgtccccgcgcaaacctttcgtggtatcaaaagctatggtagggctgaaattctgccctgcaccagccgcgccttgattgtaaatgcttccatttgcataaatagcatactcgccgtaaatcatcatatttgtgagcgcgtagctttgctgttcttttgtgcttttttctcgcaaaaaagccgttttgctctgcacaaacatagccaaaccgcccaaaccgcttgccttatagctgtaatgccttgccgcgctcacgccgatataagctgctgtcgcgcttactatcgcagccgttaagccaacgccactcaaaccgccaaaaagcgtgataccaaagggcgcaaaagcaggacaaacaaagcttaccaccgccgttacaaccgcgatgacaaagcttaaaatagccacgccgccgttgcctgaaacaaggctttgataccaagtaagcgagctttcggctttgttttcagcgtagttccaagcggggttgtggatttcataataactcaaaagcattccgtccgtgcgtccgccttgatatgctgtgctagctctatcaagggcgttgccaacgcctaacttgcgaaattcgtttgtccattttgcattgagcctttcaagctctgcttttttgctgttgtagtatcttgtccttttcttgcgataagggctttctatccacgccattttctgccttttttgtttttttgtcaaaatttgacattaaattttttttggtgtataatgcgctttacaagtcggctataaagcgtagtattttgtcttttgacaaacttacaggtttaacctgcttttctggctaccgaatttagtcggctttataaatcagtgtatgctcttttattaaaattgaaattctgctattactcccattatagcttgttctataaaacatttttgaattattttttggcacggcaatgcttataaggttaatcagtcctttattgtttttaaaggctttgtaaaaatagattgttccgcttttatcctgcgttataaatagcggtttttgcagcgtttcaagcactccaccgctgagataaatcctattttccttagtattacctttaaaattaccttttttatcgccgtcctttgtgagatgataaaacatatatctaggattgacttccaaatccgcaataggcgttttgatgatagccttgctgtcattgtcaaattgtcctaaaaactttttataattaagactgctcggcaaattcacagctaaattttcaagtttttgataatcaaccgcgccgtgttcgtctaaaaattcgctcaaatccatacttttgccttgttgtttttgcgacattttaccaaaattttgtaaatttgttttgcttgcactctcatcacttcg

SEQ ID NO: 3279 - DNA, 10150 bp, synthetic construct
  source 1..10150: mol_type = other DNA
  misc_feature 1..10150: note = Synthetic
gctcttgctcgctcggagcacttccgagtgcaggattagatagaccctcgcatttagatgaaatcttaccacaaaaaagcaaacaaagcaagccaaaaaggtatcgccgacaggagttgcacctgcaatatcaaccactcttaacgagagacttgttgctgctacttcgttgcacgcatcaagcgatacccacaaggcattatacttcatcaaaacttaaaagctgatgaatttaaattttttgtgctgtttgattaaaggtttttattttggacttgaattttgtgccataaatttcgcaacaacactttaaaattgagcgcatttgctctaatcaaaatttatcatcatctttgggcgatttgtttgcttttttgtggtaggattaggtttattagggtttgataaaggtcgtttatcagcaaaaagggcatcgccgaaagtcttgtccttttcccttgctgtctcataagctgttgctaaccattgatttttaccaaccccacaaaaaacttgcgaaagtcctagtttgcgatatatgttgtttttttgtgccaaatagtgtaaattcaaaataaaatgttataatagcatcagcaagaggggacagtggcacatcaagaccctctcttgcccttttctttatctacgaaaatttaaatcttattctaccatcatcttacaatcagcttgattttagggatttggtataatttgcttgtcgataggcgaacgcatacttgatgtgccagccgccccaacttgattgttatcagggtgtgagagttgggcgttcttactgcctatcaaattttgcattttaagactttttgtctgaaatttagtttgatgatttgcaaaaatatagcccataaagcaacatttagcacaaacgctctctgcaccgctttacaagcagtttgcgtttgatttatctttgccctttaaactctgatttatttttatttgttagaatttgctttcaaagatattttaaatgcgttttaaggaagcatttatggtaacaagacataaatttttttcgtcaaagcacctaaaaacagcactttggtgcttatgcgcactcactttgtcgctgcacggcaaggattatgcccttgacaaaggctcaaaaaaatggcataagagataaagtatcttagcgagatttttaaagctcaaatttaagggtaaatttaagcgttttgctttttgggtaaatttagctattattgtgaaagattttgcaaggaaaacagggtgaaaacatatcttttaaaaaacaaagatgaagcggttttgagttttaatgcagggcgcaaaaagagctgtgatgagcttttcatcagcgacataaaaatcatcaatgaaaaatttttgccctttcaaatcgacacaaacgcccttgaaagctcgcttacgaagtggctcaaaagcagaaggttgccagagcatagagtttatgccgatatgattttagctatgcttgataaaaagggctttaaagatgattttatggactatatagactatggtttggggcttagcttaaatgatagcctttggatagtgccgcaaagtgaggatttaaaatgggcggattttagcctttacactcatcattttaacgcaaatttgcaaagtgccgcaaggggcgcaaaggctttgcaaatcgctccctttgttaaatccccagagcttaccacaaacggaatgttgccaaaattttggcttaaaacacaggataaaattctgctttacaagggcgaaagtggtttttgtgagtgtggcgaagcctttggagagtattatatgcaccaagtggctgaaataatgggctttgagtgtgttttttatgatttagctgagtgcgaaagccgcatttacagcacttgcgagctttttacgagtgaaaatgaaggctacgctcctataaatttttttctcaacaaagaacaaagaaagctcaaaaaaatggactttgcgaagatgattgagccttattttgataagcaaaaatttgaagatttaatgctttttgacgcgctcatttacaacacggacaggcatttggggaattttggcttgatttttgacacgcaaacgggcgagattttgcgccctgcgccgatttttgacaatggttgcagcttgttttctttgcttcaaaaagatgatttaaaggacatatttggcacactatgcgtgcataaatcttattttgaccttgcttttatcgaccaaatagtgctttttgtgcgaaaaagacatattaaaaatttgcaaaaattgctgaattttagctttaaacggcacgaaaaattcaaccttaatgatgaatggctcgtggctgcggagcagtttataagaaacaatgccaaatacgccttgcattttgcagactatgacagaagcgagcttgtaaaagtcgatgaacgcagcttgcacccgcttattttgaaagatattgccgcacttacaaaggcgcacgagctaaaaaacgagtgcgatatagaaaaatggcagtatgctctgcaaagcacgctgaatgtgtttcagtatagcaagcgcatttcgggcgaagtggcggattttttgcgagcaaagtatcttgggctttactacaacggcattgaggcgcaaaacattgtatatgcctttgaaagccttgacaaaaatagctaaatttcgcttaaatttaaacgaggtttgctaaaattagctataatgcgcttttattttatgagaaaggtttgggtgatgaatttcctttttatcgacttaaaagctcagtataacgcctacaaagatgagatagataccgccatagctggcgttttgcaaagcacttctttcatcggcggggcggcacttgatgaatttgaagcaaatttagccaaatatgtaggcgtgaaaaacgccataggctgttcgagtgggacttcggctcttgttttagcacttttagccctaaatatcaagcaaggcgatgaagtcatcgtgccaagctttactttcatcgctacggctgaaatggtgagtttgctgggcgcaacgcctgtttttgcggacattagtttagatgattataatgtgagcgttgagagtatcaagcaccttgtgagcgaaaaaacaaaggcagttatcgctgtgagtatctttgggcaaatgcctgatttgcttgctttgaatgaattttgcaagagtaaaaatatcgttttgatagaagatggcgcacaaagctttggcgcgacacaagacatagggggggggcagttgaaaaaatcctgttctattgccccactttcttgcacgagcttttttccgtcaaagcctttgggcgcgtatggagacgctggagctgtttttaccaacgatgacgcgcttgctaaaaaaattcgcactattttaaatcacggacaaaaagagcgttacaagcacgaaatcatcggcattaacgggcgacttgatagcattcaagcggcgattttaaatgtgaaattaaggcatttagatgatgagctggcaaaaagagagcaaatcgctcaaatttatcaaaaacggctgcaaaatgccattttaccgcacattaaaaagggctttacgagcgtgtatgcgcagtattctgtgcgggtgcaagagcgttccaaatgtatagaaaagctcgctgcaaagggcattccaacggcgattcactaccccttagggctacatttgcaagaagcctttaaatcgcttggctacaaaaaaggctcactgccaaacactgagctggtgagcgagcagattttatcgctgccgatgagtgcttttttggatgaggctcatcaaaatgaggtgattaaggcttttgaatgaaaataggcattgctgggcttggcaaaatggggacaaaccatttaaacgagctgagaaaagatgatgaattcaaagtcgccgccctttatgatttgcgccaaaatgctgaatttaaagagccattttacacgaatttagatgaatttttaaaggcaaatttagacattgtcatcatcgcaacgcctactagcacgcatttaaagctggcaaaagctattttagcaaaggtaaaatgtgtgcttatcgaaaagcccttagcgatgaatttaaaagagatgaatgaaataaaagagctggctaaaaagcacgaaagtagcgtagctgtgggatttagcgagaggtttaatcctgcgattttagccctaaaaaaagagcttgcaaatgaaaaaatcatcagcataaacataaaacgatactcgccctttcctgcgcgcataagcgatgtggggattttgcaggatttaagcatacacgatattgatttagtgggctttttaagtggagaaaactttgcaaagcaaggacttttgagcctaaaaaaagatgacagagagatagaggcgattatcacgcttcaaagtgggctaaattcaaagcaaaatatcatcgccgcggttcatcaaagctggaactgcgccttaaaaattcgccttgtgagcgtgataacagaaaatgccttttttgaggcggatttaaacaatttttctttgcaaaaaaacggcttgccacttgccttacaaggcgcaagtcctttatttagcgagcataaagagcttttggacttagctaaaagcggcaaaatggggcgtttggcaagtataaaagatgcgcttaacgcgcaagcgtgcttggagtgagtttgaagctggttttgtttttgaatatgggaggcgtcagcaagcgcgaggattgcgagctttttttgaaaaatatgtttaatgataaatacattttgacgataaaaagcgacattttgcgctcttttgtggcgttttttatcacaaaatttcgcgctaaaaaaatgtggcaaaattatcttaaaatcgggggaaaatcgcccttaaatgacataagcgcaaggctttgcgagaagctaaatgctgaatttttaaatcaaaatttaaaagataatgctaaaaaaatgagtcaaaattcagtcctaaatttaaaaactcatcacagcaaaaagggcgaaaatttagagcttgcgcccaaagaaagcaaaaatttaaagcttaaatcacagcttaaatttgattttatcaacacctatgtgccgccctttgcaagcgaagttttaagcaaatatgagcttacaaaagatgatgaaatcgtgctttttccactctatccgcaccactcgcaaaccaccgtgctttcatcacttgaatgcgttaaaggcgagattttaaaggcgcaaattcaagcaaaagtgagtgaaattcctgttttttttgagagcgaaatttacaacgaaatgctgataaagcacattttaaaggcaaatgagacttacaaaaaggcgcgcaaaaaaacgctcattttttcagcgcattccttacctgtatcgactataaaggctggggatatttaccaaacgcacattgaaaggcattttgcgcttttaaaagagcgtttaaagccttattttaaggacatagtgcttggctatcagtcaaaactaggacctgtgaaatggcttgaaccaagcactagcgagcttttggctcagcttacaaatgaagcgcttgtttatccgctgtctttttgcgtagattgcagtgaaaccgcttttgagctagaaatcgagtatagaaaaatcgccgcaaaggactacaaagtcatcgcctgtcctaatgatagtgctgaatttgtggagtttgtgaaagcgtatgtaaaggatagatgatgaaaaaatacctttttgttttgcttttagccttttcagtggcgggctgctcggtaacgggcgacaggcaagtcgatgcgatgattgataaaatgggcattgaaatcatacacgatatccccatcaacgacaacacaaaggctggcaagcacatagacaacaccatacatatgaaagcgcgctcattttaccccgacaaacagcagtatttgctggtgcttttgcacgagatagcccatcacataggctctttaaacaagcgcgtgtcttaccaactctactcacaaagcgattacaggctgcttgaagagcttatcgcaaacaaatacgccacaacgatgatgaaaaaatttggctacaaactgcgctttaattacgacaaactcaacaaagaatatatgaacgagctgacaacgcagcacggctactccaaagagcgcgtcaatcaatatgtcaatgccgagctaaaacgctgcttgcaaacgagcgataggcttttgaaacgccgaatttagcgtgcttttggtttgcgttgatttggcataatgatggcataatgcaaatttaaggagtgaaaatgaaagttttagggtttgatataggtgtagcaagcataggctgggctttggtggaggatagcatcataagagatgagtgcaaaatcattgattgtggtgtgcgaacttttgagtctgtgggtgaaaagcacaaagagcgtggagaacaaagacgcgctaggcgcaatgtcgcacggacaaagtctaggctaaataatatcaaaaagtatctttttgagaattttgctagtgcgcaaggtgattttgcggattttaacgagtggcaaaagaaactttttgccaaaaataacgagagcgaacaaaaagaacattctgcaaaaaatgatgagaataaacaaaaagaacgagaactatcaactccttatcttttgcgtaaaaaggcactaaaagaacaaataagcgttgatgaactctgccaaatcatcattcatattgtgaaacatagagcatataacgatagcggcaaggaatatgaagccgaaaatatcctagaagcgcaagatgagacaatccaagcagatagcaaaagtgtaaaagaaaaatcaaacaacaaagatgagaaaaaagataaaaatgcagataagaaaaaactaaaagctgcgatgaaagaaaatgttaagcaagtcagcgacaaagcctatcttaatgagtatatttatgataggcaaaaacgactagcacaaaaaaatgctgagattaaatatcaaaaattgcttgaaaaatttaaaaacgaatcaaaatacgaatccgtgcataaattagaagctaaaaaagagaggtggatagcaacaattaccgagcatagcataaaaatgcgtaacggttcagttgtaaggataaatgaaaacggcaaagaagtggaggagcgaagctatgttaatgctatgcctagaagtgcgataaaggctgaactgcaaaagattttagatacgcagattgcaaaagcaaagcaagacgaatcatacgcccaaaagctagaaaatttaaaaaccgagctgtttgcagaaaatgataatgggcttgggtttttgcaaaatcgtccgctaaaaagttcgcaaaatttgcttggcaaatgcagcattgatatgagagaatatcgcgtaagtgcctttgctcctagtgtgatagaatttaatctgcttacaaaacttgctaatcttttgatttatcttaatggacaacacaaagatttggatattgactacgaaaagacaagtgaaagtgcgataagagcattgcaagaaaaacacaagttagattttagcgatattagaagttgtatttatctaaaaagcggagaaagtctagcacaaacttatgaaatagaattgttaggttttaacaaaaaagagacacaagcaaataaaccaaaatccacaaagagaactcaaaacaaagatagcgacaaacttcttacacaagagaaaaacgcgactttttataatcctagcaaaaaattggctttgctggaagcgacttttggtaaggatttttggagtcatcaaaaagatattgacaaattaacgggaattttatctgtcaataaacgcaaaaaggacattcaaaagaagttaaataaacataaatatagccgcattgatgataatctaaaaacaaaggctctaaattcacttggggctgggtttagcgggacaagtgcgtattgtcttaatgtgatttgggagtgcctagaaaagatgcgtttgggaaaaagtgaatacgaggctacgacagcttacaaggcaaatctcaacgaggatagaaaatatcaagaatttatgagtcaatttacaaagtctttaaaactgcctgcctttgaagaaacaccaaacgcaaatcttaatcacatttgcgctcaaatgcgtcaaatcataaataagatttttgcaaaacacggcgaagtggcaaagattcgcatagaattgctgcgagaagtaggacaaagtgagaagcaaaagaaagaaatccaaaaagcacaagatgaaaataaaaagtttaatgaagttgccacaaagatttgcgaggaaatcgggctaaaaacaacaaacaaagataatatcacaaaagttaagctgtggattttgcaaaatgagtgtgatatttatccaagcattcaaaaaggctcacaagataaatttaatgccaaagaattttacgctgattataaaaataagccatcgattgatgtttatgattgtaagaaaatttcactgcaagatttgtgcgatgaaaatgccttgcaaattgaccatattatccctaaaagcaaggttttggtcgatgaatttacgaataaagtcttaacctttacaaacaacaatgctacaaaaacttcacaaactccatatcaatggtttggtgcagataaggcaaaatgggaggcctttaaagtgcgagtggaggctaccaaactatccaaaaaggcaaaatcaattttactcaaacaagaaatagatgatatgaaaccaagcaggtggctcaacgacacaaaaacagcgtctgtgtatattaaaaattatttggaaaaatatgtgaaatttgcggacattcctaatgatttgcaagatgacgaggaaagagaatcaaagcaaattcggcgaatcgaagtggtaaatggcagacttacttctacattaaggcatttttggggcattggcaaaaaagataggacaaatcatctgcatcacgcacaagatgctgtaatcatagccttttgtagcagtaggacgatacaacattttgcaaaatttttgcaaactgaggaggacaaatcacaagcaaaattaaatagcgaggaaataactaaaattatgaaacaaaatgcaaggggacgatgggtgtttaggcgtccgtttagtggttttgttgctgatttgacgaaaagaatttatggtgatgaaacgagcgaggggatttttgtaacttttagtaaaaagcacaagacgacaggtaaattgcataatgaaaatcctatcaacataaagcaaggtgttgaagaggcactcaaacaaaataaagacacagcaaaacatctcacaaaaaagaggatataaaagaattaaaaaaacgattaaaaaacgcacaaagcgagattttattgtgtgtagagcaagaaaaagaaaagctagggcgaaagctaagtggcgaggaatacggcaaaattaaaagcaagatagaataccctataaaagagcagttatacaaagaagtcaaacaaagacaaattcaaaacaatgtgtggatagaaattagagggcgtatttatgagattgatggaatgactaggattgatatattttatcttaacgatagatattatgctgtgccggtatttatcacagataaagagctatcacacattgcaaagcccgataattgcgaattagacgataaagactttttgttttctcttcatatcggggatttgatagagtttgggtatagcgatgatattaaacgatatggatattatagaggatttaagcaaaatggacaaattaaaatttatcatcatagcggatacttaccaaagcaagacttttggaaagataaaacgctagaaaatggaaaggaaaaatcacagtttccgcaaaaagttataagcattagtcaatttaaatccctaaaactctgccatatcaatgcgctaggacatagacttaaaatagagaaaggcgatagggtgcgaggtaaagctcctttgtgtggcactttgggcaaaaagaaaataaagtttgacataataaaaaaggaggcacaatgagctttgatgaagcctttaaaagcgtgattatcgcaaatgatg

SEQ ID NO: 3280 - DNA, 23798 bp, synthetic construct
  misc_feature 1..23798: note = Synthetic
  source 1..23798: mol_type = other DNA
agcacggctctcttcctcatcttcgtcggcgtcctgctgtggctgggcggtgagcttgcattgcgttcgatcgccatcgacgagcgctcggcgaccggggcttggggcgggccggtctgggcggcgaagagcctgctgcccataggcgccgtgctgcttgtcctggcatggctgtcgcgcctttacaggttgtgggccggcgacgagcgggacggaggctcggcatgagcgatccggtcctggtcacgaccttgcttttcggcggcctcgtcgttttcctggccatcggcgtacccatcgcttttgcgctgggcgggctcagcgccgtgctgatcgccaccatgtggaacgtcgatggcctgaacctactgccgatgcgggcgttccagaacacctccagctttcagttcctggcgataccactgttcattttcatggcctcggtgctgcagcgttccggtatcgccgaaacgctgtacaacaccatgcagagtttcgccggcaccctgcgcggcgggctggccgtcggcaccatcgtcatctgcacgctgttcgccgcgatggccggaatcagcggcgcggccaccattgccatggggcttctggcggtcccggcgatgctggagcgtggttacgccaagggcatcgcgcttggttccgtcgccgcgggcgggtcgttgggtatccttatcccgcccagcgtgacgatgatcgtgtacgggctgatctccggcacctccatcggcaagctgtatgcgggcggcgttctcccgggcctgttgatcgcagggcttttcatcgcctacctgctgctgcgcgggtggctacagccggagatggcgggcggcacggagacgcggcgctattcgtggcgtgagaagctggtcagcctgaagggccttatcgttccgctgggtctcgtcgttgcggtgctcggctcgatcctgggcggcctggccagcgtgaccgaggccgccgccgtgggcgcggcaggggcgttgctggccgccggcgtccagcggcggctgggatggggcttgatccaggaggtctgcaacgagacgctgctgctgagctgcatgatcttctggatcatcatcggcgcctcggcgctttccaccttctacacggcggccggcgcctcgcgcctgatcgagagccttgtgctgggcctggaggtggaccgctacgtcatcctgatcggtattctgggactcctgctggcactcggcatggttctggacaccgtcggtatcatcatgatcacggcgcctatcgtcgtgccgatcgtcacgaagctgggcttcgatcccgtctggttcggcatcctgttcatcgtgaacatggagatcggcttcctgacgccgccgttcgggtacaacctgttctacctgcgcggcgtgtcgccgccgtcggtgacgatgggcgatatctacaagtccgtgctgcccttcgtgatgctgatgctgctggcgaccggcatcatgctggtgttccacgacatcatcctgttcctgccggacaggctgttctgagccgtctatccggcaactgcccccagcatgtcggcaaagcgcgaggccccctgcttcaaggccgccaccagttcctccgtggggatctggcgcaggcggctgcacggccctgttactcccaggctgtagagaaccccggcgccggcaagatggatgggacaggcataggccatgacgttgtcgtcgatctcgcggtcgcagatcgcatagccggtttcgcgcacgcgggcgaggtcgacttccagatcggcgcggctggtgatggtgtgttcggtcagcgccggcagtgggtcgggcagcagccggtccagggtttctccgtcctggtacgccaggatcgccttggccgaagaggccgcgtgcgggggcagctcggcgcccggcagcacgtgcaggcggtgcccctggtcgggcgcggagcgggcgatggcgcgaacgtgccgctggcccagccggaccatgtagcaggtttccttgaactccttcgccaagtcgtcgcagacgatctgcgcatagccggccaccttgtcccggtcgaggcccaggtagaggatccgccacagccgccggccgacggtgaagcttttgtagtgcgcaccgtccgcttccaggatgccggtatcgacgagcgcgttgatcagccgatgaacagtcggcttcggcagccccgtcagcaccgcgatctcggtcagtccgacactctggtgagaggcggccaccacctcagcgaccctcatgtagcgttccaggggaagggtcttctgtctctcgctcatcccgtactccgcttgcgccgccgatgccgttccatgggaacccaggcggttgacaacgtccgctcagtcgtttctagtatcataaatcagaacaaagtttcaataaacgaaacaaccttacgccttagagtcgcgttatgcgtcaggaggacaacgtgtcgcaaatcagcgtcggcgtcgatgtcggtggcaccttcaccgatttcatcctgctcgacggcgagagcgggacatggcgaaccgccaaggtgccgacgacggtcggcgatctctccgacggcttccttcaggggctgagggaactggacgttgcgccgtcggccatcgactggctggtgcacggcacgacggcgggcaccaatgcggtcctggagcgcaagggcgcggtctgcggcctgatcacgacggcggggttccgcgacgtcctggaactgggccggcgcacgcggccgcacaactacggcctgtcgggcagcttcgagccgctgatcccccgcaacctccgccttgaggtgcccgagcggatcgacgcgcacggcaggatcgtgcagccgctggacgaagcggcggtgcgcgcggcggtcgagcggctgcgcgaaatgggggccgaatcggtcgtcgttcacttcctgcacgcctacgccaaccccgcgcacgagcagcgctgcgccgagatcgtgcgggagatctggccaaacggccacgtcgtcgccgggcatgagatcatccgcgagatgcgcgagttcgagcggggcagcactgcggccatccacgcggcgatccggccgatcgtgacgagctacatcgaccgcgtggccgagcggctgaaggattcgggttatgcccgccagcttctggtgatgcaggcaaacggcggcatgatggatgcttcggtcgtgggcgagaacgcggcgcacacggtgatgtccggcccggccgctggcgtgctggccgccgccgagatcgcccgcgccgccggggtcgggaatgtcatcacaggcgatatggggggcaccagctatgacgtggccgtggtggtggacggcgagccggtcatcacggcggagaaggacctggcctacgccgtgccgctgcgcatcccgatgatcgatatccacaccatcggggccggcggcggcagcatcgcccgcgtggacagtgccgggatgcttcgcgtcggcccggatagcgcgggctcttatccgggtcccatcggctatggccggggcggtaaggagccgacgattaccgacgcgaacctccttctcggccgcatcaacccggacgccgtcaccggctccggcgggcacgctcccttgcaggaaatcgaggccgccatcgacgcgaagattggacggccgctcagtatggacaccgtgaaggcagcgaaggccgtaatcgacgttgcggtcaacgagcttgccgccgcgatccggctgatttccatcgagaaaggccacgatcctcgtgacttcgcgctgatgccctacggcggggcggggccgctgcacgccgtcgagatcgcccgcgaactggggctgccgagggttctggtgccgcgctttcccggcctgacgtcggcgcttggctgcatcctggcggacgtgcgccacgacttcgtgcagaccgtgaacacgccggtgcgggagcttgagtctgccgatgtcgaccgctggctcgccgatcaggcgaaggccggcaagaccttgctggaacgcgagggcgtcaccgtcgagaccgtcgaggtgcggcacgagttcgacctgctctaccagggtcagtcccatgtcatccgcctgccgcagcgcggcgcgtccttcgatccggagaccgtgctggccgacatgacggcacactaccaggagcgtttcgggatcacgctgcccgagatggtgccggtcctggtgaatatccgcacgaccgtcatcggcgtgcgcaagcgtcccgacctggccctgttcggcggtggcgaggcgaaggccgaggtgcccgacgcgtccggacagcgccctgtctacttcggcgagcgttggtacgacaccaaggtctaccgccgcgaggacatgggggatggcagctggatcgccggtcccgccattgtcgagcaactcgacaccaccatcgtgatcgaccccggtgccgccgggcggaccgacgccttcggcaacatgatcatcgacgtgaacgccaacgccgcatccgcggaggccagcgcatgaccatcgatcccgttactctgaccgtcatcgagaaggggctgcagcaggtttgcagcgaaatggacctggtgcacgagaagacctccttctcgcccgtcatctccgaagccttcgaccgctccaacggcatctacggcctggccgacggacgggtgatcgcgcagggcgagctgggcctgccgatcttcgtcggcgtcatgcaggagaccacccgctccgtcattgccgagcggcaggacctggaggacggcgacgtcatcctggtgaacgacccctacctgggcgggacgcatctgatggacgtcaagatggtgcggcccttctactatcgcggccggccgtggtgctatctggcgaacaccggccactggcccgacaccggcggcatggtgccgggcggcttcaacagcaccgccaccgagatccaccaggaaggcctgcgcatcccgcccgtcaagctggtgcagcgcggcgagatggacgacgacctggtcaagctggtgcttgccaacatccgcgtcgccgaggagcgcatcggcgatatccgcgcgcagatcgccgcccttgccaccggcgcgcggcggctgacggcgctgctggaccgctacggcgaggaaaccgtcgaggctgcgatcgccgagcttgagcagcgctcggaacggatgatgcgcagccacatcgaggccatccccgacggaacctacgcggcctcggcctacatggacagcgacggcgtagtgaacgcgccgcttgaggtggccgtcgacgtccgcgtcgagggctcggacattcacttcgacctgtcacgctccagcccgccgtgccaggggccgatgaactcggtttgggcgagcacgctgtccgccgtctatctggcgatgaagcacatcttcccggacgtgccgctcaacgccggctgcttcgctccgattcacgtcgagccgccggaggggacgttcctctacgcccactatccgcgcccggttgccggctgtgcggccgaggtctcgcagcgcgtggtggaatcggtcctgcttgccctgtcggaagcgatccccgaccggctgttcgcagcacccgccggaaccagcggcaacctcagcatgggcggcttcgacccggaaacggggcggagctacatcatgtattatttctccggcggcggttacggtggctggtgggctggcgacgggatcagcaacggctgttccaccatcggcatctcgaagagccagccggtcgagatcctggaacagcgctatcccatcctcatcgagcagttcgcgctccgcgaaggctcgggcggcgccgggcgctaccggggcggcttcggcgttcgctatcgcgtgcgcctgctacgcggcaacgccaaggcatcgttcctgatggagcacgggcgcttcggtccgcccggcattctgggcggcgacgccggcgcgccaaacgtcatccggatctgccgcaatggcgaaatgacctcgcccgaacatctctcgaagggcgagggctacctgctgggcgaaggcgactggatcgaggtggagacgcccggtggcggcggctatggccccgccggggagcgcgcgcccgagttgatcgagcgcgaccgcttgcgcggctacttcgacgctggtcccggcggtccggatgcgcccgcgaatgccacgacccggaaggaaagtgcctgacatgacgacgccctgcatcatcaccgtcgcgattaccggctccgtcccgcgcaagtcgcacaaccccgccgtgccgatcacggtcgacgagcaggtggaatcgacgcacgccgctttcgaggcaggcgccaccatcgcgcatgtccacgtccgcaacgacgacgagacaccgtcgtcggacccggagaaattcgcggcctacctggacggcgtgcgccggcattgccccggcatgatcgtccagttctccaccggcgggcgggggcgctccaccgaggcgcgcggcagcatgctccatctgcgcccggagatggcgtcgctcgctaccggctccgtcaacttccccagcatgatctacgagaaccatccggatttcgtgaaggaactggccgaccggatgcggtgcgagggcatcaagccggagatcgagatcttcgacctgtcgatgctctacaaggcggtcgagatggcggcggtcggcgagcttgtccgccctgtccacgtgcagttcgtgctgggcgtgaagaatgcgctgccagcacggcgcgatatcctcgattttgaggtggcccaacttcgcgagcttctgcccgatgctacctggacggcggccgggatcggccggcatcagcttgaggtcaaccactgggcgttggagatgggcggccactgccgtacggggcttgaggacaacatccgcttcgacaagagccggctggccgagagcaacgcggaactggtcgcccgcgtggccgacctctgtgccgactacgaccgtcacccggcgacggcggtggaggcacggcggcttctgtcgatcccgcaggcttgagccgggcggctggagcgcgcccgcgacgctcaggccgcgccggccccttgcagcgagtcgcgtagcacgacggccaggtggtgcgcctttcgcccggttgcgtcggcgatctggtggcggcaggaggtgccgtcggcaaccaggatcgcatcttccggcgcctgccggatggccggcagcagcgacagttcggccatccgcatcgacacctcgtagtgctctgcctcgtagccgaaggcaccggccatgccgcagcaggaggactcgatggcattgacctccaggccgggcaccagttccaggaccgtcttcaccgcgccgaacgcgccgaaggccttctcgtggcagtgaccgtgcaggtaggcggacgtgcagggcagcgcgttgagcggcaaatccaaccggcgcgtcgcgtgctcttgcgccaggaactcggcgaaggtcttggcctgcatgcccaccgcctccgccgcgcggcccggtagcaccgccgcgagttcgtcgcgcagggtgaggaggcaggagggctccaggccgacgatgggaacgccacgctccgccagggggctcagcactgtcagtgtccgttccagttccgcgcgcgcctcgtcgaccaagccggtggccaggaaggtacgtccgcagcatagaggcctgccgccgtcgtcggggcgggcgacgttcacgcggcagccggcggcctccagcacggcgatggccgcgcgggccgtctccggctcgtggtaggcgctgaaggtatcgacgaacagcgcgacctcgcgggtgtcggccgacttggcgcggctggtctcggccacgtccggccggaagcggtccgaccgccacgcgggcagcgagcgatgacgggacaggcccagcagcttctcgcgcgccgcacccagccccggcagccgcgcggcgaagttcagcagcggcgcgaagcggctggccagcggagcgtagcggggcaggtaggcgatgaggcggtcgcgggcggaaagcggcgcaacttttcgatactgcgcggtggcctcgatcttcatccgcgccatgtccacgccggtcgggcactcccgccggcagcccttgcagccgacgcacagtgacagcgtctcgcgcatctccggcgacgtcagcgcgtccctgccaagctggccgctcagcgcgaggcgcaggctgttggcgcggccgcgcgtggcgtcgcgctcgtccatcgtcacccggtaggaggggcacatgacgcccggcgcgaacttccggcaggcgccgttgttgttgcacatctccgtcgcgcccaggaagccgccccaggcggaccagtccagcaccgtttccgccggcccttggtcggcgtagcccggcttgaagcggaacagcgtgcggtcgtcgctttgcggcgcgcggacgatcttgcccggattgaaggtctcatctggatcgaaggcgtccttgaccacctcgaacgcatcgaccagccgcgggccgtacatcttctcgtgccaggacgagcgggcgaggccgtcgccgtgctcgccggagtgggagccttcgtagcggcgcacgaggtccagcgcctcctcgtggatcgcccgcatttggcgcgcgccggcctcggtcttcaggttcaggatcggccgcacgtgcaggcagccgaccgaggcatgggcgtaccaggttccgcgcgtgccgtggcgcgcgaacacctcgttcagctccgccgtgtaggcggccaggcggtccagtggcacggcgcagtcctcgatgaacgacaccggcttgccgtcgcccttcatcgccatgacgatgttgaggccggccttgcgaacctcccagatctcttgctgaaaagacgcgtcttcggccgtcactacgctgtcgggaaaaccgaggcgcgccatttccgcgtccagcgcaccgaggcggtcgcgaagctcgccggcgtcctccccggcgaactcgacgatcagcaggcagtcgggctcgccgcggacgaaccttttcatggactcgcggaacaggggaatgccgccggcgatctccaggatgttgcggtcgaccagttccaccgcgctggggcccagcctgaccagatgctgggcactgtccatcgcgtcgaagaacgtcgggaaatggcagacgccgagaacccgttgcgagggaagtggctgtaacggcagcgtcagacggcggaagaacgccagcgtgccctcggagccgaccagcagcttcgccatgttgtggccgccgctttcgacgctgtcgaggttatagccgccgacgcgacgctgcaccttcgggatgcgccgcgccatctcgtcgcgctcccgctcggccagggcacgcattccctgtacgaggtcgaggacgcgcgggtcgagcgaggtatcgtccaggttgccgggtacctcggcgaagcgatgggcgctgccgtcggccagcaccgcgtcgatggcctccacgttgtccttcatgatgccatagcgcagcgagcgcgagccggccgagttgttccctgccatgccgcccagggtggcgcggctggatgtcgagacatccaccgggaagaacaggccgtcgcgcttcagccgggcgttcaggcggtccagcacgacgccgggctgtaccgacacgcgccgcgcggtggcgtcgtactcgatcacctcgttcaggtatttcgaggtatcgaggatgattgcctcgccgatggcctggccgttctgggaggtgccgccgccgcgcgggatgacgggcaggccctcctcgcgcgcgatctccagaacggcggcgatatcctcttcgcgccgtggcagcacgacgccgatgggttcgacctgatagtgcgaggcgtcggtggcatagcgcccgcgcgtgaacgcatcgaaacgcacctcgcccacgacgcccgccgccagccgccgcgccaggcgggaatcgccgatgcgccggtgccgtggatagccggccacgcgccgttcgctcatgccttctctcgctccaacaacgccggcgcaaagctagcagaccgggcgccgaaaatgccatcgcgggaaatggcgcgcttgcggctaacgccgatgactccgccctgcatgtcgttcaacgtcgtcagcggcgccagtttacttctccaacagcgctgatattgacatcggtatgcccgccggaaaattttgactcgctgataaacaaatgtagcgtggcggcatcaagggcgtgcgcaatcatcgaatggcggggcaatcacatgccggcggacacttcctcgaatcttccctggatgcttggcgtcgacatcggcaccgacagcatcggctgggccgctttccgatgctgcgcggggccggaccggccggcggcggaaaagctgctggccggcggcgtccgtctgttcgatagcggccgtgacccggagacgcagacctccaagcagcgcgagcggggcgaaaagcgccgcgcccgccggcccaagcgcgcccgccgctggcgcaaggcgcagcttgaggcgtgcctgaaacaggccggcatcgacgggcatcctggtgatggcgccgatccctatgccctccgcgccaaggcggcgaagggggccgtcgagccggcggagctgcgcgccgtcctgctgcacatgaacaagcaccgcggctttcgcagcaaccttctggaccgccgccaggccgacacgcgcgccgactcgaaaaagggaaagaaagccaataaggacggcggccaggaggacagtggccagaatgaggagaccaatttctggctgggcgccgaggcgcacctgcgcgagcgcatggcagcgactggggcgcccaccgtcggcgcgctcttcgcggcggatctggcgcaggggcggccggtgcgcatgcgctatggcggcggcgacgcctatgccccgacgcgcgcgctgatcgaggaagagctgggcaagatccgcgagatgcaggaggcggcgtttccagggctggactgggatgccgtcgccgaactggtgctggatcagcgtccgctgcgctcgcccgaggcggggcgctgcggctacctgccggaggaagaccgcgcctggcgcgccctgccgtcggtgcaggagttcatcctgcgccagacgctgggcaacttgcgcctcccacagggcttcgacgaggcggaccggccgctgacggcggtggaatacgaggccgcgctcacggaactgcgccaggtgccccgcctggagtggccgaaactgcgcaaggccatcggtatcgggcggaacaagttcacggtggagctgcaggccggggcgggcaagcaggccagccgcgcggccgagggacaccagaccgacgccctgttcgcgcccctgatccccggctggaacgaacgctcgctgacggagaaagacgcgctgttcaccgagctgtgggagcggcgcggccggcgcgccgggcttctggcgtatatccgcgactctcgccaggggcttggcctggacggcgagcgcgccgggatgctggccgatgccgtgcagttcgagctgccgaccggccgcgcgcagatctccgccgccgcggcgcacaggatcctgccgtacatgacgccgggcgtgcgggtgcacgatgccgtggtggaagcgctgggccgcgatccgaccgacgcgcgcccggcccaccgctacgcgcgcctgccgtactatgcccaggcgatgccggacgtcggcatgaacggcaccggcgcgccggaggacttggacgacccggagcggttccatggccgcatcgccaacatctccgtccacatcgcgctgaacgagctgcgcaagctggtgaacaagctgctggaccgctatggctccgacctgcggctggttgtggtggagaccacgcgcgagttgaaggccggcgcggaggagcgccagacccgccagcgcgatcaggcggcgaaggaggcggacaacgccgccatcgacgccgagttgcgccgccagggccagtggctttccaacgcgcgcgagcgccgccgccgccaccgtctggcgaagcggcagaaccacctgtgcccctataccggcaatcgcatcgccgccgccgacctgttgagcgaggcctatgaggtcgatcacgtgattccggtcagcctgggtggccgcgacgtggaatccaacatggtcatatgcgaggcggccgcgaaccgccgcaagggcgatcgcaccccgtgggaggccttccacgacgacccggcgtggcaggcgcgggtggacaacttcctggaaggtctcgacccgtccgagcgcaaggcgatcgcctggcgtttcggcgagaaggcggcggcgctggccaagcggggcggggacgacgaggacgacgagtcgagctgggcaccgcgccagatcaccgacaccagctatatcgcccgcacgtccgtgcgctatttgcgccacgtcgtggcggaacgtcccggcaacgacgtcatcgccagcaacggccgcctgacaggctggctgcgcgcggcctgggacctgacgccgccgatgcgcgggcgcgacctgatcccgctcagccatgcggcgctgggcgatccccagcttctggaccaggagcttgccgcgcttgagcccgcgcatctgcgcaaggcggtcgacagcctgatcaaggcctggacgccgaaggtgagcaagcggctgcccgacgccaaccgtgccgacgtcgccgcctatctggtgcgcggcgccgggggccggaagaaccggctggaccatcgccatcacttcatcgacgccgccgtgatcgccacgaccgacaggccgatggtgcaatggatcaacacgctgcacagccgccatggcgcagacgggctgcccaaccccgcagaggccgaggtggcggagccctatgaaggcttccgtgccgacgtcatgcgcacctacgaacgcatctggccgtccttccgcccgcgccaccggacggaggggcagcttcacgaagagacgctctacggtgttcgcgacgccacgaacggcgacgcgccgggcaagaacctggtgcttcgccgccccgtggagcggctgttccaggacgccaacggcaagccgctgcccgacgacaaggtcgagaagaccatgtccgcattcgcctcgccccgaatgcgcgagcgcttcgaggccgtggtgggggaataccgcgccgctgagcccgaggcgtccctgtccgacctctgcctgaaagccgcccgcgacccgcgctggggcccacgcggcatgaccggcaacacggtggtgacggggacgtatgatggggatgagacccggagcgtcatctggaatttccgaggcaacacgggcgcggccgtgattaccggcggaaacactttctaccatgtgtgggaactgacgggccggaacggcaaggtgaaatggcaggcggaagtggtgcctcggttccatgcccggaacgggaaccggccggagccaccgcagcccggtgcaaggcttgtcatgaccctgtcgcaaggcgatctgctctactggccggggcagacggcggaacgcatctttcaggtgaagaaaatggtgacggatggtcgcctgtacgtctggcccgctcgccatgcgacgggcagggaagcggccgcttatgtccaggcgttattccctgccatcaatctgaacggcgaccagggctacaagttttcgtctgcggaaggtctccgcaaggcggatattcgaccggcaaccatatcgatcttgggccgactccgagttaagtgactagcccgccactttgatgccaatctctaccgaacgtattatctggggttgatttgtgttccgtagccccggctgtcatggggatggtaagcttatcggggcatcactcgccaccactctttagttccgtagccccggctgtcatggggatggtaagctgtccggcgggaaatccaccaatacgccgccggttccgtagccccggctgtcatggggatggtaagctctcgctggaggtgagccgctttgccgagcagttccgtagccccggctgtcatggggatggtaagctgtcgtcgtggaacaccgcgtcaagctgatagttccgtagccccggctgtcatggggatggtaagcttgccgtcccacagcatttcgaccgaatcgtagttccgtagccccggctgtcatggggatggtaagcttgaggctacctaacaccgcacgcgccggtagttccgtagccccggctgtcatggggatggtaagctcccggcggacggtgaagaactggctcggctgttccgtagccccggctgtcatggggatggtaagctttcgcgcgtcgcgcgctgcagcgcgccctggttccgtagccccggctgtcatggggatggtaagctttggcgcaagtcgggcagacactcaccagtgttccgtagccccggctgtcatggggatggtaagctcagcgagatggacgtcccggaatattccgagttccgtagccccggctgtcatggggatggtaagctgaggcacctcgggggtgagacgaggttggggttccgtagccccggctgtcatggggatggtaagctgccgcgacgatccagccgatggacgtgtgggttccgtagccccggctgtcatggggatggtaagcttgaaatctgggtgcgcttcacgttgcgtgagttccgtagccccggctgtcatggggatggtaagctccggcttccagacggtcgtacagtcaaattgttccgtagccccggctgtcatggggatggtaagctagcgccccgaggtcgcggcacgctactacggttccgtagccccggctgtcatggggatggtaagctgcgatgcagcgtacggcagccgtccggcccgttccgtagccccggctgtcatggggatggtaagctaacgccacgaactacaagagcattcccatggttccgtagccccggctgtcatggggatggtaagctacgtgccgccgttgaccgactgcgcgccgcgttccgtagccccggctgtcatggggatggtaagctcgccgtgtcgccggcccgcgcggctgcatagttccgtagccccggctgtcatggggatggtaagctgccagcggcttcgcactggtcgcggacctcgttccgtagccccggctgtcatggggatggtaagctcaatcggcctgtcggttccggggacgaactgttccgtagccccggctgtcatggggatggtaagctgcgcttggtcaggatctggtagcggtgccagttccgtagccccggctgtcatggggatggtaagcttgcaggactagacatcgagtccagccgcccgttccgtagccccggctgtcatggggatggtaagctccgatggtctgcgtgctgccgacgctggacgttccgtagccccggctgtcatggggatggtaagctcgtacggccgataagctcttgagatagagggcttatcggccggtttttcgtgcaggcttcgcggcgcatcagaataacctgtactgctctggcggcgtgaactgggcactttcgtgcgggtcgtatccgccctttatccaccgccgcatgttcgccatctgcctgtcggtcagcttcagcaggcagacatagccacgcttcggcaccgccttttcgacgcggcgctcataggtgttggcgcgctccatcgatccgcaaaagcgattgtagatcgaatagtgaacgcggtcgaatccctggcgcaccaggaactcgtggaatttccgggccgcgcggcgctcgttcggccccgccaccggcaggtcatagaatacgagaacccacatcttccgccatccgtccggcatcgtcctcgctcccaatcgaatccggcaggacaagcgcggtgccgccgccgtcgatcgcgtcgcgaagcgagcgggccagccgcgcggcggccgtgcggcagcgcacccactcgcggccgctcttcaccggccagtcgggcagctccgcaaggcgcgcgcgtgtttgcttgtccatctccgcgccctctgtcagcagggcgcggacccgtgtgtcgacgaccggacgaaacggctcgatcaggtcgtcggagaggttgccgtcgttctcttcgttctcgtggtgcaggcccagcgagcggtgcagcccggcggcgtgaagctggcgcgagatgacggcgcggacgacggcgtagccgaagtccagcatggcgttcgcgtcgtcgctggcgtgccggcggaagtccgagcccaacagcgccggccagtagaggcgggcggcctgggcctcgatgttgccgggatcgccgggggcgatctcgcccgacagccggatgaggcgcctcgccgcgtggctttgctggggcagggcggcggcctgcatgcgcagcttcgcctgcacgatccgccgccaaagcgcgcgccgccggcggggcgtcagcgccgcctgccggcgcaggatgcgcggggcgagcgttgcgccggcggcgaccgggaacaggcttgccaccggcctgtgcctagtgtcgcaggtcacgaactccaccccgttctccgccagcagggcaagcaccgcgccggacaccgatacggccgccgtctcggcgatgacgaggtcgatgtcctccaccgggatcagggtggcgttgacggacagcattcccttgcgaacggcaagggaagttcctggcgttgcgatttcaatcacgctcatcgcaaaaactcccttgacgaaacgaatataatttccgagtataaaaatgcttaccatcgccatgacagccggcgatctacggaacaaaacaaagtgtcatttggagcggaatcgctctttcataacgacgcggacagggcccggccgatcaccgggccctgtcgtcattccgggtggtctcgattgacgtgacgccggcgcctcgcgctcacgccgccgggttggcgcgttcctcgcgtggggtgcggtcgaagaattcgcggtagcacttggagaagtggctggcggagacgaagccgcaggccagcgccacgtccagcaccgacatcgacgtctggtgcagcagcatgcgcgcccggttcaggcgcatctccaggtaatagcgggtcggcgtgcggcccagatatttgcggaacaagcgttcgagctgacgggtggagaggccggcgcggtgggccaggtcggcgcgcgagaggggttcctccacgtgctcttccatcaggtcgatgacacccagcagcttggggtggctgacgcccaggcgcgtgcgcagggccatgcgctggtgatcgttcgtgtcgcggatgcgctcgtggatgaagttctcggagacctgtgtggcaaggtcgcggccatgctccagcgcgatcagggaaaggatcatgtccagcgccgcctcgccgccggagcaggtgaggcggttgcggtcgatctcgaacaactcgtcggtgatgtccaggttcgggaactcctcgccgaacgccgccagcgactcccagtggatggtgcagcgatagccgtcgagcagcccggcgcgcgccagcaggtaggtgcccgtcgagatcgccccaaggcgcacgccctgacgcgccagccgccgcagccaggcgaaaagcgccctgtcctcaagctccgattcgcccaggccgctgaccaccagaagcgtctgcagccgcccggcatcctccagcccgctgtcgcaaagcacgccgacgccgctggacgagcgaaccggctggccgtcggcggagatcactttccagtcgtaaagcttgcgcccgctggcgcggttcgccgcgcgcaggggctccagcccggaactgaacgcgatcagcgagaaccgcggtatgagcaggaagccgaatgtctgcgtcggcgcatcgctccagtcggcgcgcgcttcgttgttgccggcatcgctcatgccgttttccgcccctcgttcgcgggttccgcggcgaatgtcttatgaggccagtcggtgtcgcctacggaacaaagtccccggaaccaactatgatttcatcttgaagcagagcaagaaaaatcgtcctgtggtgcgcgccggggtgttcgaccggcctgcttccccgacggaagcgccgcgcgcgcctggccaggcggacccaatccaggaaagggggtggagatgacccgtcgtcgtcgcagtgcagcgcgtcgcggggcgcccggtatcaagcagcttccgtggacccgtgttcgtaacccgtatgcgccggtggaggtgttcaccgccgagcagctcgacaaggtgcacgatgcctccatgcgtatcctggaggagatcggcatcgagttcatgagcaagcaggccttgagcatgctggacaaggccggcgccgaggtcgatcacgccagcggcctcgtcaagttcgaccgcgacatggtcctcgacctggtggccaaggcgcccagcgaggtgacgctccgcccccgcaatcccgagcattcgattacgctgggcggcaaccacatcaacttcggcctggtcgccggcccgccgaacgtgcaggaccgcgtcaacggccggcggcaaggcaactacgaggactatgcgacacttctgaagctggcgcagtcgctgaacatcgtccacctgatcggcaaccagcccaccgcgcccgtggagcttccggcgcacacccggcacctggactgctacgccgcgaacgtcacctacaccgaccgggtctaccactgctcgtccatcggggcggaccgcgcgctggacggcgtcgacatcgcggccatcgcgcgcggccagacgcgcgaggatctggtcgacgatccggccgtgctgaccatcatctcggtcaattcgccccggcgcttcgacggcgagatggccgacggcctgatcgccatgtcgacctggggccagtgcgtggtggtgacgccgttcacgctgatgggcgcgatgacgccggtgacgttgccggcggcgctggcgcagcagaacgccgaggcgctggccggcatcgcgctgacccagcttgcccgacccggcagcccggtgtgttatggcgccttcacctccaacgtggacatgcgcaccggcgcgccagccttcggcacacccgagaacgcgaaggcgcagcttgccgccggccagcttgcgcggcgctacaacctgccctaccgcgcctccaacgcaaacgccagcaacgccgtggatgcccaggcggcctatgagtccgagatggcgatctggggcggcgtgatgggtcactgcaacctgctgtatcacggtgccggctggctggaaggcgggctgactgcctcgttcgagaaggtggtgctcgacgccgagctgttgcagatgatggccgagacgctgaagcccatcgaggtcgacgatgataccttggcgctcgacgccatccgcgaggtcgggcccggcgggcacttcttcggcgccagccacacgatggaacgctatgagacggcgttttacgcgccgatgctttccgactggcgcaactacgaaacctggttggaggccggcggcgaaacggcggaggtccgcgccaccaagatctggcagacgctgcttgagaattaccagcagccggagatggacgaggccaggcaggagcagcttcaggccttcctcgccagacgcaaggaagagctgtcgaagaccgccgcgtaagggcggccccgggatggcggggcggcacatcgcatgagttccggcagcggcatcgcggcgattgccgaagcggtggcggcacacggactgctgctgcgcggcggctttcatcccgaaggcgcggtggatgcgccggcgttggacgacggtcggacgccgggcaccttgctgcttgtcggcaacgccgggccggcgatgtggcgggtgttctccgccagcgccgaggcggcagacgggcaaccgcacccgatggatcgctggagccgccgcgtcattggcgaactggcgcggcgcttcggcgcccgggcgatcttcccgttcgagggaccgccgtactatcccttccagcgctgggcgcggcgggcggaggcggtgcatgtctcgccgctgggtatcctgatccaccccgagtatgggctgtggcacgcctatcgcggggcgctggcgttcccgggacggctggcgcttccaccgccggacgagcgtccgtcgccctgcgacagctgtccggacaagccgtgcctgtccgcctgtccggttcacgccttctcttcccgcggttacgatgtcgccgcctgtgcgggctatctggattcgcccggcgggcgtgattgccttgacaagggctgcctagcgcggcgggcctgtccggtcgggcgcgagtacctatatgagccggggcaggcggcctatcatatggccgccttccatctgagcgcgagtggggcgaaacgggaatgagcggtaaagttctgcagatcattcagatggattcggcgcgcgacgaccgcgtgtcgcgctggctgacccggcacggctacgagctggaccggcggctggtggcaaagggcgatccgctgccctcggcgcggtcggactacgacgccgtggtagtctatggcgggccgcagagcgcgaacgaggtcgaggaaaagccgtatctccaggacgagatcgacttcatccgcgactggaccgcccaggaccggccgttcctggggctgtgcctgggggcgcagcttctcgcccgcgcctacgacggcaaggtggaaaggcaccccgagggcctgcacgagatcggctatgtccaggtgacgcccaccccggcgggccgcgacctgtttccggcgccgatgcacgtctaccactggcacaccgagggcttcgaggtgccggacgagggtgagcttctggccgaggggccggtctatcccaaccaggcgttccggattggcgacaacgcctatggcctgcagttccacccagagaccacggtgccgatctttacctcctggatggccgaggccgggcacatgctggaagcgccgggtgcccagccgcgcgaggagcagtttcgcctcgccacgcagcatgacgcgcccctcgccgaatggctggacggcttcatgtcccgtctgctgaacgggcgggccgggtagggcggggcatccccctcagcccgccagtgtctcaatgttcgggacgtgcgcggtgggcaggcggaagcggcggcggtattcggccggggtaatgccgacgaggcgcttgaacaggctgcgcatatagctgggatcggcatagccgacggccgcggcgacgtcctccaccggcatgtcggtcgtctccagaagctgctttgattcctcgatccgcaggttttgcaggtaggccttcggcgcatagccggtcgccttgcggaagcgccgcgcgaaggtgcgctcgggcaacccggtgcgggcaatcagccgggcgatgggctgctcgctgtcgtaattctcggccagccacgcctggcaccggccgaccagcgcgtcccggtgctgcgtcctttgcagcaggccggcgtagggcgaaagcccctccgcgtgcgagcggaagtggaacaccttggccagcttcatcgcctccgcctcgccggcgtgccgggcgacgacatagaggacgaggtcctgccaggccgagccgcctcccgaggacacgatggtttgccccggcccgctctggaccagtgcgcggctggggtagaggcggacgttcgggaacgcctgctcgaaagtgcgcacgaagctccagtggatggtggcggcgccgccgtccagcaggccggcctccgcaagcagcatcacaccgccgcacgaggcatagaccgcggcaccggcgtcgtacatttcccggatccacgcgatggcccgccggtcgatgccgcgcagagttgcgatgctgttggcgaagatcgtcggcacgaaaaggatgtcggtgcgcgcgacctcgccgatcgcggcgtccggcacgatcttggcgcctgtcatggtgcggaacggctcgcgggtgagcccgacaatgcgcgggcgaaacaggcgtctgcccaggccctcgccggtcaggcgcgggtagacgacgcccgcgctccacagcacgtcgtacacgcccatcaggatcgacggctctgtctgcggcaaggccagcaggctgacccgcggcggcttacccgtcatcttccacctaccgtggccgatccgcctccattgtgaccaatctgcccctgcacaccaagagacgcgaagcggtatcttcatgatacaggtggtatgtgccagtagcggttgttagaaagtcgaaacaatcgcgtgcagctaaaaagcagagaggtccgacatgcaggtggatcagcaacgcctggaagcgcttctgggcaagatggtgggcgacatgggcgcggccgtgaacggcgccctggtgatcgttggcgagaagctcgggctctaccgcgcgcttgccgccgagggcggggcgacgccgacggaactggcgacggccacgggcaccgccgagcgctatgtccgggagtggctatcggcgcaggcggccatgggctacgccacctacgacgcggcaagcggcaagttctcgctgagccccgaacaggccgcgatcttcgccgatccggaaagcccgttcctgatgacgggcggcttccaatccatcgcggctgtctatgacgatgccttcaagctggccgatcacttccgtaccggcgagggaatggggtggggcgaccactgcaactgcctgttctgcggcgtcgagaagttcttccggccgaactacaagggccatctggtgcccgactggctgccctcgctggacggcgtggtcgacaagctgcaccagggcggcaaggtagccgatgtcggctgcggtcacggcgcctccacgctgctgatggcggaggcctttccgcagaccgagttcgtcggcttcgatttccacgatgcctctgtcgagaccgcgcggcagcgtgcggcggaaagcgggcggtcaaacgtccgcttcgaggtggcgacggcgaaatcctattccgacgggggcttcgatctcgtcaccttcttcgactgcctccacgacatgggcgatccggtcggcgccatgcgtcacacgcgtcaggcgctgaagcccgacggggcggtcatgctggtggaaccgatggcggggaacgagctgagcgacaatctgaaccccgtcggcgccgtcttctacggtttctcgacaagcgtttgcgtgccgacctcgctggcgcaggaaaccggcgccgcgctgggcgcgcaggcaggcgaggcgcgcctgcgcgaggtcgccgagacggcgggcttctcctcgttccggcgggcgaatgaaacgccgttcaacatgatcctcgaagcacgcccttgagcggtttgccggccggtcggacccttcatcgggtctggccggcaacgcgttcattgctttggattcttacgaaggcgtgacccgacaaaggcgtgacccggccgctccaagacactatgtttacaagggttgattaccgctgcggcagatcgtaaatcaagacgactgcggtcaggatttccgataaggcctatcggacctggtgcccgcggcggccgggtctgacgaaggtgcttggcatgaacgagcttgagcagaaatgtattgacgccggattgaagatgacggggcagcgccgcgtcatccttgaggtgctgggaaatgccgacgatcatccgtcggtggagacggtgtacctgcgctcccgcgagaaagacac

SEQ ID NO: 3281 - DNA, 23522 bp, synthetic construct
  misc_feature 1..23522: note = Synthetic
  source 1..23522: mol_type = other DNA
acggcgccaaagccgctcaatccgaacagatccgaggtcagaaccttggaaccggcatcgatgatcgcccggttctcgctaggcaccgaaaccacggtggcgatcacccgcagggcgcaatcgccccagccggccaccccgcgcgccaccagcgagcggtccatatagatgtaggtgccggcccgatattccgtgaccacgccaccggcccccgccgccatcatgtcgggcgatccgcccgaggacagaatctcgacccccaagccggcttcttcgatcaacgccttggcctcggccaggaagcgatcggccgcttccgcgccgccggtcggcggataggtcatcaacccgcgaaagcgcaagcccgcgctggcatggatgctttgggccagggcaagggcggcggcggggcttgccacgccacagcgcccggccccggtatcgcattcgaccaggacgccaaggggcgtcgtggaatcggcgaaggcggcgcccagcccgtcgatcaccgccagactatcggcaaccaccgacagccggcagcgcccgtccagggcgcgcaaccgggccagcttggccgcgcccaggatgttataggtgatcagcagatcaagcggctgatcgagcagcccgaccaagccatcgaccatcgcctcggcttccgagaccttctgacaggtgatgcccaccgctccggcctggatctggcggagcgccagcagcggcagcttgtgggttttgatatgcggccggttgtccagcccccgggcggcgcactgggcttggtggcgggcgatattacgctcggcgacatcaagatcgacaagaacggccggggtatcgacgggaaaatccatggggagcctgtcagaaaggaaacgcccggggggcggacacgggccaaggcgggccgatcgaccgatgcgatcggcccgacccaagggtcttgccgtgataagtccgatcaggcggcgccgcaacccttggctagcgcggcgcctgatcggtcaggcggcggcgtcgatcagggcgacgcggaccagcttcttgttgacgaattcctggatgcccaggcccgatagttcccggccatagcccgagatgttgatgccgccaaagggcagatcgggggccgtccaggtcggctggttgatgaagaccatgccggtttcgatgcgctcggccacgcgtttgccgcgcgcgacatcctgggtgaacaccgatccccccaggccgaaatcggagtcattggccaaggccaccgcctcgtcctcgtctttgacgcggaagaacagggcgacggggccgaagaattcctcgcggaaggcggcggtatcgggggcgatatcggtcaggatggtcggctccatgaaaaaccccgggcgatccaggcgcttgccgcccatcaccagggtcgccccgtccgaaaccgccttgtcgacctgctcgaccagcttggtcagcgccccttctgtcgacagcggcgccagcgtcgtcgcccggtccatcggatcgccggccttcaagccggccaaggcggcctggaacttttcaaggaagcgatcggccagggagtcgacgaccaggaagcgcttggccgccacgcaacactggcccatgttgttcatcttgccccagaccgcccattcgaccgttttatcaagatcggcgtcttccagaacgatgaaggcatcgctgccgcccagttccatggtggatttcttcaggttctgcccggcgcgggcggcgacgcttttgccagcatcagcgctgccggtcagggccacgcccttgatccgcggatcgtcgatcaccgcgttgacctgatcataagagatcacaaggttggtataggcccccgccggggccccggcatcgcgccacagcttttcaaaggcctgggcgcattggggaacgcagccggcatgcttgaccatcaccacattgcccgccatcaggttcggcgcggcgaagcgggccagctggtaatagggaaagttccacggctgaacgccaaacagcacgccgagcgggctgctttcgatcaccgcctcgcccgactctggcttcaacggctgaggcttaaggaaggcttcggcatgatcggcatagtaatcgatgatatcggcgctcagcgccacctcgccctcggcttcttcgatgcgtttgcccatttccagggtgatcagccgggcatagtcgcccgattgctcgcgcaacaggccggccgccttatgggcgatggcggcgcgctcggcgaagctggtctggcgccagcctgcgaaacagtcggcggcgctatccagggcgcttgccagctcgctatcggagaattcctggaaggtttgcacgacggaaccgtcaaagggattgatggtctgataggccatgaagggcgctcctgcgatcgcgatcgcctcggccagcaccgcccgcgcctggaaaaggcgggatcggccggcatgatcggcggggggatgggtcggcaagacccggcgccggcgacccgcgcccgccagaccgacccacgacgttggattgcccaagaaacgccgccacgagcgcgaagttccccgcctgccgatcaaccgggataacccgccgtttccctctcctagcgcgggccgaattcctcgaccacggcgtccacgaagctgcgcagcttgacggttggtcggcggccggcgggataaagcacatgcatcggccgggccggaccctggtagtcgggcagcacccgcaccagccgcccggcggccacctcgtcggccagaacgctttccggccccagggtgatgccaaaccccgccgtcgccgcatgcagcaaagccttccaatcggtgctgcgaaaccggccgttggcccgcacctcgtggctttgaccctcgcgggtgaagacccaggggcagggaatgctgggcgaccaataggcatagaccagacagtcgtggccttgcagatcggccggctccttcggcgtgccgcgcgccgccagatagctaggcgcggcgcaagcgatcagccgatagggcgccaagggatgggcgatcagcgccgtatcggcgatctcgccaatacgcaccatcacctcgaccccgtcttccagcggatcgacgaaacgatcgttcagggtaaggtcgacccgcatctcgggataacgcgtcaaatagcgggtgacgaagggcgccaaggtgaaggcgccaaaggtcatcggcgcgttcacccgcaaaacgccctggggccggctgcgcatgtcatgggccagggcctcggcggcctcggcttccgacagcaccagcttgcagcgatcgtaataggcccgcccaacatcggtcaggctttggcggcgcgtcgtgcggttgagcagggcggtgcccaggcggtcttccagaaacaccacatgcttggccaccatctgcggcgacatcgccaaagcctcggccgccgcggcgaaagacccaagatcggcggccttgatgaaaacgcccatgctggtcaagcggtccatgattccctcctgttggttgggagtgtcaagatatcatgggaatttatcaccatacgatggcgaattatcctctctccggtcagtcctcacacggagagagaaacgatgaagatcggacttatcggggcgggggtcgtcggccgcgccatcgccaccttggcggttcgggccggccatcaagtgatgctgagcaattcgcgcggcccccataccctgttcagcctgcgcgccgccgttggctgcgccatcggcaccgttgacgaggcggcggcctttggcgatatcggggtggtcgccgttccgctggcggcctatcgcgccgttcccgccgcggcattggccggcaaagtggtgatcgacaccaataattattaccccgagcgcgacggcgccatcgccgagcttgacgacaagcggacgacgaccagcgagttgctggcccgccaccttccggcctcgcgcatcgtcaaggccttcaacgccatcaccatgaccgatctggaccgcgatggccgcccggccggctcccccaaccgccgcgccctgcccgtcgccggcgacgatgccaagggcaaggcgatcgccatcgccctgctcgacgccttcggcttcgatgccctggacgccggcccgctgtcgcaaggctggcgcttcgaacgcggcaccccggcctattgcgtggccttgacccgcgacgccctggaaaaaaccctggcggcgacgacgcgataagggcctcggcctgaggctgggcgtgctgtggggaaaaaccattgagggtgcgactgctttggtcgcacccttacccctattggattttcaccgggaaaaatcggctgcggaggttatacccttaggccgtcatcgcctctttgctcttcggtgttttactccttgcgtgctcaatcaaagcgtcgaagatcaggacatcatccttcagttcgtcgagcgactgcacgagtggcttcaagatcgccgcccaatcggcgttcttgctttcccaagcatcaataatcagcgctgccgacagaacaaagggacgaaagaatatgccttttccttcgtaaaaccagccccgctcgctgaggcgctgagcgatatcatcaatggtcttgcaggactcattccaggcagattcgcctccgaaccaatagtggccgacacgaaaacggaatccgaactcggtctgtccgacacccattaaatccgcaatttggtgggagtctctatgatgattatctcgccgctccaactgaaaccaggcataccaatccttatctttagcatgccattgaggaggagcgacccacagctcttctaagttcgccttgtcactgttcttttttgtttcgcaatcccaataccattcggcagactctgccaagcgctggaactcacccttaactttgaaaaacaggtctttatgaattttttctttcataaagatcgtcgcttcattgaacagctttaggtctctcagaatgagcgaacctgcctttcgatcatcatcgccatcattcatgatatccattttaaaactccaaaatatgatcagcaaaggtcctcgccaagtggcgtgccgccgccttgtcggcgtcccggcaaacaactggagaaagcgtgcgaagccaggaagcgatggtcgaccatgccaaaggcacaaccttcgccgcttggtcaccagcggtgtcggagttcttgccttgcggcgtaaggaagaccacagcccaaggccgaccgtcacaagcccgggcccgtgcaacgtcacagtagcgttctacttgcttgttttgttcgattgcgtcgattttcacttcaatcacaaggaaatactgtccgggatcgtcaatagtgatgtccacgcggtttccctgcgccccgtctggacactcctccaccgtaagaaaacaagccggagatggggtcttcgggaaagacggggttcgtttttttacttctgaaagcagttcttggagcagtaagtctccgaacccatgatcgcctttggggttaaggaaccaagccagaacagaggaatttctgagttcgccccgccgaaggctggcgacactccatgggttgccaattgtcttaacgccagccatcggagccctcagatccgataacattgccgcgagagcgacaggatcgggacaaagggcaggccgctccgattcaagccagccaccctctcggttagctgccattttttctctatcttcgggctcttgggattccattttcgctccgatcgtttgtttccagcaccatagccggataccagaacgacgacaacctgagcgttttcatgcaacccaaaggatggaatctcgctggggcggggcgccacagcaaaagcgggtaaatgcggattccccggcaccgaagctcacgagttgacgccctacagaagagcgccgtttcagttaggttcgggaattacccgttggggtggtcagacgggtcgcaggcaagaccatcgccaaagggccggaatgcaaccggggcgcggaagagatcctccgcgccccggacacgaaaacggatgcccctcgccgatcaggccggttcgtacaggcggcgctcaagcagggcgctgcccttgccgcggttgagcagcttggccaccgcgagaacggccagatcaaccagcggctcgacgatgatgaccagcatataggccccgccgaacgaggtgatggccgccgcgttctcggtggagaagccctggccgtagaaggcccagaaagccacccaggcgacgatgccggcctgataggccgtcgacagcgccagggcctgacggtacttcagctcaacataggccgtattcggcgcgataacccggcgggccaaagcggtcagaccgaacagcggcaccagcagcgtggtgacgttcattccgaattgcggcagatcgaaaggcgcgaagaacaggccctgaaccagcaggccgagggttaggccgatcgccgccggagcggccccgaaaatcaggaacagggtcgagcccaggataaggtggacttcggacacccccaccggatagtggggcaggacctcgaaaaaggagaagaccagcgcgctggtggccaagctgcgcaccaccaacgacacgggcccgcgctcgcgcagggtgtcccaggcgagcttcagggtatagcccccggcgccggcggcggtaacgtagctcagccagatcttcccgctgtccacaagaccaggttcgatatgcatgaatgcctccataagccgtctcacccgacggcccgagattgaacaccgatgcgcagggccggtctcctgactcgcgggtcgtcgcgatcctccgccttcccagatcgtgcctttccggcgtgatccagtggcatgggagaggtcactcgccgctcacagtcgcgggggcggtcggggcttcgggcgaaaaacgcccttccccgttcccatatccctcccggcgcgtcctggcgccggcaagaaaaaccctgtgcccgggtagcagcggacaatcggaggtcgctgtcaaggggagaaggaaagcgccgccgccaagccggcttgaagcccgggcgactgtcgtttataaacgacagatgatcgagctaaagcaaaccgagacctttcgcaaatggcggacgcgcctcaaagacgtccgagccagggcgatcatcgccgcccgtctcgaccggctttcccaaggtcacaccggcgatagtgaaccggtgggcgatgggatcagcgagctgcgcattcattatggtcccggctatcgcctctctttccagaagcggggacagacgatcgtcgttctgctgtgcggtggggacaagagcacccaggccaaagacatccaaacggcgaaacgcttggccgagatagggaaagagtgagatgaccgaaacgctgacgccttatgatccggccgaggacttggtttccgacgaggcggttgccgtcttcatgacggaagccttcaaaaccgaggacgccgcttatatcgcccatgcccttggggtcgtcgcccgcgccaagggcatgacgcagatcgccaaggatacggggctttcccgcgagcagctttaccgctccttcagcgaaaatggcaatccaacgctgaaaacgacgctcgccgtcatgaaatcgctcggcatcgaattgacggtgaaaccccaggcctgagccgcccccctcacaacccgggggcgggcttgggaagcaggcggagccagggggccgggggggtatcgagggccgttggccacaggtcggccagggcgcggcggtggccggcgaagggcatcagggccagcaccccggcgcggtcgcaccattggaaggcgtcggcctcgtggttcagggtgatcggcggatcgtcatcgaccacggccaggaaggccggcaccagttcgatgcattcatcggccggattatagaagctgtcggtgaaatcggcggaatagagggcgcgggcgatcaggccggtttcctcggccaattcgcgctcggccgcccgccatgcccgctcgccgggctcgatggtgcccgtcaccatgtaccaatggccctggaacaccccgcgcgcccggtgcagcatcagcatgcgcggctcgccgtcgatccgcgcgaagggatagacggcgatgaagcgcgagcggatcgccgggccgatacgtgaggcggccggcccggcgggttgggaaatcatgcgatgaccccggtcttatcgggttgcgcgggcgcgcttacttgcccgcctcctcaaaggtctcggcgacataggcgtcaagcaggcgcacgccaaaaccggtgccgcccttgggaacgatgcccgcatccttcttcgaccaggtcaccccggcgatatcgatatgggcccagggggtctcgccgacgaagcgcttgaggaactgggcggcggtgatcgatccgccctcgcgcccggtggaattgcgcatatcggcgatgtcggagttgatctgcttgtcataggcgtcgcccaggggcaggcgccacaccttctcgccggtggccttgccggccttggccagaccctcggccagggcgtcgtcattgctgaacaccccggcgtgttcggtgcccagggcgatgatgatggcgccggtcagggtggcgaggtcgatcatctggcgcggcttgaagcggtcgttgcagtaatgcagcacgtcggccagaaccaagcggccctcggcatcggtgttgatcacctcgatcgtctgaccgctcatcgaggtcaccacgtcacccggacgctgggcggtgccgctcggcatgttctcgaccaagcccatcaggccaacggcgttgaccttggccttgcgcccggccagggccttgaacagcccggccaccacgccggcgccgcccatgtcccacttcatgtcttccatattggccgccggcttgatcgaaatgccgccggaatcaaagcacacgcccttgccgatgaaggccaccggctggtcgcccttcttgccgccgtgatagctgagcaccaccagcttgggctcgcgggcgctgccctgggccacgcccagcagggcgcccatgcccagcttgcgcatctccttttcgcccagaacctcgacctcgatacccagcttcttcagatcctcgcactgggcggcgaagctttcgggataaaggacattggccggctcgctgaccagatcgcgggtcaggaacacgcccttggccagggcgcgcagcggcgcataggcggcctcggccgccgccggatcctcgaccgccacggtcaaggtggcaagctggggcttctcgtcgtccttttgggtggtgtggtatttgtcgaagcgatagctgcgcaaccgcgcccccagggcgacccgggcggcggcctcgccaaggtcgaaaccgcccagcagcgcggcttcgatcaccaccacgccttcactgtcgcccgtatggttgagcgtggattgaacgctggcgccaaaggtttcaagcccgctggcgctcaggccatcggccttgcccagaccgatcagcagcacgcgcgaggcggtcaggccatggggcgcggccagcgacagcgactgcccggcctcgcccttgaagcggggataggcggcgatcgcccgggtaagcgcaccgtcggtctgcgtgtcgacctcgcgtccgagcggcgaaagctgcgccccttcaagaacaccgagaacgagcgcgccctgagcgggaatttccggcttggcgaacgagactttcatggacgaggaatcctctatggatgatgcgcgggcaggagcaagggcgcgagcccggtgacggacccggcgaacccaacggcgcacccgcgccgccgcctgtcccgcgatgataccgcgacacgatgatttaggaagggaaagccggcggggcaatcggaaagagtggagcagacgccctaaccgccccattgcgccgtctgaatggcaggattaccctcttaccctttttaggggaggcgccgtacccatgcgacccatcgagccctggattctcggccttgatatcggcaccgacagccttggctgggcggtcttctcctgcgaggaaaaggggccgccgacggccaaggagcttcttggcggcggggtgcgactgttcgacagtggccgtgacgccaaggatcacacctcgcgccaggccgagcgcggcgcctttcgccgggcgcggcggcaaacgcggacttggccctggcggcgcgaccggctgatcgccctgttccaggccgccgggcttaccccccctgccgcggaaacccgccagatcgccctggccctgcgccgcgaggcggtaagccgccccctggcgcccgacgccctgtgggcggcgcttttgcacctcgcccaccaccggggctttcgcagcaaccgcatcgacaaacgcgagcgcgccgccgccaaggccttggcgaaggccaagccggcaaaggcgacggccaaggcgaccgccccggccaaggaggccgacgacgaagccggcttttgggagggggcggaagcggcgctgcgccagcgcatggcggccagcggcgcccccaccgttggcgccctgctggccgatgacctggatcgcggccaaccggtgcgcatgcgctataaccaaagcgaccgcgacggcgtggtcgcccccacccgcgccctgatcgccgaggaactggccgaaatcgtcgcccggcaaagctccgcctaccccggcctggattggccggccgtgacccgtctggtgctcgaccagcggcccttgcgcagcaagggggcgggcccttgcgccttcctgcccggcgaagaccgcgccttgcgcgccctgccgacggtgcaggatttcatcatccgccagacgctggccaacctgcgcctgcctagcacctccgccgatgagccgcgccccttgacggacgaggagcacgccaaggctttggccctgctgtcgacggcgcggttcgtagaatggcccgccctgcgccgcgccctcggcctgaagcgcggcgtgaaattcaccgccgaaaccgaacgcaatggcgccaaacaggccgcgcgcggcacggcgggcaatctgaccgaagccattctcgcccccttgatcccgggttggtcggggtgggatcttgatcgcaaagaccgggttttttccgatctttgggcggcgcgccaggatcgttcggccctgctggcgctgattggcgatccccggggaccaactcgggtgacggaggacgagaccgccgaagcggtggccgatgccatccagatcgttctgccgaccggtcgggccagcctgtcggccaaggccgcccgggcgatcgcccaggccatggccccggggatcggttatgacgaggcggtaaccctggccctggggcttcaccattcccaccgtccgcgccaggagcgtttggcgcgcctgccctattacgccgccgccctgcccgatgtcgggcttgatggcgatcccgtcggcccgccgccagccgaagacgacggggcggccgccgaggcctattacggccgcatcggcaatatctcggtccacatcgccctcaacgaaacccgcaagatcgtcaacgccctgctccatcgccatggccccatcctgcggctggtcatggtggaaaccacccgcgagttgaaggccggcgccgacgagcgcaagcggatgatcgccgaacaggccgagcgcgaacgcgaaaacgccgagatcgacgtggaactgcgcaaaagcgatcggtggatggcgaatgcccgcgaacgccgccagcgcgtccgcttggcccggcgccaaaacaacctctgcccctatacctccacccccatcggccacgccgatctgcttggcgacgcctatgacatcgaccatgtcatcccgctggcccggggtgggcgcgatagccttgacaatatggtgctgtgccaatccgacgcgaacaagaccaagggcgacaaaaccccctgggaggccttccacgacaaaccgggctggatcgcccagcgcgatgatttcctggcgcgcctggatccgcaaacggccaaggccctggcatggcgcttcgccgatgacgccggcgaacgggtcgcccgcaagagcgccgaagacgaggaccagggctttttaccccggcaattgaccgataccgggtatatcgcccgcgtcgccctgcgctacctgagccttgtcaccaatgagcccaacgccgtggtcgccaccaatggccgcctgaccggtctgctgcgcttggcctgggacatcacccccggaccggcgccccgcgacctgttgcccacgccgcgcgacgccctgcgcgacgataccgccgcccgccgtttccttgacggcctgaccccgccgcctctcgccaaggcggttgaaggggcggtgcaggcgcgccttgccgccctgggccgtagccgggtggccgatgcgggtttggccgacgcgctgggcctgaccctggccagcctgggcggcggtggcaagaaccgcgccgaccatcgccatcatttcatcgatgccgcgatgatcgccgtcaccacccgcggccttatcaatcagatcaatcaggcaagcggggcgggccgcattctcgatctgcggaaatggccccgcaccaatttcgaacccccttacccgaccttccgcgccgaggtcatgaaacagtgggatcatatccacccgtcgatccgccccgcccatcgcgatggcggttcgctgcacgccgccacggttttcggcgtccgtaaccgacccgacgcccgcgttctggttcagcgcaaaccggtggaaaagctgtttcttgacgccaacgccaagcccttgcccgccgacaagatcgcggaaatcatcgacggcttcgcctcgccgcgcatggccaaacggttcaaggccttgctggcccgctatcaggcggcccaccccgaggttcccccggccctggccgccctggccgttgcccgcgacccggctttcggcccgcgcggcatgaccgccaatacggtgatcgccggccgctcggacggagacggcgaggacgccggcctgatcaccccctttcgcgccaacccgaaagccgccgtgcgcaccatgggcaatgccgtttacgaggtgtgggaaatccaggtgaagggccggccccggtggacccaccgggttctgactcgcttcgacaggacccaacccgccccgccgccgccgccggagaacgcccgtttggtgatgcgcctgcgccggggcgatctggtctattggcccctggagagcggggacaggctgttcctggtgaaaaagatggccgtggatggccgcctcgccctgtggcccgcccgattagccaccggaaaagcgacggctctttatgcacaactgtcttgtccaaacatcaacttgaatggcgaccaggggtattgcgttcaaagtgccgagggcatccgaaaggaaaaaatccgaacaacctcatgcaccgccctgggccgactcagactttccaaaaaagcgacatagatcttgattttccctttattttaagattatcaagaggtagcggagacgatgcttgttatgttgttccatggccccgtcccacacgccatgatagagcgttgcctccgcttccaaaccgctatttttcctagccgcatcacccgccttgaggcgttgagggtcaaggattggaatgggcggtgaccatggtcccgtcccacaccgccatggtagagtcgtgcgggtgatcggcatcgccctggtgacgttccatggccccgtcccacaccgccatggtagagtcccaggccgggatgggcgatgactggatcagttccatggccccgtcccacaccgccatggtagagtggatttgctcatctgggcattcctttcatggttccatggccccgtcccacaccgccatggtagagttggggggaggaccggtgcgcacggctcgccgttccatggccccgtcccacaccgccatggtagagtatccgagaaccgattgcgcctatctacccggttccatggccccgtcccacaccgccatggtagagtccatgacgtagccggtcgaaagcgccagccgttccatggccccgtcccacaccgccatggtagagtagctcgaatgccgcattggtcgccgccacggttccatggccccgtcccacaccgccatggtagagttgtaccgcccggatcctcttgattttcttgaggattcgggcgttttttcgtgcaggggccaggacgttcagaagagttgatactgggctgggggcacgaactcggcattttccggggctcggtagttgccacggatccatttgcgcatgccgaccatctggcgatcggtcaatttcaataaattgacatgcccgacggcgggcaaggcctgttccacccgtcgttcataggtggcggcgcgttccatcgatccgcaatagcgggcatagatcgagtagtgcatgcgctcgaagccatcggcgagcaggaatttgtgaaaccgcaccgccgccagccgttgctccgggctgaccaccggcagatcataaaacaccagcactcccatcttccgccacccgtccggcatccttgaggctcccgatccgctcgggcagagccaaagcaaatcccgagcgatctgaagcagatcgcgacgacgatttgcttcaatatcaggatattagaggggtgagcgtgaaccatggttcacgctcacccctctaatctggccggcccgccttcgaccaccgtccgcaacgaaagcgccacccgcgccaccgccgtgcgcaagcgcacccattctcctcccatcgccaccggccaatccgccacctcggccaaccggcggcgggcctgttggtccatgggggccgcctcggcaacaatccgcagaaccaaacggtcgacggccgggcggaagggttcaagcaggtcatcggccagattgccgtcgttttcggcattgtcgtgatgcaggccaagcgagcggtgcaaccccgccccatgcagacaacggccgaccacggcgcgaagcaccgcatagccaaaatcaagcatggtatcggcctcgtttcccccatggcggcgaaaggccgcgcctagatcaaactgcgttaaatgggatccatttaacgcagaaactttgatctcgattcaataagttagagcggcgatggcgcgaaaaagcggtacccacttttccgctcgccgctctagcagaaccggccaataggcccgggcggcctgggcctcgatattggcgggatcgtcgatatcgatggtggcggccagccggcgcaatcgttcggccggtccgccgatttcctcaagcacccgggcttgctccatcaccttggcccgcacgatttgccgccacaaggcgccgcgacggcgcggcgtcatcgccgcttggccccgcagcaaccgcgccgacaccaccgctcggccgcaaatcggcgtcagcgtggccagcggccggcggcgctcgtcgcaaacgatcacctcgatcccttcccgccccaaaagcgccaaggcatcgccggtgagggtcaccgccgggacctgggcgatcagcagatcaatctcgtcggcgggaattagggtgtcgccgatcgacagaacccgatcgcagaccgataccagggttccgcgcgtggcgatctcgatcacggccatgcctgccccctttacagatcaaagaggtgtgcccctttacaaatcaaagaggtgtgatagggtgatcgcactctaccatggccgtgtgggacggttctcccgtttttcctaaaagcgggacatccatggaataaaacgtaagtgacagttggagcgattacgctctttctcgcccagggggcccgaggcatcgggtcccctgagtgcgttttcgcccccggcgatggggaatcccccgcgccctaaccgcttgccacccccggcacgggcaggcggcgggggccccaggtgcctggggggccttcgatcaccccggccaaggcccggccgcagcccaggcaatggccgctgtcgtccagcgcccagccggtgatggcatagccgcgccggccgatcagcggcgcgccgcagccgacgcaaagggtggtctcgccgtcttccgccccgcccaaggcgccggcgggcagattgcccagatagacatgggcgaggccggcggcgcgggcgatttcgcgggcgcgcagcaaggtggccgccggggtggccggcagcgcgctcagccggtggtcggggtggaaggcggtgaagtgcaagggcacctcgcgccccagatccgccgcgacaaaggccacgagatcggccagttcctcgtcgccgtcattgcggccggggatcagcagggtggtgatttccagccacacggcggcttctccggccagaaagcgcaaggtctccagcaccgggccaaggtgggccgaggtcagcttgcggtagccgtcttcgcgaaaggccttgagatcgacattggcggcgtccatcaccgcgaagaaatcccgcgccggagcggggtcgatatagcccgccgtcaccgccaccgtgcgcagcccgcgatcgcggcaggccagggccacgtcgatcacctcttcgcaggcaatcaccggatcattataggtgaaggccaccgagcggcagcccaggccaagggccagatcggcgatggcccgcgggctggtggtcccccccagccgatccatcgaacgcgcccgcgacaggcgccaattctggcagcccgcacaggtcagattgcaccccgccccgccgaacgacagcaccggcgtgccgggcaggaaatgggcgagcggcttcttctcgatcggatcgacacaaaaccccgaggagcgcccggcccccgtcagcaccataaccccctcgatattggcgcggacgaaacatagcccgcgctgtccggggcccaggcggcaatggcgcgggcacagatcgcacaccgcatgatcggcgccttgccgatgccagtagcgagccggacggatagcgtcgccccaatccttgtccaccgtggtttaatccttttgatcacgctgggatagacccaccccggtgctgttttgttcgcgttcccggggaattcatcgttgatatcttctcttctcgccaactgtgctacagttgtggcgcccgggtccgatgctggaaagaaagcgtgaccgatgtgcgaaaccacaacgcccgcagaagcgcctagccgaccccaggatggccccggggatcccttgggccaatccccctcggccccaacgcgcggcccgcttctggccgatcggccgatggcggtggccggtcgtttctatcccggcgacccggcccagcttgcccaagaggtggacagcctgctggccggcgtcaaggcgtcgcccgccccgctgcggcccaaggcggtggtcgccccccacgccgggctggcctattcgggaccgaccgccgcccatgccttcgcccccctggcccgtcaccgcgacgccatccaccgcgtggtggtgctgggaccctcgcaccgcttggcctttcgcggtctggcgctaagcggaacccgcgcctatgacagcccgctcggccccgtccccgtggatcattcctggcaagaccgcctaagcgacctcgctttcgtcggccgcctggaacaggcccatggccccgaacacgccctggaagtggaactgccctttcttcagcggattctcggtcccttttcgatcgtgccgatcgtctgtggcgaggccgccgccgaagaggtcgcccaggccctggaacgggtgtggggagggcccgaaaccctgatcgtcgtttccagcgacctgagccactaccttgaatacgaggatgcccgacgccaggatgggcggaccgccaccgccatcgcccgcctggacggcgcccccatcggcccgcgcgaggcttgcggccatgtgccgcttggcggcctgctttgcttggcgcgggcggccgggatgacgacccgctgcctggatctgcgcaattccggcgatacggccggtccgcgcgaccgggtggtcggctatggcgcctgggcgttttacgatcccaccaatcttttgggataggggaccgcgatgatgcccaagcactccaccccgctgtcggaggggagtcccgccgaccccgagaacaccgaccccgagggcgcgccccgtgacgacgcggcgaaaaacgccatcccggccgaccccggcggcgaaaccgacgacggggccgacggtggggcagaaggtggggaggatctggcgatccgcgccacccgcgaccatggcgcccggcttctgaccctggccgccgaggggatcggccgcagcttgcgcgaaggcgccctgaccgccccccggctggacgccgagcccccgcccttgcgtgaaaacggcgcgtccttcgtgacgctcagccgcgccggcgccctgcgcggctgcatcggctcgcccgccgcctatcgcccgctggccgtcgatgtgatcgccaacgcctgggcggcggcgacccgcgatccgcgtttttcccggatcaccccgtcggaactgcccgccctcgccctgtcggtggcggtgctcacccgcccccaccgcatgcgagtgatcgacgaggacgatctgatcgcccaactcacccccggagtcgacgggctgatcctgtcggaccgcgggcggcgcgggctgttcctgccccaggtttgggaaagccttgccgatccgcgcgatttcgtggcccatcttaagcgtaaggccggctttccccccgattactggagcccgaccctgacgcttgaccgcttcaccgcccgctcggtcgcccgccccttcaccgagccacgccccccttttgcttgaaggagaccttttcatgatccggcccgcgccatcactcggtctgtggctgttgttggtggcctcttcgctgtgccttgccgccccggcccgggcccaatccgagccgcccgcgcccaaggaggagcccgagtccagcctcgggcggctgatctggcacgatgacgcccccgaaaacatgaagggggtttgggcggtcagcgggcgctgcaaggccgacaccgccgagatgctgatcttttccaacggcggctatcgctggcgcaaatccgatggcagttggggcttcgcccgcggcaaattctcctatgcctcgcccaaatcctaccgggttctgttcaaggtcagccatctcttccccaccgaaggctatgacgccatcgtcaccatttcgggcaataccctgaccaagaccaacctcaaatccaattcccgggaaagctatcgccgctgccagaactgaaggccgccgcaaaccaaaaggccgagcgaccgctcggcgaaaaagacatttgccggcaacagcgcttgacagcgcccggtccggggttcgacctttggccggcgtcggcccgtccccggttttcgtcacccggggcctgccgggtcgggcgcggctccttttcacctgacggcaagcggcctttccatgatcgacatcgatgctccgctagaccttgtccaggctctgatccccatcgccgaaaaggcgggcgaggagatcctggcggtctacaccacgcccttcgccgttgaaagcaaggccgaccattccccggttaccgaggccgaccgccgggcggaagcggtgatcatcgaggccttgacccggctgaccccggccattccgatcgtcgccgaggaagccgtcgccgccggccatatcccggtggtcggcgatcagccgttctggctggtcgacccgctggacggcaccaaggaattcgtcaagcgcaacggcgagttcacggtcaatatcggccttgtcgtcggcggcgtgccggtgctgggcgtcgtgcattgcccggccctggagatcacctattggggggccggcctcggccatgcggtcatgcgcagccgccacagcacgcggacgatcacctgccgcccggagcccgaggacggattgaccgttctggccagccgcagccatggctcggacgacgagatgacgacctttctcgccgcctttccggtcaaggcccgcatcgccgccggcagcagcctgaagttctgccgcatcgccgagggaaccgccgatctgtatccccggcttggcccgacctatgaatgggacacctgcgccgcccatgcggtgctgcgcgccgccggcggtggcgtcttcaccctggacggccagcctttggcctatgccaagcgcggcgatttcctcaatccgcccttcgtcgcccggggattgccggcgtgaccagtccgcttccgcccgagggcgcggcgctcgcccaggcggcaaggatcctggcggcgggcggccttgtcgcctttcccaccgaaaccgtctatggcctgggggccaacgccctggacgacacggcggtggcctcgatctatgccgccaagggccgccccagcttcaacccgctgatcgtccacctccccgaccttgacgccgcccgcgcccatgtggcggtcgatggccgggccgagcgtctggccgccgccttttggcccggaccgctgaccctggtgctgccgcgccgcgccgggtgccgcttgtcgctgctggtcagcgccggccttgacaccgccgccatccgctgccccgaccaccccctggccctggagttgctgcgcgcctgcgccctgccgctggccgcccccagcgccaatccatcgggcgccgtcagcccgacgacggcggcccatgtgcgcgagggattgggcgggcgcgtcgatctggtgctcgacggcggggcctgcggcgtcggcctggaaagcaccgtccttgacctgtcgaccccgcgcgccctgctgttgcgcccgggcgccatcagccgggcgatgctggccgaggtgctgggcgagccggtggatcgcccgtcggcgacgcctagcgatccgaccgcgccgcgctcgcccggccagttgctcagccactacgcccccaccgcccgcgtgcgcctgaacgccagcgccatcggtccgggcgaggtgctgctcggctttggcccggtggccggggcgacgctgtcgctttcgcccagcggcgacctgcgcgaggccgcggccaatctgttttccatgctgcgcgccctggatgccgaccatccggccaccatcgccgtctcgccgattcccgaaaccgaccccggcgacggcctagccgccgccatcaacgaccgcctgcgccgcgccgccgcgccgcgcggttgaaggtatcctttggagttcgccaaccctgcggcccggtgtttcgcagagccaaaatttcattgaccttctctcggcctgatccatattgggaccattgagacccctcgctccgacgccttcgaatgcggaagcgagcattgagaccccaggggcgccttgtgcgcccctgtattgtttccggtaccgcagtccgctactcttccttgtgaaacccagggagagagccatgcacgatccggtcgagacgagcggtcctttccgatatcgctgcatgatcttcgtcgatttctggaatttcaccctgtcgatgaaaacggtcgaggaggcttttccctgcgattggaaagcccttccctatgttctcacaaaggaagccggttatcaggtggatccctcggcttcgacggaatatagggggatgcgcgtctatggatccttcgatggcaagggcgatgccaatctgcgcaaatgggttaaaaccaagcttgaaacatttccaggcgtaagcatcaaatttgtcgatcggcaaaaaaagatgtccggaccgaagtgtcctatttgttataaagttattggaaaatgcccatactgcggaaacgacatgcgtggtacggaggaaaagggagttgatacggccatcgtcaccgatatgatctctcttgcctgggaaaatgcatttgatattgccgttcttgtttccgcagacagagatttcgtcccagttgccgagtatttacacacaaaaggcataaaggttattcacgccgccttccccccaaaaggggccctcctatcccagaaatgctggggttccattgatgtcggattatcccgcgacagatttcgcagatcgtgacctcgatagcccaccgaggtccgaaaaaacgacctatcctcgtcgtccataagccagagccccttccccccgccttttgaaggatgtccgcttgtgcccttgcctatcgccctgcttgatcgtttggccgccgttcttgggccccatggcctgctgaccgatccttcggatctcggcccctatctggccgagcagcgcggtctgttccaggggacggcccaggcggtggcgaggccccttgataccgcccaggtcgcccaggtcgttgggctttgcgccgaggccggcgtcgccatcgtgccccagggcggcaataccgggctggtcggcggcggcgtcgccagcggcgatgacttggtggtctccctggggcggatgaaccgcttgcgctggatcgacgccgagaactaccggatcgccgtggacgccggctgcgtgctggccgaggtgcagcgcgccgcgcgcgaggctgggtgcctgttcccgctgtcgctggccgccgagggcagttgccagatcggcggcaatctgtcgtccaacgccggcggcgtcggcgtgctgcgctatggcaacgcccgcgagttgtgcctggggctggaggtcgttctcgccgacggccgcgtctggaacggcatgaccgccctggccaaggacaacaccggttacgccctgcgtcagatgttcatcggcgccgagggcacgctgggcatcatcaccggcgccgtgctcaagctgtttccggcgccgcgcgaaagcgccaccgcgctctgcgccctgtccgacctgggggcggccccccgtctgctcagtctggcgcgcaagcgcagcggcgacagcgtcaccgccttcgaactgatcccccgcctggggctggagatggccgtccgccatatgccgggctgccgcgatcccttggccgatcccgccccctggtatgccctgatcgagctcagttcctcgcgcgaggccggcgacaacgacgagagcggcctgggcgcgaccctggaaggcctgctggccggcgcctttgacgagggcattatcagcgatgccgtgctggcgggcagcctggagcaacaagccgccctctggcgcctgcgcgaggggctttcggaggcgcagaagtttgaaggcgcctcgatcaagcacgacgtcagcgtgccgatctcgcgcgtcgtcgaattcatcaccgaagcttcggcggcggtggaacgggccctgcccggcatccgtccctgccccttcggccatatcggcgatggcaatatccacttcaatctcacccagccgccgggcatggaccgcgcggccttcctggcgctctgggcgccgatgaaccgcatcgtccacgatatcgtcgacgccatggagggatcgatcagcg

SEQ ID NO: 3282 - DNA, 24395 bp, synthetic construct
  misc_feature 1..24395: note = Synthetic
  source 1..24395: mol_type = other DNA
atattctggataaagaatttacaaagaccaatcaatccctttttgaatcgcacaaactttaccggaaagccaaccttgaatatgccctccatcagggaaaatcagcaggttttatggaagcctgtttcagcacccaaaaaccattatacaacctggcggcctattcaagcctgtttaatcaggtcttcctgaattacttcagcgtattggccaattcggcaaaccacaccgaaatcaaaaacctggtacaaacatctgcattacagaagctggacgaatatttccagaaacatttacatttcaacagggaactttcgcattgggtacttttaaaatcaatgaaagatgccttttacagcaaacaattctcaaaagcttctatcctgaaaatgcttgatctggtaaaaaatagtgaatggaatgcctacgaacagaaaacagcacaattaatccgttctaagcttgtctatttatcagttggaagtaatcctccagcgctggttttaaaggacttaaacggccaggatgtaattttttcagatttcagggataaatatatctatctgcatttcaccgatccgaaaaacaccatttgccagcaacacctggatgcattaaaaacaattgcctcacatcacaaggaaaatctggtaattattaatgtgatcccaaatggcagcacattcaccaatagcagtaattgggccggaatatttactacaaccgttaataatctggaagaaatttttctggtgaaaacttttcctaattcgtttctcattggcaaagacggtaagcttttactttcgcccgcacccaaccccattgacggactcgaccgccaattagggcaactatttaaaagtgattatatgaaggagattcagaagaaaaaccagaaaatacaataaggtcagttcgattttgggagttgtcgtattcagacgagtagcaaagagacagagtacctgggtaaaaagtccttaattgtttgcgatatgataacaaaaatatttgtaagacaatcgaaagcggttgttgtctgcaccggagatgcccaatatttgtagccaaagataagtaccgatcataatcgtccgcgcatgaaggataaacaaaacgaatttttctttcggacgaaattgaagttgctttaagaaaagcaagttatgagaaatattatcaagagatcaaggttttttccaaaaattcgtgcaaacttcgataagtatttgacaatggaatttcaaattctgatagggcaaaccaacgcacttcttcaatatcttcgtccttttgcggaaccggggtttcattaccagagtaactcatcaaaaaccatttcgtttcttttaaaactaaattatccggaaagtttaaaaaggacgaccggtaaatatgaaaagtagattcaagttggcgaacgatttggagcccggataaaccacactcctcttctacttcacggactgctgcactcgccggcgtttcgtttttttcgattttacctttcggaagatcccaaaaacctaaccgtttgataaacaaaaaatttcctgcatcgtttcgcaccaaacctccggcagcagaaatctctacaaaacggctcctgaaaaaattccagagctgcaaaatttcaggattataaatcaaatattctgaactttcactagcatgttcaatgtcataaataatttgatttacagcagaataacttccaaaatctatcctatatgaaatgttattatttgatgattttttcatttctgaagctatcacaatactagagtcattgaaaaaaactttgtacatttgtcagcattataagtaaaaaagaaaatatcatgattgaacaaattcaaatcgaagttacaaagaaactacttcacatcaacaccataaaagttcagcccaataatccgtttacctgggcatctggatggaaagccccgatttattgcgacaaccgcaaaattatgtcttatcctgaagagcgtactttcatctgcgaacagttctgtaaaatcatacgcgaaaaatatccgcaggttgaagtaatcgccggagtggctaccggggccattgcccacggaatgctggttgcccaggaattgggactgccatttatttatgtacgcgctaaaccaaaagatcacgggctcgaaaacctgattgaaggtgacatgaaagccggccagaaagtcgtgattattgaagatctggtttcaaccggagttagcagtctgaaagcagccgaagcaattaccaattttggcggcgacgtactgggaatgctggctatttttacctataattttccacatgcccgtaaaaatttcgaagatgcaggattggagctaactgcattaagccgctatcaggtactgattgatctggctttgcaatcgggcgatgtgaaacccgaagaagttgaaaaactcaacaaatggcgcgaacagcctgaaagttggggtaaataagtttattcattaatccagataacttccccttttctaacctgagaaggggatttttatttcaaaaaccacggaacatgtctgtaagtaaatatgtaagcaacgtaaaaattgtcaacaacaaacaggaaattattttcaacttcctgtcgaacttcgaaaacctgtcgaaatacgtgaacgaaagtcttttatcaaagctgactgaacatatacctcagattcagatttcgaatttcgaatcagacacagattcttgccggttccagattgccggaatgggtttggccgaaatcagggtcattgaccgcgaaccattcaaaacgataaaaataaaaagcagcggcggtttgccagttggaatagtattctggattcagcttctgccagttgcagcttatgaaaccaaactcaggctaactctcgacgctgatatgagcatgatgataaaaatgttggtcaataataagctggaagaagggatcaaccgtttggccgatatgctggcagcgctgccatataagtagtggtcagtaatcagtgatcagtcgcagttagttcaagtcatttgatggtcattagcttcgcgtcattggtggtcatttatggtaactccatgcttcaatatggcaattaatgacaattgaatgacaatgaatgactactaatgacctgaatgacaatcaataacctccatgcttggtatctgtattcacttcactgcatgcagaaactcaacttctttgaaatgaaattccatgattctaccatcctctttccggatcagcaattgtccaatttcatttaccccgattatttcgcctgtgaaaacctcatcttccgcactgaacaaatgtttttcattcaacaggtaaagaacagataaaaactcctgatctatcttttcatcttctccttcgcgaagctgcttataataactgtttattcccgttaacacttccgtcagtaataattcacaatcgaagtgctgatttgtcagtaacttcaaggaaaccgggttaggcgcagaacttcggaagatgatttgattcacgttgagcccgattcctacgaccgaacttttcagtaatccgtacacgacggaattttcgatcagtattccacctaacttccgattgccggcataaatatcgtttggccacttaatactaagttggtcaacatacttattcatagcagcataaataccaagagtgatgactttcgaaagcatgaattgccggcgtatttcaagaaattcaggataaaggaccaatgaaaaagtaagattttgacctggttcgctttcccaaaaattgcctgactgaccgcggccacctgtttgttcgtatgccaaaaagacagtaccttcagtgacctcatttgcccttatccgactgttggcatagttgttggtagaatcggtgacttgcaggcggacaattgtattaccagtgcttttctccattttgcaggttaaatttgcatttccatatccattcaggaaattcatctcacaagtttaatcacatcttataaattaaaaaatttatctttgtagttctaataaatatttatggataaaagcgttaaagaaattgaaactgaacaattgattgatgccattgttgaaggaattcaaaggaaaaaggggattgatattgttaaaattgacctaactaaaattaatcataccgaatgtaaatattttatcatttgtcacggaaattcgaacactcaggttgatgcgatttcccattcggtagaagataccgtaattgaatttcataatgaaaaagcctggcatactgacggataccagaattcgatctgggttttacttgattatgccgacattatggtacatatttttcaacgggatgcccgtaggttttacgacctcgaaaacctttgggccgatgcacaaattgaattaattaaagatgaaaaccagtaataaaatggcagaaaataaaaataataaagaaaaacccaatttcggcgacattaggccgaatatgaacaaggcgcctaaaattaatccttactggatttacggtgtgattatcgttatatttcttgcaatccaaatgtttacgatgggcaccgggccaactaaaacgacctggtttgaagtgaaaaatacgatgtttaaagatcaggacatcaagaaggtagtggttgtaaatggtaaggatgctcaaatataccttaaagatgaaagtattgaaaaatacaaaagtaaaatggaatccggatttaatgttccaagcaaaaccggaccacattttcatttcgctattggatctttcgattcatttaacgctgacatcaaagaagcacagacaacctacggaactgctgaatttgggattgaaagtgaagaagttcacaactacctgggcgaactgctgaattggattcttccatttgccatcatcattttaatctggtggtggatattcaaacggatgagcaaaggttcaggtggcggcggtcccggcaatattttcaatgtcggaaaatcgcaggccaaaatctttgataaagattcaagggtttcgacaaactttaaagatgttgccggtttggccgaagccaagcaggaagtggaagaaattgttgatttcctgaaaaacccgatcaaattcaccaagttgggaggaaaaattccgaaaggcgcccttttggttggccctccgggaactggaaaaaccttgttggccaaagcagtagccggtgaagccaatgttccgtttttctcgatgtcgggctccgattttgttgaaatgtttgttggtgtgggagcttcgcgtgttcgtgatttgtttaaacaagccaaagaaaaagcgccttgtattgttttcattgatgaaattgatgccattggccgtgcccgtggaaaaaatccgaacatgggatcgaatgatgaacgcgaaaatacactgaaccaactattgactgaaatggacggttttgataccaattcaggagtaattattctggctgcaaccaaccgtgccgatattctcgaccgtgctttgatgcgcgccggacgtttcgaccgccagattcacgtagaattgcccgatctgaacgagcgcgaggaaatattcatggtacacctgaaaccaattaaactctctcctgaagttgaacctgcttttcttgccaaacaaacacctggtttttcgggagccgacattgccaatgtttgcaacgaatcggcattgattgcagcacgaaaaaacaaagatattgttgagaaacaagattttctggatgctgttgaccgtatcgtaggtggactggaaaagaaaaataaaatcatttcggttgacgaaaaacgccggattgcataccacgaagccggtcatgccacaataagctggctgctcgaacatgcgcacccactggtaaaagtaactattgttccgcgcggaaaagcgctcggagctgcctggtaccttcccgaagaacgctcgatcactactaaagaccagttgctcgatgaaatgtgttcggcgctcggaggacgtgctgctgaacaaatatcgttcaacagtatttcgtcaggcgcccagaacgatctggaaaaagtgaccaaacaatcgtatgccatggtcagtattttcgggatgagcgacaaagttggaaatttaagtttctacgattcatcaggtcaaaacgaatttggtttcaccaaaccatacagcgaaaaaacggctgaactgattgactcagaatcaaaactgctgatcgaaacccaatatctcagggcgctcgacatacttaacgaacacaaagcaggacatcagttgctttctgaattgcttctggaaaaagaagtcattttcagcgaagatctcgaaaaagtatttggaaaacgcaaatgggaaaaacctttgatggttgttgaaccgaaaaaagaagcagtagccgaactacccgaatctacggaagaaaacgctgtatcaattactgcgtaatggattcagccaaaaacaatattctggcccgattgaaggccgcccaggataaaagaggtgaaattgaggtgacctatcccgatttcacctctcctatttaccatcccctaagccaatccaacgaactggaattcaaatccaatctggaaatcgttggtggacaagtgatgttgtgcaaaaccaaatctgaaattgttgatcagattgcatcaatctgccaggagaaaagccaaaacagagttttttgtacagaccctgttcttcagaaattacttaccggtaatattgaatttgactcagatgaaaattcttttactgaattaaacattggcgtaacctgctgcgaatttctggttgcccatttaggttcggtgctcattagttcagcgcaaatttcaggccgccgcctgaatgtttttcccgaaacgcatattgttgtcgcccaccagtcgcaactgaccaattatctggaccaggcattggaaaaacttcagtataaatataaaaatgaattaccttcgctcattagcaacatcaccgggcccagccgaactgccgatatcgagaagacattggttatgggcatgcatggcccgaaatcgctgattgtactgatttctgaagaaccaatttaatacttgtgctatggaaaaagattgggtttgtgtatttcgcaccgggcaaggatttcaggctgaaattgcaaaagagattctcgaaaacgaagaagttaattgtgtcgtaatagccgaacgcgactcaacatttccttcttttggagatttggaagtctgggttcatcaggactttgaagcaaaagccaccgaactgctaaaagatttaatcctttgaaaaaattaattacacgaacggttaccggaatcgttatggtattagtcatgctgactgcgatcatagccagcccctacagttatgcccttctgttcctgatcattttaattggtggaattgcagagtttaacaaactatttaagctatcagaagttaagcctaatcaggttttaagctacttcatcgctgtaattttatttattttgtctttcctgattgctcatggaattttagaattcaccttcctgtttggactatttcccctattgcttctgattatagcagcagagctttaccggaagaaagaaaaacctgttgaaaacatcgctgtaaccatttttagcgccgtttatattgccattccattatcactcttaaactttttggtttttcctgaaattatatccgaaaatagttattctccaaaacttttaatcgcccttttctcactaatctggatttacgactcaggagcctatctatttggcgtttcaatcggaaaacatcgcctttttgaacgcatatcgccaaaaaaatcgtgggagggcgtaattggcggcacattaactgctattgtagctgcctggttcatttccggctttattcctgaaataaaaacggttcattggattgccatcagtattttaactgttatttcttcaacctttggcgatttaaccgaatcaatgttcaaacgatattttggcattaaagacagcggaaatatcttgcccggacatggcggcatacttgaccgtttcgattcattattttttgccgcacccttggcagtgatgtacctgaaactgtttgttgaataggtacgctgtacgcacttttctgacttgtctaaactcactcgcttgtacatatttattcacttaaattgcaggtttctggcaaaaagcttatttatttgctatttttgagaccaaaatcttagacttcatgataaaatttcataaagccggcactacaactatctattatgcaactgcaatatttgcgggcctcattttaatttcgtggtttttcattaccgatcattacatcaaatttggaattttgggcgcttatacattgatatattacctgattattcaatttttcaggtgcccgcaacgtactgtcagccttaacgaaacttcagtattatctcctgccgacggaaaaatttgtgtgattaaagaaacatttgaaaacgagtatttgaagaccgattgcctgcaggtttccatatttatgtcgcccaccaatgtacacatcaactggataccaattcctggagtgattacctacatgaaacacaaggatggtgagttttatgccgcttttaaagataaatcggctgaagaaaatgaacgcaccaccactgctgtcaaattagaagacgggcgcgaaatagtgatgtgtcaggtagcaggggcaatggcccgccgcatcatcaactatgttgaagtgggcgataaagttgaccaaaccactgaattaggttttatccgtttcggctcgcgggttgacctctatttgccgctcgacaccaaacttctggtaaaattaaacgacaaagttaaaggaacacaaaccattattggcgaaatttaatcatgaaccgtatcattcaactgtttttctgggtaccgaatacgattaccgccctgaaccttgtgtgtggcagtctgtcggttttttttgccattgatggccagcttggccttgctgcggttttcatttttgcagcagccattttcgattttcttgatggtttttctgcccgtttactgaaagcatattcatcaataggcaaagaactcgattcgctggccgatactgtttcattcggacttgctcccgccgcaatcgttttcaccatgctcgaactgaccctttttggaaaaaaccagcatattcaggatattgaagcaaatttaagccaatggatatttcttttatcaagtcttgttataccaattgccggggctttcaggttggcgaaatttaataccgacgaccggcaaagcgatcaattcctgggaatgccgataccggccaacgcgattttcttcgcatcacttgctttagttcttgtcttaggcgaccgaactataattgaaccgataattctgaataaatatacacttcttgcatccatattcagttgctcattcctgatggtttccgagttgcccatgttcaacctgaaattcaaaaacctgaaactgaaagaaaacggtcttcgctatctctttatagcaatcaccattctgatgttaattttacttcaggtctatgctctgccactcattattatctggtatgttttgctctccggaataagttatctggcaggaagtaaataagccagtttaaacgatgaatagaaagcgccttagaaacaaggcactttttttgtgcctttagcagcgaccttgaataattaaatttctcatttgcttgaacttgacagcaataatattttgggaaataaaaaataattattgtaaatttagaaaaggaaaagcgacgagtaaaaggttgctttaaatgttgttgtaattacaaaatcaaataaaaaccccacggagtacgcgaggtcaagaaatctcttcggcttatagccttattgtgataagtctttcaaattgtagtacaaatatacaataaaacttaaaataaaaaaccatgtcagaaacattagggatcgatttaggaacaaattctattggattaacaaagcgcaatagtgaattaggaaataatattgttgatcaactggagtattttagttcaataattttcaataaaggggttggcataggaaaatcaggggaattctcttatgcagcagaacgtacaaaaaatcggtcaacccgaagattataccaagcgcgtaaataccgtatttgggaaacattggatgttttaatgaagtatggattctgtccaattactgaaggtgaattaaatcaatggcgaaagtatgacaaagccaaaggattaaaacgtcaatatcctattggagcaataaaatttgaactatgggtgcgactagatttcaatggtaatggagttgttgattattcgagcccttaccaattaagagcagaactggcaaccaagcaatttgatttctctaaggaaaccgataaattcaaatttggaagggcactatatcatatcgcccagcgacgaggcttcaaaagcagtaaaggcgaaacgctgaaagagcaggaaaaagaagcagaagaaaaaaatttagctccagatattgaaattcaaattgatctgaaaaagtctgaggaaaagaaatcaaaagatttaattgcttaccaggaagaaaacaaattatctacagtcggttgttgcttttaccaattggaaaaggaaggggttcgcatacgtgcaagtaaatatcaggcagtgcgttcacaatacgagaaggaaatagaatacatttttacttttcaaaacgaattgcaaattgatagtgatttctaccgagcaattcataaagcgatcttctataaaagacctttgcggtcacaaaaaggattggtcggtaaatgtacattagaaccaacaaaagaacgatgtcctatcagtcatcccgattttgaagaattcagaggatggtcatttattaacaacatcaaatacaaaaaaaatccatctgatgattggagtgaattgactaaagatcaaaaacagcaattgttcaatgataagtttttgagaaccacgagcaatttcaaatttgaagaaatacgaaactggcttgagaaaaagatgggattctatcttttatacgatacaaaaacaatcaattataaagataaaaccaatgttgccggatgtcccatatcaggcagattaagaaatctgttaggtgatgattggagaaatttcactaagcatacatctaaatcgagattaaacaaaaagaccggagagtttcatccaatatcttattcaatggatgatatatggcatgtgtgtttttcatttgaagatgaagaacgaattgttgagtttgcaaaaaacgcattactgtttaatgaaaaggaaactaaatctctggtgaatctgtgggttgcaatccctcagggatattccatgttaagtttgaaggcaatccgtaatatcaataaatttttaaaaaagggattgatttataccgatgcagttcttcttgcaaaattaccggaaatactaggtaatcaaatctggaaagaaaaagaggaattatttttagatgagattgggaaacttacagcacagaatcgggatgacaaaagaatcataaacgttgtcaataacttaattgccaattacaaatcgctggaacttgacgaacagtttgcatataaaaataacgactatcgattagatggttctgattttaaagagatagaaaaatttactattgaaagttatggtgaaaaatcctgggaaaaactaccgcaaccagaaaaagacaatcaattatctttggttgcagcaatatatcaacagtacttttcctcctctaaacgagacttctaccgattacctaaactaggtgatacaataaaaaaatacctatcagacaactattcagttttaagctgtccaagcagttttattgacaaggaaaccaaattaccatgtcaatgttgtgcatgtaaaaaattgaacttattatatcatccttcccagattgagttctataaaccagccaaagagcaaacaattgagtggaatggcacaaatttgtcattgaaactattggaatcaccaaagatcggggcatttaaaaacccaatggcaattcgtacacttcatgaaatgagaaaggcaatcaaccatctactaaaagaagggattattactgaagatacccgcattgttgttgaaacagcaagagatttgaatgatgcgaatatgcgttgggcaatcgaagcatatcaacgagaacgagaaaaagagaacaaagaatttgaggcagtaattagagatttatataataatactgacaggacaattaccaatgatgaaattgacaaagcccgcattttgatagatcaatatgaaatttcggaaaaaggtgagattaaaattgtagaagatcagcaaaaatcgaaaaagaaactgattgaaaaggcagaaaaatatagcaaagatgttactaaatatcgcttatggctagagcaaggatgtcgatgtatttatacaggaaaaataatcaacattacggatctcttttccgatggcagagttgactttgaacataccattcctcgtagtatctcttttgacaattctttggcaaacctgactgtttgtgatgcgcattttaatcgtagtgtaaaaaagaatcaaattccatctcaactttccaactatgatgatattttgttacgcatacagccatggaaggagaaagtagagaagcttaaagacaatgtagatttctggcgagctaaagcaaaaaaagctcaagaaaaaacgataaaggataatgctatccgtcagcgccatttatggcaaatggaattagattattggcagaataaggtagatcggtttaaaatggaagaagttacaagtggtttcaaaaatagtcaattggtcgatacccgcatcattactaaatatgcgactcattatttgaaatcagttttcaacaatgttgaagttcagaaaggtagcgttactgctaattttagaaaaatgctaggtgtgcaaagtattgacgaaaagaaaagtagggacaaacattcccatcatgcaattgatgcggccgttttgactttaattccaccagcagccaaacgtgacaaaatgttaaagctcttttatgaaattgatgaaaaagaactctttgaaaatgtcgatcagttaaaatatgaattagaaaaagaacgtaaaaattgtcaattaggcaatgtatcaggcatttctcaattcattgaagagaatattttgattaaccacattgcaaaagatcaaacgctgactccagcaaatcgcaaagcacgaaagcgaggaaaagaaatttttgtcaaagataaaaatgggaatgaggtaactaaatggattaccggagattgtatccgaggacaattacacaaagattcattgtttgggggtattaaatatccattaaaagattcaagtggcatatttcaaaaaaacgaaatgggacaatttcaatatccaatagataaagaagggtgtgaagttatttcaatggttaaacgagaattaattacaagttttaaagctgaaaaagatttagaaaagattattgatccgaatgtaaagctatctattgataatacaatacaaaaaaggaaagaagaaggaaaatcctttgctaccgctattgctgaaccaatatggatgcttgataataaaggaaaagaaaaaagaatagatagaaatgggaaacacttaagtcctattcgtcatgtgagatgcagagttgcagcagggaaaggcttttttacaaaggataaagcacttgaaataaaaaagcaaacatacatctcggctaaaaaatcgttccatttagataaccgggattataaacaaagctactatgcccaaaatgatggaaactatctatgcttattatatgaaggaataaataaaggaaaggtagagcgaaaatttaagctcattaattactttgaaatagctcatctgcagatttataatacaaatcaactttggaatgaaccattctataaggaaattgaggataagaaaaagaccttttctctttcagcaataattaaggttggaacacgagttttgttgtggtctaatgacccatctgaattagctgatttaagtagttcagatttattaaagagactatttgtcgtttataaatataatagcgttggtatagaatatatttacatgcaaaatcatattgaatctaggccggacaacgaattagatgcaggtgatacgagttttgacaatttaaattatcaacctagagtaatgctaacggcaaataagttcaattgtctaatcgaacaccgagattttataattactccagttggcaaaatagaatatctttaatttgtaagtcaaaaaaatgcaaccccttcaacccgataccagctaccatattttcaaccacgccaacgggttcgagaatatattcaggcacgaggccaattactatttctttctggagaaataccgcaaatacattggccccattgccgaaacttacgcctggtgcctgatacccaaccattttcatctggttgtacgaatacggaaacggccgattttagttaatatcttttccaaagtttccggtactgtaaaaggcgtgaataatattagaaacaaacaccatcgaacaaatgatataaactttggaaaaggtatcgacgtaaatatcagcgacagcgaaatcgaaaaatatttatcgaaacaattcgcaaacctgtttagctgttatacccaatcgttcaacaaggtttatggccggatggggtcgttgttcatcaaaaatttcaggcgagaaccaatttccgataaaacccacttcctgaatactgttgtttacacccaccgaaatcccatccatcacggtttttgcaagcaatacgccgaatgggcatatagttcgtacaatgagattatgaataggtcaaatgatggcattgaaaccgataaactgatcaagatggccggagatgtcgaaggcttcattaaaattcaccttcgttcgcttgtgtcgctcgatcctgataattatcctgacatacctaacccatgattaaacgaaccctttattttggaaatccggcttatctgcataaaaaagatcagcaactaaaaattaccgacaccgaaactcaggccgaaaaggcatcgattccgctcgaagatattgccttcatgatactcgatcatccgcaaattacaatcacccatgctctaatggctgatcttaccgaccggaatgtggcgctcatcagttgcgactccaaacatttaccatctggactaatgcttccgttggatggaaaccatgttcaaaccgaacgttttcgcatccagattgcagcttcagaacctttattaaaaaacctttgggcgcaaaccatcaaagccaaaattgagaatcaggccgagatgctaagccgtgcaggtatcgaaagcaaacaactgcttgctttagttccgcaaatcaaatcgggcgatcccgacaataccgaagggcgtgcggcagcggtttactggaaactggtgtatggcgaacatgggtttacccgcgaccgatatggcatggagcccaatgcgcatttaaactattgttacgcggtgttacgtgcaattgtagcacgggctttagttagcagcggcatgttgcccacgttgggaatccatcaccggaataaatacaatgcctattgcctggccgacgatgtgatggaaccataccggcctttttgcgatgaattggtttatgaaatattcaaatcaggaaatatagaatcggaggccattacccgtgaccaaaaagccaaactgttgagcattgccacctgcgatgtgctgattgatggtaagaaaagcccgttaatggttgcccttagccggacaaccaactcgttgtttgaatgttttgaaggaacccggcgtaaaattgtttatccggaattctgcaattaaaaataaatcagatgtcgttcgatgcgttaaaccaatatcgctgtatgtgggtcctggttttctttgatattccggtcgaaaccaaaaaacagcaaaaagctgcagcccggtttcggaaagatctgctcaaagatgggtttaccatgtttcagttctcgatatacatgcgtaactctccaagccgtgaaaacgccgatgttcacacccagcgcgtaaaaaatatgctccccgaatacgggcacatcggtatcctgaaaattaccgacaaacaatttggcatgatggaattgtttttcagcaaacggacgatcgaaaaacccggaatagcacaacagttggaactgttttaggataacaaaatcaacgtgacagaaaacaaaaaagcggagaaaaatccgcttttttgttttctgtcacgtttggcaagttgctgaatttgagctacaagcccggcatacgctgtgatagaacgcactaaagatacaatttgaaagcaaatcacaacgataagataatgcaagaggttcagttacacgctgtgatagaacgcactaaagatacaatttgaaagcaaatcacaactcattttgattgtatctacataagttagtgctgtgatagaacgcactaaagatacaatttgaaagcaaatcacaacatttacctgtcctgttgttccggtggcaaagctgtgatagaacgcactaaagatacaatttgaaagcaaatcacaactaatgaaggttatcagcctcatattttcatgctgtgatagaacgcactaaagatacaatttgaaagcaaatcacaacataggccgcccaatagccaaaaagcatatcgctgtgatagaacgcactaaagatacaatttgaaagcaaatcacaacatcttggctatacgagcacatatatcaaaagctgtgatagaacgcactaaagatacaatttgaaagcaaatcacaacctaatatcatggaatcaaatttaagtttttgctgtgatagaacgcactaaagatacaatttgaaagcaaatcacaacaggagtgggtgatgctttaagagatcgtaagctgtgatagaacgcactaaagatacaatttgaaagcaaatcacaacgtaaacccgataccattcaatattgtcacggctgtgatagaacgcactaaagatacaatttgaaagcaaatcacaactcaaccggaactatatcattttcaacctatgctgtgatagaacgcactaaagatacaatttgaaagcaaatcacaactaaattggggtgcaatatctggggcaactgggctgtgatagaacgcactaaagatacaatttgaaagcaaatcacaacgggcagctaattttatgcagtttgccggagactgtaaactgaactccccatatttttcctcgtaatttttaactttaccattgaacaattccggactttaatccttatttaacccgaaaatcaattagcagccctgatcttatgaatgaagacctgaaatgtattcattgtggcaattcgtgtggaaagaccccaatccttttcgaaggcaatccgttctgctgtacaggctgctcatccgtttttcagatactcaatgttaatcagctcaaacaatattaccagattgagccgatggcaggcatccgtatcgaagacgataagcgacctgccaacgaaacttacgcatttctcgaactcgaaaaattcaaaaccaaaatcctttctttttctgaagggggcatttcgaaagtcagttttttcattcccgaaatacattgcgcatcgtgcatctggctgctcgagaacctgcacagcctgaatgccggcgttatccagtcgttcgtcaattttccgaaaaaagaaattaacatcaccttcagggaaaatgaaatccagttgcgccaactggttgaattgctggtaagcattcattacattcccgaaatcagccagcacagcatcgaaaaaccacaaaccgggcacctcgataaaaagctgttcctcaaaatcggtgtggccgctttcagtttcatgaatgccatgatttaccatttcccgcaatacctgcccggtcacgaattactggaagacgatatccgccgtatgtttggctggctgagcgtgcttctggccattcccgttttaactttcagcgccagcgactatttcctgactgcctggaaaagcctaaaaaaaggcatcatcagcattgacctgcctattgcacttggattgattacgcttttcacgcaaagcctggccgaaatcctttcaggaaaaggaattggctacattgattcactcaccgggctggtctttttcatgcttataggccgctggtaccagggaaaaacctatcaggcgctttcgtttgagcgcgattacaaaacctatttccctctggctgtcactaaaatttcggcttcaggaaatgaaaccatcccgcttgaagatttgcaatccggcgaccggattctggtgcggaaccaggaaattgtgcctgccgattcgatccttattatcggtgtggccagcattgactacagttttgtaacaggcgagtcgaagccggttttaaaacatccgggagatttcgtgtttgcaggtggccgacagattggcgcagccattgaactgaccatcgaaaaggaagtacagcaaagctacctcacgcaattgtggaatcagtctgaaaacccgtacacagccagcaacaaactgaatacggtggtcaatcgtgtgagccagtatttcaccgttatagtggtgctgatcgcaatcggttcaggaattttctggctgttgaataagcccgaagtagcgctttttgcatttacttcagtactgattatcgcctgcccctgtgccttggctttgaccgtgccatttaccttcggaagcgccatccggcaattcgggcgaaaaggattttacctgaaaaacaccgctgtgatcgaacatctgtataaagttgatacggtggttttcgacaagaccggaacaataaccaacacaaattcttcagctatccggtttgttgggccgcaactttccggcgaacaacttctgatgattaaatcgctggcttttcaatcctcgcaccctctgagcaaagctatttgtgaatcaatcgaagggaatgtactgaatgaagtcatcggatttcaggagattccatcactgggcatttccgggatggtaaaaggaatcaggataaacatgggctcgagatattttgtaacaggcgaaaccggtaccgaagaaaacctgaaatcggaagtttgggttttctttcaggattcggtgattggccattttcagcttgaaaatgaataccggccgggtttgcacgaactgatcggcaggttcggaaaaaaataccaattgcatcttttaaccggcgataacgaagctgaaaaatcgaatttgatcaggtattttggaaatgaaaaataccttcacttcaaccagtcgcctaccgacaagctaaattacatccggaaattgcagaaggatgggaggaaagttctgatgatcggcgatgggctgaacgatgccggggcattgaacgaaagcaatgtaggcatagtgattgctgataatgtattcaatttttcgccggcatgcgatgccattttacagtcgaaacagtttggcaaattgcacaggtttattgattttacccaccagagcatgaaaatcgtgaaggcaggttttctgatttcattcctttacaaccttattggtttatcatttgcagtccagggaaacctgactccgattatagccgccattttaatgccgattagttcggtgtcggtagtagtgtttgccagtttttcagtaaatttagcggcgaaaggtttcagattttaaaacaagctatgtcagtcgttttcgttttggttttggtagctatcgtcatggcattcgcatttttgatggcttttatctgggcagttaaaaatggacagtacgaagatacttacacgccatcggtcaggattttgtttgaagatccgccggtgaaagaggcagaaagtcgcagtgatcagtcgcagttggcagaaccagaaaagaggaaacccgaaacaggagaaggtgaaagtcgcagtgttcagtcgcattaggcatggacagcccgtaacccgtaactcgaaactcgaaacaaaaaatataactaaatactactctatggaattacaaaagttctcctacgacaaccgcatgacccggaactttgcgatagcaaccatggtttggggcgttgttggcctgttaaatggcctattaattgcccttcagatttatattccttccatgaatttcgggctcgagtttaccacattcgggcggacaaggccagttcacaccaatgcggtgatttttgcctttgtcgggaatgccatttttacagcgatttattattctttacaacggttgttaaagaccaggatgtactctgaactgcttggtaaaatccacttttggggctggcaggcgatcattgtggccgcagcagtcaccctggttatggggtttaccgttggcaaggaatacgccgaactggaatggccaattgacattgccattactgttgtatgggttattttcggttggaacatgttcggcacaatattacagaggcgaaccagccatatctatgtttccatctggttttatattgccacctgggttactgtagctgttttacacattgtaaattcaatggctattccggtaagtttcctgaaaagttataccctctacgccggagttcaggacgctttggttcaatggtggtacggccacaatgcggtcgcgttcttcctgacaacgccattccttggcctgatgtattacttcgtcccaaaaatttccggacgtccggtttattcctacaaactatctatcgttcacttctggtcgctcattttcctatacatctgggccggccctcaccatttgttatatagttcgttgcccgactggcttcaggcattgggaaccactttctcggtaatgttgcttgccccaagctggggcggtatgatcaatggattgcttaccctgcgtggagcctgggataaggtacggagagatccaatcctgaaaatgtttgtggttggaattaccgcatacggaatgtcaacttttgaagggcctttgctgtccttcaaaacagtgaatgccatcagccattttaccgactggaccatcggacacgttcacattggggctctgggctggaacggcatgttaatctttgggatgatatactggctaataccacgactttacaacaccaaactttactccacgaaactggctaatgtccatttctggatagccacgctggccattgtattttatgccatcccactttatatcggcgggattacccaggccttgatgtggaaacaatttactcctgatggtttcctgatgtacccgaattttctggaaacagtcgctcagctcattccgatgtacaccatcagggcattcggtgggtttttatatgtgcttggattcctgatcctggttttcaatattgtcaaaacaatccagtcaggttcgtttgtggccgaagaacatgctgaggccccggcattggaatcacttccggaaggaaaaacccaatccgaatccgggcaccgttttctggaacgcaaaccaatccgtttcctgatttttgcaacgattgccattttgattggcggaattattgaagtaatcccgacttatctgattaaatcaaatatcccgaccattaccagtgtaaaaccttataccccgctcgaattgcagggacgtgatatttacgtgaaggaaggatgctacaactgtcattcgcaaatgatcaggccattcaggtcggaaacagaacgatacggggaatactccaaagcaggcgaatcagtttacgatcacccgttccagtttggatcgaaaaggaccggtcctgatttggcgcgtgaaggggtaaaaaccggtaaaatttataaaccaaactcctggcattacaaccattttatcgatcctcaaaaaatgaacgaggcttcgattatgcccaaatatccgtggctggccaaaaaggaaattgatatccaatcgacacctggaaaaatcagggcgatgaaaatattgggagtcccatatccggaaaattacgagcagaaagccattgaagacctgaaagctcaggctgacagcatagcaaaagatctggctgccaatggtatccaaaccgacagtaaccgagaaatcatcgcattaattgcctacatgcagcgacttggcgttgacatttcaactaaatcaacaaaaaaataggccatgcttacagattcgttccgaaacatttttcacgttgaaacttatgccctgattgggtttgtcatctttttcagctttttcgtaattgtgtccattcgggcattcagaatggataaaaaggaagtggccgaactgagcaatatgcccctggatgaccaggaacccacgaatgaaaaggaaaggtgaaagagtcattcgtcatttgaaaaaaaaatcaataaatactgaactatgagtaccaatgaagatattcaattgaaggaaccaaacaaagtcaacgaggaagttgatgatgtgaccaaaatcaaatttttcggtggacacgaatacgatgggatcaaagaactggataatccgctgccaccgtggttaaaatatttgttctacgtaactattatcttctccatttcatatctgatccttctttttgtatttaaagacgacagcattattcaagttaaggaatatcggaaagaagttatggctgcgcgcgctaaaactgaagttgcagtgaaagaagaagcggtaaaaactgctgctgcacccatgactgaagagcaaatcctggctgccggcaaagccatttatgataaaacatgcctggtttgccacggaaaattcggtgagggtttggtcgggcctaattttaccgacgaatattggatacatggcggacgacctgaagaattgaaaaaagtaataatagaaggggttcttgataaaggaatgatttcgtacaaaagtcagatgaacaacactcaaattgatcatgtaatcgggtatattctgagtttacagggaagcaatccacccaatcaaaaagcgccgcagggagtaaaaaactaaaagcccccttcccgcccgcatgccgttgggcagattcccacattttggcctagccgtcaagccaggggagcaattgggctaaagccctaatttagcgggaaccttcatgcccgtcacatgaatgtgacggcaaaggatatcgatcaaataatgatcattgcactatcctttgccgtttcgctttagcgaacggacgtaggaataaaaaaaacagggctttagcgctgaaaagtccttagcttgacggctatgcccttgctggggaaagccttgaatcaagattcgcaagcggaattgctcaaaaaatatttttggaaacgaatgaaaataaatccaatgcaaacccctgaaaactatcaggaatcaacttttcgggaccgcccggcaacttttgggaaagacggaaaccgggtatggctgttcccaaaattgccaaaaggaaaactgtatagcatccggcggataatttcatggactttactgattttcttttacctggcgccgttcctgaaaattagcggggagccactgatctttctgaattttctggaacgtaagttcgtgttgtttggcaatacgttttatccacaggatttttacttgctggtactggctataattacccttgttgttttcattgttctttttacagttatctacggaagaatattttgtggctgggtatgtccgcaaaccgtattccttgaatttctgtaccgtcctatcgaacacctgattgacgggaatccggagcaacagcaaaaactggctcaacaggagatggatgcgatcaaagtactgaagcggattctaaaacacggcatttacctaattatttcatttgccaccatcctgactttcatcgcttatgtaaccggaacagctaaactgggagaaattatggacggatggcctgtgcaagggtttggaatcctgatgggtgttctggcatttaccggggtccattatttcgtattctcatggtttcgcgagcaggtttgcatcatcgtttgcccatacggacgtttgcagggtgtaatgctcgatgtaaacgccatcttggtggcttacgattataaacgtggcgaacctcgaggcaagggcgaacgcggattaaaaggcgactgcatcaattgttacaactgcgtagctgtttgtcctactggaattgatatccggaatggaactca

SEQ ID NO: 3283 - DNA, 24368 bp, synthetic construct
  source 1..24368: mol_type = other DNA
  misc_feature 1..24368: note = Synthetic
gtcagccgggatgagtataaattggtacagactccccaggtgtttgatgccgatttactgaaacaggcctatgaacaaccttatacttctttctttacggacgacgcttcggtagtggaagcgatgggagtatctgtataccttgcggcaggtaatcgggaaaacattaaaattacgactccctttgatctgaaaatagccgctgctttgttggattcatgtttgatttagcttctcgtgacataaaatacctgtcgggtgtagggccgcaacgtgcctcagtactcaataaggaattgaatatctattcccttcacgacttattgtattatttcccctataaatatgtagaccgtagccgtatctattatatccatgagatagacggtacgatgccttatatccagctgaaaggtgaaatcctgggctttgagacgattggagaaggtaggcagcgccgtctgattgcccatttctcggatggtacggggattgtggatttagtctggtttcagggaattaaatttctcgtcggtaagtataaggtacatcaggaatatattgtatttggtaaacccagcgtcttcaacggacggatcaacattgctcatccggatatcgataatgcttcggaactgaagctctcgacaatgggattgcaaccttattataatacaacggagaaaatgaagcggagttccctcaattctcatgcaattgagaagatgatgagcgccgtagtgcagcaactccgcgaaccgctgcccgaaacgctttctcccgctatattgacagaacatcatttgatgccgctgacggaagctttgatgaatattcattttccggcaaatccggaattgcttcgtaaagcgcaatatcgcttgaagtttgaagaacttttttatgtacagttgaatattctccgctatgccaaagacaggcaacggaaataccgtggatatgtatttgaaacggtaggagagatattcaatactttctatgccaagaatctgcctttcgaactgacaggtgcccagaagcgtgtactgaaagaaatacgccgggatgtggggagcggtaagcaaatgaaccgtctgttgcagggggatgtaggcagtggaaaaacgctggtggcactgatgagtatgctgatagcgttggataatggttatcaggcttgtatgatggcgcctaccgaaattctggctaaccagcattttgagacaatccgcgagttattgtacggaatggatatacgtgtggaattgctgaccggttctgtgaaaggaaagaagcgggaagccattctcaccggtctgttaacaggagatgtgcgaatactgatcggtacgcatgccgtgatagaagataccgtgaatttctcttcactggggctggtcgtgatagatgaacagcaccgtttcggcgtggcacaacgcgcacgtttatggactaagaatgtgcagccgccccatgtgttagtcatgacagctacccctattccgcgtacattggccatgacattatacggtgatctcgatgtctccgtcattgatgaactgccgccgggacgtaaacctattgtgaccattcataaatatgatgcgcaccgtgtaagcttgtaccaatccgttcatagacagattgcagagggcagacaggtatatattgtatatcctttgattaaggaaagtgagaaaatcgatttaaagaacctggaagaaggctaccttcatatttgtgaggaatttccggattgtaaagtctgcaaagtgcatggcaagatgaaagctgctgagaaggatgcgcagatgcagctttttgtttcgggcgaagcacagataatggtagcgactacagtgattgaggtaggcgtaaatgtaccgaatgcttccgtgatgattattgagaatgcagagcgcttcggtttgtcacagctccatcagttgcgtggtcgtgtaggtcgtggagcggaacagtcttattgtattttagtgaccggatacaagttggtcgaggaaacccgtaagcgcctggaaattatggtgcggacaaatgacggctttgaaatagctgaagccgatctgaagctacgcggccccggtgatttggaaggcacacagcaaagcggtattgccttcgacctgaaaattgccgatatagcacgtgacggacagttgctgcaatatgtgcgcaatgttgccgaagaagtggttgatgccgatcctaccggtatccgcccggaaaatgaaatcctgtggcgccagctaaaggcacttcggaaaactaacgttaactgggcttccattagttgaataacggttaaacatacactttatttacatttttatgttgtaaaacatattagtctttatctttccgatatacagggagttaggagatgttttaatatgtaccttttagtcccttaccgaaaaaatagttaagaacagccttttcatttagagaagaaatactacctttgggagaattttttaaaagaatgacgaaacggaatgaatttcaattgcattaaaacgatcctaatagctgcgacggcaatggtcagcctgaattctttttctcaggatttgattgcccgacaagcccccatcgacaggaaactaaagagcgttgactcgttggctttacagaaacagatacgtgctgaacaatctgcttatccaggtctaagtctatatccgacttggaacaatgagtatgtacaagcttatggcgatgctatcgttcctgaaagctataaagtggacctgacaggtttctgtatgcctacaacgcatacgaagattaccgatgtattcggttatcgccccagaagacgcagaatgcactatggcttggatgttaaagtattcatcggtgatacgattcgagctgcttttgatggtaaagtacgcgtagtaaagaatcagggacgccgtggctatggtaagtatatcgttattcgtcatgacaatggactggaaacagtttacggacacttgtccaaacagatcgtagatattaatcagttggttaaagccggagaacctatcgctttaggtggcaataccggacgttctaccggttcgcatcttcactttgaaacccgtttcctgggaattcctattgaccccgctttaatgttcgactttgaaaagcaagacgttgttgctgatcattatactttcactaagaccaagacttcaaaaggaactgctcgtagcatggcttctggtgaaggtttgttctataaagtgaagagtggcgatacattgtctaagattgcatcccgtcagggagtatctattgacaagctctgtcagttgaatcgcattacacggaaaacaatcttacgtccgggacaggtattgcgttgttcgtaagatatcaataaacccataaagaagagggcactttaatataatttagagtgccctcttttcttttttctttaattattcctacctttgcaaccaatttgtaaggaaatgaaagataccaaacaacaatttgagcatgtcattgccatctgtcgtgatttgttctccaagaaactacatgattacggtccggcatggcgtattctccgtccggcttccgtgactgaccagatattcattaaagccaatcgtatcaggagtattgaaactaaaggagtgacgttggtggacgaaggaatacgttccgagttcattgcgatagtcaactatggcattatcggattgatacagctggaactgggatatgcggaatcagccgatatcacgaatgaagaaacaatggcgttgtatgacaaatatgctaaaatttcattggatctgatgcttgctaagaatcatgattacgatgaggcatggcgcagcatgcgtgtcagttcatacactgatctgatattgatgaaaatctaccgtacgaaacagattgaaagcctgtcaggacagactttggtttcggaaggagtggatgctaattatatggacatgattaattattccgtattcggtttgattaagattgaatttggagactaagcagaaacatataatatggaagagctgggtgaatgtttgccgttttttactggcggcggtattcatcttttccggctttgtgaaggcagtcgatccgttaggctctttttataagattcaggattatctgacggctttcggaatggccgcgtggtttcctacatatttgcagctactgtttgccatcgtattgtcggcgttggaattctcagtgggagttttcctgttcttcggtatacggcggaggtttgctacgactctggcactgatgctgatgatcgtgatgacaccgctgacactgtatctggcgttagcgaatccggtgtccgattgtggttgtttcggtgatgcatgggtgttgacaaactgggaaacgtttggcaagaatgtagtattgtttattgcagccgtatctgtcttcaaaggtggaaaacaaatcattcgctttattacggcaaaaatggcatggatggtttccatgtatacgttcttttttgtgtttgtgctttcattctattgcctggacaatctgcctattctggatttccgtccttacaagatcggaaagaatatcaaagaaggcatggaaatacccgaaggagcaaaacccagtgtgtttgagagcaagttcattctggagaaagacggaaaaaagcaggaatttacactggataattacccggatagcacatggacgtttgttgaaacacgtacggtgttgaaggaaaaaggatacgagcctccgattcacgacttctctattgtaagtctggaaaccggagaggatttgaccgatagcatcttatccgataagggatatacatttctgttggtagctcatcgcattgaaaaagctgacgatagcgatatagatcttattaacgagatctatgattatagtgtggagcatggttacggcttttatgccctgacttcttcgccggaggaacaaatagaattgtggcgtgataaaaccggtgcagaatatcctttctgccagacggacgacatcactttgaagactattatccgttccaatcccggactgatgctgataaaggatggcgtaattctgaataagtggagtgataatagcttgccggatgaatacgtgttgacggatagcctggataaactggaactcggtcagcagaaacaagaaagtgatttgcgcacgattggttacgttcttttgtggtttatcattccgttgctgatggttatcggcgtggacatcctggttgtgaagcgcagggaaagaaagagagcgaaaaataaagtgattagtgatggagtgatgagtgataagcaagagcttccacagccataaatcacaaattataaatcaaaaatacattaacccttttaataaataaaaaacaaaatgagaaaaaacattgttgcaggaaactggaaaatgaacaaaacccttcaggagggtattgctcttgcaaaagaactgaatgaagtattggctaacgaaaagcctaactgtgatgtaatcatctgtactccttttatccacctggcatcggttactccgttggtagaccccgctaagattggcgtaggtgctgaaaactgtgctgacaaagaatcaggtgcttacactggtgaagtttcagctgctatggttgcttctacaggcgctaaatatgtaatcctgggtcactcagaacgtcgtgcttactatggcgaaacagttgccatcctggaagaaaaagtaaaattggctttggctaacggactgactccgatcttctgtatcggtgaagtgttggaagaacgcgaagctaacaagcagaatgaagtagttgccgctcagttggcttctgtattctctctgtctgctgaagatttctctaagattgtattggcttacgaaccggtttgggctatcggtacaggtaaaactgctactcccgaccaagctcaggaaatccatgctttcattcgttcattagttgctgacaagtacggtaaggaagttgctgacaactgctctatcctttacggtggtagcgctaaaccgtctaacgctaaggaattgttcgctaatcctgacgttgatggtggattgatcggtggtgcagctctgaaggcagcagacttcaaaggtatcattgatgcttttaattaatagataatggaagactgataattgataaccggtgaagtgccggttgttggttatcagtctctataatcatattatcaaccgtctattattatattattcattatgaagaagcttggtttacttttaattgcatgctttgctttcgccgcttttgcttcggcgcagaataacattgtgaagagtttggaacgcaatgtgccgggacagggtaaggtaaccatccatcaggatgcccgcatcgaggccttgataggtcaggaatatatccccaacggaacggagaacagagtgcttaaaagtcagggtttccgtgtacaggtgtatgccggaaacaataccagtagagccaagaacgaagctcacgctgtgggctcacgaatcaaagaatatttcccggaactttctgtttatacctctttcaactctccccgctggctgtgccgtgtaggagacttccgcagtattgaagaagcggatgccatgatgcgccagttgcgtgctacaggcgtattcaaagaagtttctattgtgaaagagcagataaacataccgctttaagtttataagttgttctgtttttgagttgtactgaaactcggaaacttaaaaactcaaatatatgttaggaaaagaagaaatcgtatctcctgcactggatgaactgaaagaacactatcagcgtattataactttattgggcgaagatgccgaacgcgaaggactactgaaaacccccgaacgcgtagcgaaagctatgctgagtttgacaaaaggctatttcatggacccgcacgaagtgctccgctctgccaagttcaaggaagaatacagtcagatggtgattgtgaaagacattgatttcttctcactttgcgaacaccacatgcttccgttctacggaaaagcacacgtggcctatatccccaacggttacattacagggctgagcaagattgcccgtgtagtggatatcttctcccaccgtcttcaggtgcaggaacgcatgacgctccagattaaagaatgcatccaggaaacactgaatcccctgggcgtaatggtggttgtggaagccaagcacatgtgtatgcagatgcgtggagttgaaaaacagaattccataacgaccacttccgattttacaggtggtttcaatcaggcaaagactcgtgaagagtttatgaacctcattcgtcagaattcattcacataacaattccataccttatttcatgaaaggaaatcgcagtccccatgaagggggactgtcgttgtactaaatcccgcatacatatagctaaactttagctaaaacgtatgcgggatttagtacaactatcgttctcattaggagcatgatgatttaaccgagtacaactctgtcacccaatcgtttggccataatacttttgatctcacgcagttctgagtaacgtttcatgatagaggtacattgttcttcatcattggctacggcagggtcttgcagggcatacatcatgtgtttcatttcttcactgatgatggcgaacttgaaattaatcatgagtgtaggtaccaattcgaataggcgttcctcgtcggtcactaacctttgggctttggagtgatatttgctcagttgatagcggtcggcaatcaactctgtacttagcttactgataatagggtcgggatgtgccaggaaataccgttctgcagtgaatccttcattatgtatatgctctgccgcttctgtcaacatctgcctgtgcagcgggttgtggaaagccagttcgtcctccttcaagtcattgactacgtattccgttactgtgatgggaatttctttcccttcctcatcgggaacgttgcacaatactttctctccgtagcgtactaccatttgcaagataaggcgctcgtatttgtaaaattcctgtccttctttcccttcctgcgggatataagatacgtattcggcagcttccggtggaagcggtgcaccaccgtcaggtatttctccatccatgggataaggaggcatgtcttcagggtagggtggttgcattccgtcgggaagcggtgcttgtgcagcgtcgcgggctgcattattttttcttgtttcccggtttctttgttccgcctgcttctcagcctgcgtttcgcgtcgtttggcaacttccgaaaccagtagcttgtcttctacacgaagcagctggctacattctttaatatatacatcgcggacgattgcctcaggaataatagatatactttgtacaagattaccgattaactcagcacgcttgatgggatcttttcctgcatcttccagtagaagattggttttgaaacgtataaagtctgtttcattatcttgtatgaatttctggaattctgtagcgttgtgcttgcgggcgaaggagtccggatcttccccgtcgggaagtaggcaaaccttgatattcattccttcttccagcagcatgtcgataccacggagagaagccttgatacctgccacgtcaccgtcatagagtaccgtgatgttgttggtgaagcggtgaatgagcttaatttgtcccggagtcagtgccgtacccgaagaagctaccacattctccacacctgactggtgcatggaaataacgtctgtgtatccttccaccagaaagcaacggtcttgtttcacaatagcctgtttggcaaaataaatgccatacagttcattactcttatgatagatttctgattcgggagaattgacatatttaaccttgactcccttcgtcgcactgctaagtacgcgcccgccgaaagcgactaccttaccggaaagtgtgtgtaccggaaaaataacacgtccccaaaagcggtcacgtaagcggtgatcgtccgtttcgtagcaaagccctgtcttgacaagatattctttcttgaatcccttcttgatggcttcttgagccatggcatcgtgactttctgtgcaatagcctaactggaacttttcgatgatatcatcccggaaaccacgattgcggaagtatgccataccaatgctacgtccgtccacatggtttttaagtatattttggaagtaatcacgtgcaaagttattcacgatgaacagactttcacgttcgctctgcatcagcttctcttcgctggacagttcgcgctccttgatttcgataccgtatttctttgccagatatttcagagcttcggggtaactcatctgctcgtgctccataatgaagtgcaccgcattgccacctttaccgcaggaaaagcatttgcacaaccctttggaaggcgacacatagaaagatggcgtcttgtcatcatggaacgggcacaagcctacataattcacacctcgcttgcgcaacgtaacgaagtccgatacaatgtctacaatctgtgcggcatccagaattctgtctatggtaggttggtctatcatttggataattgtttttgcgaatgcaaagataaaaaaaatcccccgttgaggacgagggaacctaatgttttcacaacggaataatccttattgtgatttgcttcattttagtgtaacaaggttatatctaaacaggatttatacggaattgaataaagaaaagttttttctttatagggataagtataataaagtgagaaaaattttgctgggaacaggaaaattgtaactttgaagaaaaataaaagctctacggaatacgcagagctaagatgtcttcggcttatagccttattgtgaaaagtctttcactttaagtatcttgactacaaagataaaaaagaataagataataacaaaataaaaagagaaaaatatatggcaagagttttaggacttgatttaggtacagcttctatcggctatagtctacgtgacacagacaaaggaacaaacattacggaacaattggtgaggtttggttccattatctttcaaaaaggagttgggaacagtaaaactggagaattttcgtatgctgcagaacggacaaaacaccgtgcttcgagacggctttaccaagctcggagatatcgtatttgggaaacacttgcaactcttattgaatttggtttttgcccattgtctattgaagatttggatagatggagagtctatgataaggcaaggaatttgaaacgccgatacccggttgatgctgctaattttgaacaatgggtgcgattggattttgatggtgatgggaaatcggattattcaagtccttatcagttgcgggaagagttggcaatcgtacaactggatttctcgcaagagatcaaccgttttaaactgggacgtgctttatatcatatagctcaacggcgcggttttaaaagcagtaaaggggagactttaaaagaacaggaagatgctgtaaaagatgatatagcaaatgaaatgagtttagaatctgtttcattaaaaaagtcagaagaaaggaagtctaaggatttggctagttatatggaagagaatgctctgcatactgtaggttgtgcctttgcccaattggagagagaaggtgttcgtgtgcgggcaagtaaatatcaggctgtgcgttctcaatataaagaagagataaaatatatatttgagtttcaaaatggtttggacatagatggagatttcttcaaacgtatatatagcgacagaaaagatgggtgcattttttacaagcgtcccttgcgctctcaaaaaggattggtgggaaaatgtacgttagaacctgcaaagtctcgctgtccaattagtcatcctgaatttgaaaagtttcgtgcatttgcattcattaataatattcaatatcgaaggactactgaagatgaatggctgaatcttactgctgaacagaaactaaaactttataatgataagttccttcaggcaaagcctagttttaagttcgaagctattcgtaagtggattgaaaaagagattggattattgcaagattaccatttgtctaaagagaagagaaccattaattatagcgatagaacgaatgttactggttgtcctatttccggaagaatgaaggctcttttaggtgagaaatgggaagaatacaagcaacaatcagataaaatacgaaaaaataaaaatggtaaagagcatgttgtttcctatatgatggaagatatatggcatgtctgtttttcgtatgatgatgaagaggctgtatcagaatttgccaaatcattgaaattcgacgataaacaagtaaaacagtttctaaatctttggatagccattcctcaagggtatgcaatgttaagtctaaaggctattcgtaatataaataggttcttagtgccgaagagagataatcctttatataaaggtcatatttatacagaagctgcactacttggtaaaatgcctgagattttaggagaaaagcaatgggcggataacgaaaagagtatattgggagctattaatggatggataaaccaaaaccgagaagaaaaacgtattttgaatattgttaataatctgatttctgcctataaatcactagaatatgcagaacagtttgcctacaaaaatatagagtatcaattagatgactcagataaggaagatattgagaaatatacgattgaagcatttgggcaaaaatcatgggaaaaggaaacacaagaaatgaaagataaggttctaaaagatgttgaaaggatgtatcagcaattctttttcacatccaagcgcgattattttcggctaccaaaactgggagatactataaaattgtatctgtctaacaattttcctgagttctactgcgctaatagttttgttgaatctcaaactggtttacagtgccgttgtgctgcttgtaagaagttgaataaattatatcatccgtcaatggttgaattttataaaccggctaatgaacaagaatttgaatatgatggtgttatgctgtcgaaaaaattattggcaaatccggtaattggtgcgtttaagaacccaatggctatgcggactttacatcaattacgtaatctcatcaattatttcatcaaagagggtcttgttgaagaagatacgcgaattgtcgttgaaactgcacgcgatttgaacgatgccaacatgcgatgggcaattgaagaatatcagcgtgaaagagaaaaggagaataaagcgattcttgaagcaatcaaagagttaaaaggtgaagagaaaaataatgatgatatagataaagcacgtttgcttattgagcagaatcctgaatacttgtttaataaagacagatatgaagtagaaagtggagatgatacaaacaataagaaaaagaaagcagtgggaaaagcaactgattttttatataagaaagatgtggctaaatatcgtttgtggttagagcaagggatgcaatgtatctatacaggtaaaacaattagtatttccgagttatttgatgaaaataagacagattttgagcatactatacccagaagtaagtcttttgatagctcattagcgaatttgaccgtatgcgatgcttattacaatcgtcatataaaaaagaattgcataccgacagaattgcccaactatgaagaaatagaacatcgtttgcaaccttggaaaaagaaagtggaacaactgaaaaataatgtagagttttggagacagaaatcaaaacaggctcagactaaagatgcaaaagataaggccattcggcagaagcatttgtggcagatggaattagattactggcaagataaattgtcgcgtttcaccatgacagaagtgaccagcggctttaaacatagtcaactgaatgacacaaggctgattactaagtatgcatatcactatttaaaatctgtatttagtaaggtcgaagtccagaaaggtttggtaactgctgattttcgtaagatgcttggtgtacagtctgctgatgaaaaaaaagaccgcaataaacattcacatcacgccattgatgctacaattctttcgttgatacctgtagcggctaaacgggataagatcttggagcttttttataagatacaagaagaaaagaaacttaatttcaatactgaatattgggagaaagaattgcaaaaagaaattcgctcttgtcaaattgggaacatttcttctttacctgactatatagaggagaatattttaattaatcatatttcaaaagatcagactttagtaccggcaaaacgtaaaatgcggacaagagggaaagttatctggcagagagatgaagatggacaaatttgtatggataaggatggatataaaatgccaaaacattggataaaaggggattgcattagaggaaagctgcatggggattctttctatggtgctattaaacaatccaaaaagaaaggtgaaaaagattatctaacttcatatgaagatatttcgtatgttattcgtagggaattgaaatataagaaaacacctacagataagggctttaaagatttagatgatttgcatctgtctattgttgatgagggtttatttaatataattaagcagcaatgtgatggaaaatctttcaaagaggcatgtgatgacggtttttatatgctgaatagagatggatataaagtgaataaaatcagacatataagatgttatacctctgtaaagaaacctttatccattaaacgacaatcatatctatctgataaggaatacaaacaatcttattatgctgaagtcggtgatttatatgcaatgtgtaaatattgcaatgcagataaaacaaaagtacggtatgaagtaataaacctgtttgatataactgagaataggagatatggttataacatagcagaagtattggaagatgataagaaaaaagaaaaatactatttagtcgcagttttacaagcaggcaaacaagtaatcctttataaaaatgatgatgaacttgaaagcataatagagatgtctaatgataaattgtcagatcgattatatgttattagtggatttgagagcccttatagaattatacttaagaaacatatatgtgcaaagtctgacagtgaattaggaagaggagagtctataaaatcatttaatgaacttccggataaaattagacagagtgttaatgctacaaattatcttctagaagatattgatttttatatttctccagatggtttaataacatttaaaaacgactaatgagcaatattgaattcttccgaaaatgaaaatctgttttgtatgaaatgtagagaagcagtttctcatttgttgatatagtagaggcgttaactgatagtgtgtctatatacaatctctgaatgaaattttgactttgaccgggggcaaattgtatctcagttaaatgatggtagaggatgggaaaaggaaaagacttgagtaaagtgaggttagatacatctcttcaagtctttttagatgaagaatagcttcaattgccttttgaagcggatagtgaataagtaacttaaaaacagaatactatgattaaaaaaacgctttattttggtaatcctgtttatttatctttgaagaatgcacagttagtaatcaagttaccggaggttgtgaagagcgacgttttacctaaaggtttcaaacaacagtcagagataactaaaccaatagaggatcttggtgtagtagtgctggataataagcagataactattacttcgggagtcttagaagcgttacttgaaaacaattgtgctatcataacttgcgacagcaagagtatgccggttggtttaatgcttcctttatatggaaataccacacaaaatgaacggtttcgtcaacagttggatgcttctcttcctttgacaaagcagttgtggcaacagactataagaataaagattgaaaatcaagcagctgtattgaaaaaatgtgcaggtgaagaagtaaagtgtatggctatatgggctgctgatgtgaaaagtggagattctgataatctggaagcacgtgcagctgcctattattggaaaaacttgtttaagataaagggatttacaagagacagagaagggatttcacctaataatttgctaaattatggatatgcgattcttagggctgttgttgcgcgtggattagttgccagtggacttttacctacattaggcatacatcatcataatagatacaatgcttattgtttagctgacgatattatggagccatatcgaccttatgttgatgagttggtctataagatattgcaagaggggatgaattgtgatgaattgacaaaaggtttaaaagctcggttacttactattcctacattagaagttgctatctcaggcaaacgcagtcctttgatggttgcagtgggacagactactgcatctctgtataaatgctttagtggtgaactacgtagaataatatatccggaaatgtgagatgaatcgatttagtgaatatcgtattatgtgggtacttgtattatttgatttgcctactgaaacaaagaaggataagaaggcatatgtagattttaagaaaaatctgcagaaagatggctttactatgtttcagttttctatttatgttcgtcattgtgcaagtagtgagaatgcggaggtccatgtaaaaagagttaagtctttcttgcctgagtatgggcaggttggaattatgtgtattacagataagcaatttgggagtatagagttattttatgggaaaaagtctttggatataaatacccctggtcaacaattagaacttttttagaaaaagaaaatcccgcttaaatgcgggatttttaattgaaaacagttttgtttttgtaattctaaaactagagataatgtattggataccagtgactaatatggaatctactgtttccaatggttcaaagatacttaaatgaaagcagaccacaacaagatcctctgggtctggttgctcaagttactgtttccaatggttcaaagatacttaaatgaaagcagaccacaacgttaagtttgtaggcgataacggacaagcactgtttccaatggttcaaagatacttaaatgaaagcagaccacaacaggctttcgagtggataaccaccaaggtaactgtttccaatggttcaaagatacttaaatgaaagcagaccacaaccctcgaatgtgtaatagcgtccggcattatactgtttccaatggttcaaagatacttaaatgaaagcagaccacaacagcagttaaggtagtaggttatgactcaatactgtttccaatggttcaaagatacttaaatgaaagcagaccacaactgtttaggttaaactctgatatactcgtggactgtttccaatggttcaaagatacttaaatgaaagcagaccacaactgaccaaagcctattggcaaagaactctctactgtttccaatggttcaaagatacttaaatgaaagcagaccacaacttctgctttgcgatactcataacttgcttactgtttccaatggttcaaagatacttaaatgaaagcagaccacaacagatggttgcccgtggcatcaacttggacactgtttccaatggttcaaagatacttaaatgaaagcagaccacaacttaaaagaatataagcccgtgaagttggaactgtttccaatggttcaaagatacttaaatgaaagcagaccacaactcctctacctgtgtgcccctgtcgaactcgactgtttccaatggttcaaagatacttaaatgaaagcagaccacaacgtcgaccgacacgtacactaatgaggcgatactgtttccaatggttcaaagatacttaaatgaaagcagaccacaactaactgtcctgcacttgttttctagtatccactgtttccaatggttcaaagatacttaaatgaaagcagaccacaacgtactacaaggcttgatgataacgcaatccactgtttccaatggttcaaagatacttaaatgaaagcagaccacaacaggccgggcactatgccgcccgtgtccgccactgtttccaatggttcaaagatacttaaatgaaagcagaccacaactctaatgaatgtaacgtacacgttcgagaaactgtttccaatggttcaaagatacttaaatgaaagcagaccacaactggttttggggcttatttcgcgtctcgtttactgtttccaatggttcaaagatacttaaatgaaagcagaccacaacaggcatcgcccggtaaacgtttccggcataactgtttccaatggttcaaagatacttaaatgaaagcagaccacaacgcaaagcgtctacactgtcctcttgactgaactgtttccaatggttcaaagatacttaaatgaaagcagaccacaacgtggcattcggagatgtaaggcgcacgggcactgtttccaatggttcaaagatacttaaatgaaagcagaccacaactcagcatattatcgataacccgttctgtgcactgtttccaatggttcaaagatacttaaatgaaagcagaccacaactccttcaactgtttcacatcttatgcaccaactgtttccaatggttcaaagatacttaaatgaaagcagaccacaactgaatactgatgatatgatagatggcgatactgtttccaatggttcaaagatacttaaatgaaagcagaccacaacgacgggctggacgcccttatcgccaagtccactgtttccaatggttcaaagatacttaaatgaaagcagaccacaacttcccccgtcgcctgacctttctttatatcactgtttccaatggttcaaagatacttaaatgaaagcagaccacaacgtccgtacccgcattggcgttcttgtccttactgtttccaatggttcaaagatacttaaatgaaagcagaccacaactgtcagctcaacaaagtgccggcaatggatactgtttccaatggttcaaagatacttaaatgaaagcagaccacaactgacttctttacactagacgtacgaagaagactgtttccaatggttcaaagatacttaaatgaaagcagaccacaacggcaccttgcatgatcatattctgtgagttactgtttccaatggttcaaagatacttaaatgaaagcagaccacaactacaagactatcaatgtcaacgaggtataactgtttccaatggttcaaagatacttaaatgaaagcagaccacaacaataaacgacgtggaacggctctaatactaactgtttccaatggttcaaagatacttaaatgaaagcagaccacaacctgatattcgccgtttataatgttcgttttactgtttccaatggttcaaagatacttaaatgaaagcagaccacaacaaaaaataaaccggaacgtcttttccgataactgtttccaatggttcaaagatacttaaatgaaagcagaccacaaccttatacgggatataatcgacgacggaatactgtttccaatggttcaaagatacttaaatgaaagcagaccacaacttatacataaacggggaaatctgcaaataactgtttccaatggttcaaagatacttaaatgaaagcagaccacaactatgtggattttcagaattaaaaaagagtaactgtttccaatggttcaaagatacttaaatgaaagcagaccacaacggctgtaaatacgttgtaactccgttactcactgtttccaatggttcaaagatacttaaatgaaagcagaccacaaccgtttttcatcttccttgcatcaatatgaactgtttccaatggttcaaagatacttaaatgaaagcagaccacaactgatggtgacagatggcaatgatggtgccactgtttccaatggttcaaagatacttaaatgaaagcagaccacaacaataggctttctttcatcctctttcattttactgtttccaatggttcaaagatacttaaatgaaagcagaccacaacgcgtgatgatccgatgtcggttattattaactgtttccaatggttcaaagatacttaaatgaaagcagaccacaacttggtcaggttcattatcggggaagaaaagactgtttccaatggttcaaagatacttaaatgaaagcagaccacaacatatagagtgcagctccggcagtggccgaactgtttccaatggttcaaagatacttaaatgaaagcagaccacaacaacgacataatggacgatacaggtaattttactgtttccaatggttcaaagatacttaaatgaaagcagaccacaactatcagcaaagaaagccgccattgcttccaactgtttccaatggttcaaagatacttaaatgaaagcagaccacaactatccggtatctactaattttctcgcaaaaactgtttccaatggttcaaagatacttaaatgaaagcagaccacaactaaagttattatccaccttcattaaaggccactgtttccaatggttcaaagatacttaaatgaaagcagaccacaacgcattcactaccgcaggtgctaacgctaaaactgtttccaatggttcaaagatacttaaatgaaagcagaccacaactgacttcctcacgctcgacatccgaagaagactgtttccaatggttcaaagatacttaaatgaaagcagaccacaacttgtacataaacggggaaatctgcaaatacactgtttccaatggttcaaagatacttaaatgaaagcagaccacaaccattaaacgccttttccattgaattacggtactgtttccaatggttcaaagatacttaaatgaaagcagaccacaacgagtgttgatccgatcagtatcatgcgtgaactgtttccaatggttcaaagatacttaaatgaaagcagaccacaacgcggtgtaagcatgttaaccaccgtaccgcactgtttccaatggttcaaagatacttaaatgaaagcagaccacaacaaaaccaaacgcctgtgagttattgttagaactgtttccaatggttcaaagatacttaaatgaaagcagaccacaacggtacaatgtgtttacacagtggtaaattaactgtttccaatggttcaaagatacttaaatgaaagcagaccacaacagatgttccttgtccgttctgtagaacagaactgtttccaatggttcaaagatacttaaatgaaagcagaccacaacgatggagaaccgctactcttgcctttaggtactgtttccaatggttcaaagatacttaaatgaaagcagaccacaacacgggattatccccccccgcaggtaccgcgactgtttccaatggttcaaagatacttaaatgaaagcagaccacaactaatcaagtgccatctgttcacatttgcgaactgtttccaatggttcaaagatacttaaatgaaagcagaccacaaccatcgcacaggttaagcaattcaggctgcaactgtttccaatggttcaaagatacttaaatgaaagcagaccacaacggccagacgtaaggctgcaggacagaagctactgtttccaatggttcaaagatacttaaatgaaagcagaccacaacattaccttttgggctctcgctaccccactactgtttccaatggttcaaagatacttaaatgaaagcagaccacaacgaataacacggtaacggtacacattagcctactgtttccaatggttcaaagatacttaaatgaaagcagaccacaacgatcgtagctgtagtagtttacttggtgtttccaatggttctacttaaatagaagtcagttacaatatggttctagcaaagcaagaacaaacacagagtcatttacaataattcaaatagggtagtatacgagaatttcatatcattcctgccaatatttgactattttcaataattttagaaataagtatgcccctacctaatcctaaatatcatcacctctctttattaacgaattgaagagagaagccccatttccttttccgtacctcccctctcttcaatcccttaatctcacctatttattctattttatcttttccctaatcttcgtcagatactgcttcatcccttccgcatccttcgtactgataatttccagcaaattcttcagctccagacgaatattttccacttgcgagggagtgcgcggattaaagagaatttcctgaagcaagtaatcatcctcactcagcaaacccttagcaatagccatgtgctttttgaacgtagtacccggagcctcctgatgcttcattaccgctgcaaaaacaaacgtagagacgaaaggaatagacagagaataagctaccgtttcatcatgctcgtcgaaagtatattcgaagatattgaggcggagcgtctggtaaaggtccttgaagaaaatttttcccaggtggtcaccttcactgatgatgatagcattctcgctgctcagattactgaggctggcaaacgtaggaccaaacatcggatgcgacgatacataacggaagccactttcctcatagaattttttcaatcccgtcttcaccgaggcgatatcactgatgatacaatccttgggcagcataggtagaaccttgcggaatgcgtccagcgtatatctcaccgtggcggcattgattaccaactccggttcgaagtcctttatctcttccaacgtggtgaaacgatacgtgttgtagacaaaacgcaactggtgcggattcacgtcgaacactgccgtttcatgttggaaacttagaatatctgtaaagaaagagcccatcttgccggctccgagtattaaaatacgcataaatttagtgttattagctacaaattacgagctacaagctacgagtatcctgcgatatgatggcgcagccactggtagtttgtagcctgtagtttgtcacttattaattatttccatttgttgcctcacactctcctcgtgtatcagctcgaataccttcttgataaattccgaatccacgcccagaagcacaccttgtgaaccgcgtttgtccagaatttcattgtagcgtcccgtttgcaggatcgtcatatcatgttctttcttgaacgtaccgatttcacgtgccacacgcatacgcttggcaagttcctgcatcaggttgttgtcgcattcgtcaatctgcttgcgcagttcgctgaggttttccgtggtctgggtctctttacggatgacgagtaggttcaggatgtaatccagtacgtccggagtcacttgctgcgaagcatcgctccatgcgcagtcggggttgcagtggctttcgataatcagaccgttgaaaccgaggtccatagcctgctggcaaagcggtgcgatgagttcgcgcttaccaccgatgtggctggggtcgcagatgatcggcaggttcgggatgcgacgacgcaactcgatggggatatgccattgcggcagattgcggtacaacttcttgtcgtaactgctgaaaccgcggtggatggctgccagacgtttcagaccagcattgttgatacgttccaaagcaccgatccagagttccagatccgggtttaccgggttcttcacaaatacaggaatatccacacccttcagtgcatcggcaatttcctgcatggcaaacgggttggcagtggtgcgtgcgccaatccaaaggatatcgatacctgctttcagacactcgtatacatgcttcgaagtggctacttcggtagaaacgtacattccggtttctttcttcacctctttcagccatgccagaccgtctacgcctacaccttcgaaaccacccggtttggtacgcggtttccagattcctgcacggaatatcttcattcccttttcggccagttgcttggcggtgcacattacttgttcttctgtctcggcgctgcaaggacctgcaattaccatgggacgtttgtcctcaatacccggcagcaaaatcgattctaattcaagttccatattcttttatttttgttcaattatattttttgttgtatagatatttttctgtgtctcctgaaccctctgcaccccccgtcgataaagcctttcgagcgtgttaataaatacaggcctcgttttttaaaaacgttgcccttattctttaaaaacgtcgggcacgttttttaaaatggtgagtggcttgtgttacaggacttcttttttgtaagcatattacttcatcttcctgatgcgtttcaatgcttcttccaatttatgatctttgcagcaaagcgagatgcggatataccgttttccgttacttccgaagataaatcccggtgtgatgaacacgcgtgcgttgtgcaacaccttttcggtcagttcttccacatcggcacagctatcgggaatttttccccagaggaacatacctacctgtttttcatcgtatgtacatcccagtgcatgcatgatttcccctgccagatggcggcggttgcggtagttcttgttatttccgtcgtaccattcctgttcggcttccaaggcgttggcggctgccagttgcatggcgcggaacataccgctgtcgatgttgctcttcactttcagtatccattgcacaaagtcggcgttgcttgccagcataccgatgcgccagcccggcatattgtggctcttgctcatggagttgaactcgatgcaacactctttggcgcccggcacactgaggatgctgagggggtggtcgttcaggatgaagctgtacgggttatcgtttacaatcacgatgtccttgcggcgtgcaaagtccaccagctttgcataaagttccggggtggcgttagctccggtcggcatgttcggatagttggtccacatcagctttacgcggctcatgtccatcttttccagttcgtcgaagtcgggcatccagccgttttcctctttcaggttgtagttgatgacttccgcgccaagtatcttgctcaatgaggtataagtggggtagcccggattgggaaccaatacctgttcgcccggattgacgaaggccagtgtgacgtgcaggataccttctttcgagccgatgagcggctgtatctcagtattaggattcagctccacgccgtaccatttcttataccaggcggcaaagctgcggcgaagttcggggataccgacataaggcatataaccgtgtccgtc

SEQ ID NO: 3284 - DNA, 24326 bp, synthetic construct
  misc_feature 1..24326: note = Synthetic
  source 1..24326: mol_type = other DNA
ctcgccgagagtaatacaccactttcttctacacttgtatacaccttcggagagaggtttttataaaatatcagatatttttttgcagcatgttttatttcacgctgggcatgctccacatctttagcagtatggtatgtggtaacttcgtgaataattgcttttgctttttcccagtcgctttcgaatgttaccaaaacacttatttcatcccaaatgtactgaaaacctgtggtgtaattcgcgagtttatggctgaaaaccgatgcgtttgggatgtgaattaccctgccggtgctttggtcggcacctacccagtttcctatttcaatgagcgtaaattgaaataagcgaatatcaattacatcgcctttgtgctcacctacctccactctgtctgatagttcaaatggctttcgccaaataataaacagccagcctgccaaatccgtgattgggtctttaagggcaattgctaaacctgccgaaaccagaccgaaaaatgtggccagtgaatcgaactttaccagccataaatctgctaccagtaagatgaaaatgataaaagagacccgcttaatgatttttcttaaacggtactgttttttgaggtcatcgatccatttatgaaccagtccgatgcttattcgcgatataacccagatcacgaatgctgtaataattgttttatatattttaatttgtagcggaattgatattccggtataagatttgacgaattcaaatagctcttccatgtcataggcactttgtaaccaaagtaactattttttgtgtgatgagcaaaaaacaattcatacgcagcttcgtttcccgggtgtaaaattttatgttctgtaaaattccgtatctttattaattgaatgaaaagcgttaagcatatattgttgatttttagtctgctttttgggattttgccaggagcatttgccaatagctatggtgtgcttgatctttttgaatggaaccccgatacttttagaaaacttacaggtaaatggtattttgtgccgggtaaacatgttttttctgccgacaccctaaccaaccactattttattgaaacaggtaaatcgtggaataatgaggaggtaggtgactcagttatgggtaaaaacggatacggtacctatgagcttgatttaattttacccgatacgactttggaatatggcctggatttaggttcagtagctagttcctatgcgctctacattgatggtcaattaataaaaaaagttggagagccttatggtacaccacaaacttacagaccagaatttaatacccaaatagccacatttaaatctgaagcaaagcgggttaaaattactattcatgtaacgaatttcgattacagtaaaggagggatctggggcgaaatcaggatctcaaaggccagaaagctggaactataccggcaaaatcgaatcaattttatttttttgctgtttggaggtattttagtgatgagtttgtatcatgccggcctttatttgttgaggcgtaaagaaaaatcatcactttattttttcttttggacatttgctgctgccttcaggcttctgttttcaggtcgctattttccggccctggacatgttttatgtaaactggttttggactgtgaagattgagtaccttacattttacctttctattccactgtttttgaaatttgtatcagagcttttccccagaagtgtcgataaatacataatgagggtagtattgatctttggagctttagcttctttaattgtattggttactcctgtaagtttatttacctattcagttgttgcttatcagttgtttacatttgcgtgtatcggttatgttttcatagtgctttaccgtattttaggtaaaaacgaacccggcagtaaaacctttttactgggctttttggtattagctgttacagttatacatgatattttatcagcccattacttgttttccaatggttcatggttcagcacgggcctggtttttttcgttgtgtcgcaggcctatttactcgcctcccgttttacaagtaccttctcgcgtgctgaagtgctaagcaatcagctgaattatatgaatgtgcatctggagaaaattgtggatgagcgaacccagaaactacaggatgccaatgaagaattgaaagagaaaaacgacgaggtgtcaaggcaatcagaccagatgaccataatgaataaagaacttagaaagttgagtgtggcagccagtgaaactgacaacgccattgtcattaccaataaagatggagaaattgaatgggtaaatagggggtttgagcgcctgtatggttattctttgggtgaaatgcaccaacggtttggtaataatctgaaaaaagccggacgcagtaagcacatcgaaacattaataaagcaggtaatcgacacccggaaatctgtaaattatgaatcgaccgttgaggcacacgatggaagtaaaattcaggtgcaaacaacgctttctcctattatggatgccaataatgagctcatttaccttgtggcaatcgacaccgatatacgaaaacttaaaaaagtagagcgggagcttaaaaagtccaatagtgctaaaaataaactattttccattattgcacatgaccttcgcagtccttttaactctttattgggccttacagagcttatgttggcgcgctataaagaattgtcttccgaagagctcctgcaatttcttaaagatttaaacgaagtatcacaaaagacctattacctgttgctcaatttgctcgaatggtcaagaactcaaagagataaaatcgagataaatccacagaaacataacctggcagcactcctggatgaaacattgggtttatttacaacttcgttcgaaaacaaaaatctcatactgaaaaaagacgttgctgatgacctccaaatatttgtcgattatcaatcatttagcactgtgctgcgcaacctgatttcgaatgcaataaaattcacaccacgaaataagcacatacatatctcagcaaaagaatcgggtgcttttattgaagttactgtgcgtgatgagggtattggtatttctcctgacaatgttaaacgtttgtttagtgcagaagagagctactctaccgaaggtacggagcaggaaaaaggcacaggcctcgggttaatgctttgtaaaagctttgtggagaagaatgaaggaaccatcgatgtggagagtaaagtgggatatggtacaaccttccgcgttcggattccagctgctccatgggcatgattttattttgagttaagccgaaaaattggcatctttagcggatttttaatggtaattcgctatggaaaatgcccgtaaaacgtctgcaaaccgcctggcgcttattgtagtgactacgcttttttttatgtggggatttattacctgcatgaacgatatcctgattccatacctcaaaaaggtttttgaattgaattacttcagagctatgctcgttcagtttgccttttttggtgcttattttatcggatcattaacctattttattgtatcggctaccaagggagacccaattttgaggcttggttacaaaaagggtataatagcaggtttgcttgtcagtggttcggcgttggttattttttggcctgctgcggcgctgcacagttacgagctttttctaagtgcgctgtttattttaggtttgggtttcaccctattgcaaatcacagcaaatccatatgtggctattctcgggcccgacgagactgcctcttcgcgcttaaacctggcacaaggttacaacagcctcggtactaccattgccccaattattggtgggtacctgattttccattattttgccaaatatgggcaaccattgctaaatagtgcaggtaatcaaatatttactgatgatggtgcacaaatgactgcctttgccgtgcaggctccgtatatgatttttgcagccatgttctttatattggccttaattgtttatcgaacaaaattaccacgggtaacagagggggaagaagtcgagttttcagcaggtgctttgcgttacaggaacctggtttttggtatgatagctatctttatgtatgtaggcgccgaagtgagtattggcagtatcatgatcaattatattaagcagcaactcaatacaggtgaaatgctggccaagtcataccttgccttttactggggcggagcaatgattggtcgctttttgggagcaattagtatgggaagcaccagccaatcgatgcaaaaaacattgaaaatgatcggtacagcttttggtgtttttatgctgatttacctgattgtatacatcgaaagcggatttacatttgctttaagccaggtatatccgtttgccggtttccttattttgaacctgattgcattccgtattggccgaagcctgcctcatcgtaccctgttcctttttgcattaatgaatattgtattgctaacaacagctttgtataccggaggtcttgtttctatgtggtgcattgtggcaataggtttgtttaactctatcatgtggtccaatatttttacactggccattcgcgatttgggtaaacacacaagtcagggatcttccctactggtaatgatgatactggggggcgcaattattccgctgatacagggagcggtagcagatgctgtttcggtgcacatgtcgttttttgtgcccatattttcttatatttatttggccttttatggcgaagagggttacaaaccccggaaatggaatttaaaaaaattgtaaaatgaaggatatagttgcaggtattgatatcggaggtaccaactcagaagttggattggttgataatgagggaaatgtgcttgatagagcatcaatgaaaacccgggcccacggaaaggatttttctgcttatctagaagatctgtcccggttaataaacgatttggtgaaaacaaatgcagtttcattggttggcattggcattggtgccccgaacggaaatattaataatggaagtatagaacatgctccaaacctcgattggaaaggaattgtacctttttgtgagaagctgcaggttcatttccctgaaatcccaataaggcttacgaacgatgccaatgcggcagctttgggcgaaaagctttttggcaacggtaaaatgatcgataattttcttaccatcaccctaggtactggtgttggaagtggttttattgtaaacggacaattaatgtacgggcacgatggtatggccggagaagccggacacactgtggtcgatcccaacgggcgcgtatgtgggtgtggccgtagaggttgcctggaaacttatgtttcggcttcaggcattgtgcgcacagctgcagaacagttatctattcatcactttcaaagtaaactggcagacataccctttagtgagttggagtcgaaaacaattgccgatttggctgccaaaggagatgtggtagcgcaaaaggtgtttgaaattacgggtcgcacactggggatgaaactggccgattttgtggccattaccagcccgaaggctatttttattgccggcggggtggtcaatgccggagaactgttgcttaaacccgtgcgcgaacatatggaagccaatctcttgagcatctacaagggaaaggtgcgcatcgaaaaatcaggactgcccggtatcgattctgccatactaggcgcagcggcactcatctggagtcaaaataagtagcattgctactgctaaatatactgcaatatgaagtttttgggtcttgcaacagcattgatgctgctttttacatcatgcagcaacaacaatagcctaattgaaaaagttaaccccttcattggtaccggaggccacgggcatacctaccccggcgccacttatcctttcgggtttgtacaattaagtcccgatacccggctcacgggctgggatggttgttctggctatcactacagcgacgagcgcatttatggttttagtcatacccacctgagtggcacgggtgtgagcgattacgccgatgtgttgctgatgccacgcacaggaccggttgtatggcaaaatgggtatcccgatactacaggttattttagtcatttttcgcatgaaaaagagtatgcagaacccggttattatcgtgtttcactcgatgattacgatgtggatgtggagctcacggcaactgctcattgtggatttcataaatatcagtttcacaatgccgaagaagcacacgttatactagaccttaatcaccgtgatcaggtcatagatgcatggtttgagcagatctcagataccgaaattgccggtttgcgcagaagcaaagcatgggcacgcgatcagtatgtatattttgtaatgcagtttaataaaccggttaaagctttaaaagtaagaaataaaggggaaattctgcaagcgcagaaacgctatgcaggtaagcaacttaaagcagcattgtttttcaataattcagatgaggtaaaagtgaaggttggactttcggctgttgatgttgaaggggcaagaaaaaacctggagaccgaaattgacgcatgggatttcgatcaggtaagaaaagcgactcaggctgcctggaagaacgaattgggtaaatttgttgttaagggtggaactcacgatcaacaggtgagtttctatactgctttgtatcacaatatgattgtgcccaatatttttactgatgtggatggacgttatcgcggacatgattctgctattcatcatgcaggcgcacatccccaatataccgttttttctttatgggatacttacagagccacacatcctctttatacgctgatggatactgcacgcaccaacgattttatccattcatttttgcgaatttatcagcaaggtgggcggttaccggtttgggaactggccggaaatgaaaccgactgtatgatcggttaccattctgttcccgttatcgtcgatgccatgaagaagggtattggcgactttgatcaaagtctggcacttgaggccatgcagcatagtgcaatgcaagaccattttgggcttgatgcttatcgggaaatgggcgtaattccgctagatcgtgagcatgagtcagtttccaagacattagaatatgcctttgacgattggtgtatagcccagtcagcgcagatattgaataatgaaaccgtaactgaacaattccttaacagggcacagttttataaaaatttgtacgatccgtcgaccaatttcttccgtgcaagagaaaatggaggctggctaagtccttttgatccgcgtgaggtgaattttcatcataccgaggccaatgcctggcaatatactttctatgtaccgcaggatgtgcagggtatgattcaattgatgggaggtgatgatgcctttacagccaaactcgacagtctgtttacagtagaaaataaaaccacgggcaggcaccaggtcgatattactgggctcattggccagtatgcgcatggtaatgaaccctcacaccataccgcttatttgtacaactatgccggtaaaccctggaaaacccaacagatggtgcgtcgcattatggatgagttttacaaaaatgcacccgatggtctggcagggaatgaagactgcggccaaatgtcggcatggtatgttttaagtgccatgggcatgtacccggtaaatccggctgatggtatttttgtgcttggctcgcccattttcgatgaggtgacattgaaccttgagaatggacgtcaatttacggtaaaagctgaaaataatggcgctgaacaaatttatgtgcagcgcatgatgcttaatgacaagccataccataaaagctttatcgattatgaaacgataatgaaaggcgggtcgttggtgtttttcatgggcgaacagcccaataaagagctgggaactgatccaaccagccggccggcttctgccattgccggcagcgattttctatctaagccaattatcgaaggtggttatcgctcttttaaagaaccacgtaaaatacatatttctaacgccacaggccggggcaaaatttattacaccctgaatggcggcacgccagaccgcacaagtaaacgctacactgaaccgtttacaatatcaaatacaacccacatcagagcaatagccattgatgccgatggcaaccgcagctatttgtccaaagcttcattttacaaaatgcctgaaaatcgcagtattgaaattaaaagtacctacaatcctcagtacagcgcaggcggtgatgagggattgattgacctgctgcgtggtcccgccgattttcgtacaggtttctggcaggggtaccaggatcaggattttgaagcagttgttgatctctctgacccacaaaaaataaactatttggctttgggctgtttgcaagatattcgctcctggatttggatgccggttgaagttgttttttatgtttcacaagacggcaaaaattttagaaaagttggaacagtagaaaatagcgtttctgaagatcgatacgggccggttcttgacgattttgaacttaccaacctcaatgaatatgcacgtttcgtgaaagtagttgccaaaaattatggtactatacccgactggcacatgggacatgggggagaagcatttattttcgtagatgagattgtgattgagtaagcactgggctttgttagattttaattcttctgttgaaaaaaaggttttttaggttaaatccacattatcaattgttagtaactttcatgtttgtgttaaaaatgaattttgcatttcgcgttttattgatttattttcgcaaataaaaacaaaaacaccccatattttacagcttatggattatgtaaatcaactaaaacaaatggccaaactcattgcgcttgagaatactggcactccggttgaattggcacggcaattaaatattgacgaacaattagtaaaagatcgcattcgagaacttgaagagctttatgccgtggatatcagttacgtggatgatttggaaaccttccgcgtaagccatggtcaattcccaatgcacctttttaagaccagtttgcaataccagatgaactgatgctgttttgcttttaagtacccatttaaacagagccctattctaattatgcttccgtttttacaacctgattgtatttacactgccattgctttattatagtgtttacaatccgtaacagatttttttaaataaaaagctgactacatagcgttgactcccgggctaaagccctgtagatttaaatgaatgctgtaacccacgccatgaatgacgtggtaagttataatctgcgatttttttcaagaattattttaatgacttgcaccgtcatttatggcgatgacaagcaaaggctatagctttttatggctttagcctggattgttttactgcaaaaaggagattggctgctgaaagattacagatagcctcaattcgggtttcctcaaatatagcttacttgaaatgtgcaatgcagccttgttttagaaaccagcttacttcgaagtccttaccatattttgttgccttaaaaaatactctttattgttaaaatctaacaacattttatatctttggtataccagcaatgaaatataccacctttcaatcagatatgaggctctttttacaaccaaaccctgatttttcttttaaagcgacactaattgtcgaagaaatgatgtacgattggggataaataaaaaagcctcctgcttatggccaagaggcgaaccaagttgaatgaaactattatggcaagaatgataaaaaaaaatacaaataaaaagctccacggtgtacgcggagccaagaaatcttcggcttatagccttattgtgaattgtcttttcagagatacaataataaataaaaattagttaaaaacaaaatttatgaaagttttaggtatagatatgggatcaaattcaataggattaagtgtacgtaatcctgaattgggaaatgatctcgagaaccaattagaatattttagttcggttatattcagttccggtgtgggtaatggtaaaaccggagagtattcgtatgctgcagagagaacaaaatacagatcaagtaggagattatatcagtctcgtaagtatcgaaaatgggaaacacttaaggttttaagatataataaattgtgtccattatctgagtcaggtttagcacaatggagtatttataacaaagccaaagggctttatcgaaaataccctgtaaatgaacagcaattcgaacaatggattaagcttgactttaatggtgatggaaaaccggattatgctagtccatatcaactgagagatgagctaatgaatcgacagttagatatgaagaatgccatagatcgctataagttaggacgagctttatatcatattgctcagcggagaggtttcaaaagtagtaaaggagaaacaataaaagaacaagagaatttagagaataatagtattgaaagcaagccagataaagacataatacgtgagttgaaaaagtctgaagataataaatctaaagagctaacgacatacatgaaagaaaataatctaaaaacagttggacaggcttttgcattattggaaagaaatggaataagaataagaggtggaaagtatcaagccataaggtcacaatataaagaggaggtctatgagatttttaaatttcaacaagccctgagtaccgatagtgatcttttcgatcgaataattagtgagcgtaaagaaaaagggtctattttctataaaaagccattacggtctcagaaaggattagtgggactttgcacaatggaacgtaagattttttttgataaaagaaacaatcagaaaatcgaaaaaggaaaacctcgatgccctataagtcatccagattttgaggagtttagggcatggtcattgatcaataatatcaggtaccgaagaaatgctgaagaagaatggcaatcattagcattagaagataaacatgatttatttaatgagaaatttttgttgacacggtcaaattttaaattcgaagatattgcaaagtggttatctaaacggttcggtatcgctttatcttacaaagacaaaactttaaactataaagaaaaaacgaatgtggcgggttgtccaattagtggtagacttaaaaaccttttgggagataattggaagagtatgttgatacctgttgataaagagaaagttaataggacaactggtgaggtgaaaaaaattacctataactatgaagacatttggcatatttgcttttcatacgatgaaagtgaatttgtatatgagtttgggataaaaaggctgggttataatgaaataaaagcaaatgagttagtgagaatttggggtgctattcaacaaggttatggtatgttaagtttaaaggcaattcgcaatatcaatccgtttttgaaacaaggatatccttatactgaagccgtattgttggcaaaaatacctgaattgatgggtagccacaagtgggaaaagtatggacagctagtagagaaatcaatttctgatataattgtcaaaaatcgctttgaaaaaagaattttaaatattgtaaacaatttaataggaaattataagtcgctgcaatataatgatgaaggatttgcgactaaggaggtaaattaccttctagatgaaaaagataaagagcagattgaagagttctgcattgccaattatggagccaaatcttggtcagaaatgtccgttgaaaagagaggggtggttttagatgttgttagggaggactatcaggcattctttaaaactgaaaaaagggatttttttaaaatcccaaaagtaagtgatgctttgaaggagttcttaagtaagaaatttgaaatgtttcgatgtgaaaactacgaggagtattcacatcaaaacaattgcaaatgtgatgcctgtaaaaagcttaataaactctatcatccttcccaaattgcattttatcctccggcaatagcacagtcatttaattacaatggcgtgcaattatccatgaagctattagaaagtcctgtaattggatcatttaaaaatccaatggccatgaaagcactgcacatacttcgtaaagagattaataaacttctgaaggaaggaatcattgatgaagatacccggatagttgttgaaactgctcgtgatttgaatgatgcgaataaacgctgggcaattaggaaatatcaaggggagcgggagaaagagaatgatgaaatatcaaagataatacagacttattttaatactaatcgaaaaataagcaatgatgaaatacaaaaagctaaactacttatagatcagcacgaaattcctgttgaagatggcatgtttgaaaaaaacgtaaagaagtataaattatggcttgaacaggggtgcagatgcatttatacaggaaaaccattaaatcttaccagcttgttttctgaaaataatactactgattttgaacacacaatccctcgaagtaaatcttttgataattctttggcgaacctaactgtatgtgatgcatattacaaccgaaccattaaaaagaataaacttcctttcgaattggagaattatgaaaaaactgcaagaattggtgatgaagaatatcctcccataaaagaccagctaaagcattggaaaaaaaaggtagaacggttacaagataatgtgaataactggaagtttaaagctaaacgggcacaagataagccagccaaagattttgccattcgccaaaggcatttatgggaaatggaacttgattactggaaaaacaagttggaacgatttactatgaaagaggttaagtcgagttttaaaaatagtcaacttgtagacactcgtttgattacaaagtatgtctttcattatctaaaaacagtatttaatagtgttgatgtacagaaaggtgaagtgacagcagattttagaaaaatgctaggcgttcagaaagcctatgaaaagaaagacagaacgaaacactctcatcacgcaattgatgctgcgacccttacattaattcctaaatcggccaaaagagaaaagatgctttctttattttacaaaattgaagaacataaaaaactcaacaaagatacccctgaattgcaggaagaacttaataaggaacgcttaagttgcaattttaataaggtgaaaaatatggtgcctttcattgaggacaaaatactgataaaacatgaatcaaaaaatcaagccttagctcctgcaaaaaaagttgtccgcaaacgaaaaaaaattgtgaaggtgaaaaacaataggggtgaaaaggtttcaatggttgcaaagggtgatagtatcagaggccaattacatgaagaaaccttttatggcaaaattaaagcgttggataaaaaagatgagttttggatggtaggaagaaagaaaattgaagaattaaatcccaaaactgatattattgtggataaagccctttcagaacatattcaccaacaaatcgataatggagttgagttaaataagctaaaggataaggctggtaatacaataaggcatattaggtgccgggtgaaagccgggagaggttttttatcacctgacgatgttactaccgttaaacaacaaacttatctgtccaggtatgattataagaattattattatgctaattcaggtgataattttgggttcgccttatacgtggatgaaaacaaaaagccgctaaagattattcccaaaagcctatttgaagtatcaaagcaggatattgacgagcacaaaaaaattgaggattactttgagcgaaatataatggtaggcagagggcaacgaaaaaaaattggggagctttataatgtatttcaggttgggcagcatgtgttattttatgttgacgataaagaagaattaaaacatacagataatttatcctctcacttatatgtagttaaaactttgtttgatggtaaaacagggaggattcaatttcaacatcatttggaggctcgtactgatgaacagctaatcagagatttccctgataaagatgaaaatgggaagaaattatttggcaaagcgggtaaaaatggttttagttcatttggattggattttatacggccacgtttgcttcttacagtggggaaattaaattgcatttacgaaggtaaagattttgaattcaaagcagataatcaaatcagattcttcttttgatttaaccaaatggcttttattcggagaccaagtcggtttcggaatatgaaaaaacaacatctatggtaattgaacaaggctatatttatcatatctacaaccagggaaataaccgtagaaaagtgttttttgaacgggagaattattttttctttttgaaaaagctatggacacatgtggttctctatggcgatatattagcctattgtttgatgccaaaccattttcatttgatggtgttggtaaacgaagtaaaattgctcgtgaaggaagaaaatcgcagacgtaccgagggcttcgctccaagcgaaaccctcggtagcaggcatgaaacgatcggttccgggacttctcgaaccataaatcattctatcggcatcatgctgcgatcctacaccaatgcgattaacaaacaagaaatgcgctccggctcactattccgcaaaaccaccaaagccgaatgcatcaactgcccaaacggcataaccccgacgttttatgctaccgaatttggtacgcaaattcatgtgagtaaccccgaaaaagagtatccgcaagcttgctttaactatattcaccaaaacccggtgaaagccggtttggttgcgaagcctgaagaatgggaattttcgtcggcaaaagattatgccgggttgcgcaatggaaggctggttaaccaaaaagttgccgaaaagtatattgagctatagacaagtgggaggccgactccaagtcggtctccggataagaaaaaacagcatctatgaaaattgaacaaggctatatttatcatgtttacaaccagggaaacaaccggggaaaagtgttttttgaaagggagaattatcttttctttctgaaaaagttatggaagcatgtagttccttatagcgatattcttgcttactgtttgatgccaaaccattttcatttgatggtgctggtgaatgatgtaaaattacccgttaaggaagaaaatcgcagacgtaccgagggcttcgctccaagcgaaaccctcggtagcaggcatgaaacgatcggttccgggaattctcgaaccataaatcattctatcggcatcatgctgcggtcatacactaacgcgatcaacaaacagcaaaaccgttccggttcacttttccgtaaaaccaccaaagccgaatgcatcaactgcccaaacggcataaccccgacgttttatgctaccgaatttggtacgcaaattcatgtgagcaacccggaaaaagagtatccgcaagcttgctttaactatattcaccaaaacccggtgaaagccggtttggttgcgaagcctgaagaatgggaattttcgtcggcaaaagattatgccgggttgcgcaatagaaggctggttaaccaaaaagttgcagaaaagtatattgagctatagacaagtgggaggccgactccaagtcggtctcccactaaaaagatacgcgtatgataaaacgaacactctattttggaaacccctgttatttgaagaaaaaatcaggacaaatgattgttgagtttcccgatgaggaaaaggaaacccggaacgttcccattgaggatattggtattgtggtgctcgaaaaccagcaaattacaattacccaggggttgttagctgcattggtaaacaataatacggctgtcatttcctgcgatgcgaagcatatgccagaagggctaatgttgcccatggcgaaacatacggagtttactgaaaagttttatgctcaactggaatcatcacaaccacttcgcaaaaatttgtggcagcaaacagttgtggctaaaattcgcaatcaggcagcaatgctcgatggcttgggtgttgaggtagaaaatatgctttattgggcttcacaggtgaaaagtggcgacccggataattatgaagggcgtgcagcagcctattactgggcagaaatttttgatcagtttccctcatttcgccggcatcggcacggagaaccgccaaacaacttattgaattacggttatgccattttacgcggtatcattgcccgttcgctggtgggtagtggacttttcaccggacttggtattcatcacagaaataaatataatcaatattgtttggcagatgatataatggagccctttcgaccgtatgtagatcaaattgtattatcaattgtttcaaaagaggctgaaatagaagaattaaccacagctcacaaagcagaattattaagcattgcaactgtagatattaaaattgatgatgaatacagtccgcttttagtgggcgcgcaacgaacaactgcttcattgcgaaaatgctttgaaggcataacccggaagttgtcgtatcccgaactgtagattggcatagatacagaatgtaactttaattatatgagccagtttaataaccgtttaaatcaatacagaattttgtgggtatttgtattttttgatttgccaaccgaaacgaaaaccgaccggaaaaacgcaacacgtttccggaaagggttaatggaagatggctttaccatgatgcagttttccatttacacacggcattgcaatagccgtgaaaatgctaatgtgcatataaaacgggtaaaatcaatgttgccgccaaaaggcgaagtaattgttttcacactcaccgacaaacaatttggaatgatggagttttttaaaggcgaggcccctgccaaaagaccagaaaccccgcaacaattggagcttttttgatagttggggtagttagcgagggtttcgcttctagcgaagccctcgctagcctggcttaagtgtctcaataaaaaaaatcctgatcagccgtaagccaatcaggatttcacctatcttttttcttttctatatttgcgtttatttttttgatatactggtagataaccgggggtatgctgacacaaatatatcaaagaacaatctgaaagcaattcacaacgccctactgccttgtataccagcatcacttgctgacacaaatatatcaaagaacaatctgaaagcaattcacaacaatttcgatggtatcattaaaactatccgcgctgacacaaatatatcaaagaacaatctgaaagcaattcacaaccattcatttacatattccaaatgtttctctgctgacacaaatatatcaaagaacaatctgaaagcaattcacaacttgaaatattatggctgtatgagtatcaacgctgacacaaatatatcaaagaacaatctgaaagcaattcacaacaatttcgatggtatcattaaaactatccgcgctgacacaaatatatcaaagaacaatctgaaagcaattcacaacatcaatgtcgccgggcattatttctgcgtcgctgacacaaatatatcaaagaacaatctgaaagcaattcacaacaccttagcgctcattgctccaaacagtgcagctgacacaaatatatcaaagaacaatctgaaagcaattcacaacacgaaaagaagcactgaacaatacgagctagctgacacaaatatatcaaagaacaatctgaaagcaattcacaactttggacgtgaacggtattcgatggaatcggctgacacaaatatatcaaagaacaatctgaaagcaattcacaacagggagcattggcgtactccattttaatcgctgacacaaatatatcaaagaacaatctgaaagcaattcacaacctacagggaaattatatacagaattggtttgctgacacaaatatatcaaagaacaatctgaaagcaattcacaaccattgaagttttcggcatcggctgtaaatagctgacacaaatatatcaaagaacaatctgaaagcaattcacaactgatgcaggtgccggatttgaaagttacgtgctgacacaaatatatcaaagaacaatctgaaagcaattcacaacggtgactggaataaaataaaggaaataatggctgacacaaatatatcaaagaacaatctgaaagcaattcacaacaaatcatcggcctgtgcttctgtataataagctgacacaaatatatcaaagaacaatctgaaagcaattcacaacattgattggggaaattctgtcattacaacggctgacacaaatatatcaaagaacaatctgaaagcaattcacaactctggtttcattttatttaaagttttaggagctgacacaaatatatcaaagaacaatctgaaagcaattcacaacggtgaattacccccatctgcctattctccagctgacacaaatatatcaaagaacaatctgaaagcaattcacaacatcaagagtgtaacatattaagtgtttatcgctgacacaaatatatcaaagaacaatctgaaagcaattcacaacactcaactcaatgcccgctaataaagcggggctgacacaaatatatcaaagaacaatctgaaagcaattcacaacatccgcattggtgactacttttttaggattgctgacacaaatatatcaaagaacaatctgaaagcaattcacaaccgcgtgctggcttatcaagatggtgataatgctgacacaaatatatcaaagaacaatctgaaagcaattcacaactatgatatcaatatgccagacatgcaaggggctgacacaaatatatcaaagaacaatctgaaagcaattcacaacttgcgacaaacacgaagtattgcccggaatgctgacacaaatatatcaaagaacaatctgaaagcaattcacaacatctgaagcaattcgaagaagttcaaagacgctgacacaaatatatcaaagaacaatctgaaagcaattcacaacctgttgttttgtttcactaatatagatgttgctgacacaaatatatcaaagaacaatctgaaagcaattcacaacgatagctctgataggtcttgccatctaagggctgacacaaatatatcaaagaacaatctgaaagcaattcacaactcgtcccctttatgaatttgaacactatatgctgacacaaatatatcaaagaacaatctgaaagcaattcacaacccaccagcgctatgtggtttaccacctattgctgacacaaatatatcaaagaacaatctgaaagcaattcacaacttgattaataatttcattttcttcaaattcgctgacacaaatatatcaaagaacaatctgaaagcaattcacaactatgaagatttaagggcaatgggcattaatgctgacacaaatatatcaaagaacaatctgaaagcaattcacaacagtcaagggtcagcaagatcaggaaaatcagctgacacaaatatatcaaagaacaatctgaaagcaattcacaacatggtggtgagttgggaggaatcccgataagctgacacaaatatatcaaagaacaatctgaaagcaattcacaacatggattacattgatgaaattgacatatccgctgacacaaatatatcaaagaacaatctgaaagcaattcacaacatgttaggccatctgtataggggtcatcccgctgacacaaatatatcaaagaacaatctgaaagcaattcacaacaattcgtctaaaatatcacctagatcatcgctgacacaaatatatcaaagaacaatctgaaagcaattcacaacatcaaatttatgtttataattataaatcatgctgacacaaatatatcaaagaacaatctgaaagcaattcacaacatgagtaaagaggtgttggtcgaaatggaggctgacacaaatatatcaaagaacaatctgaaagcaattcacaacaatgcagggtttatttattatgcttccaaggctgacacaaatatatcaaagaacaatctgaaagcaattcacaactataccacttatccagtgagtatttatattgctgacacaaatatatcaaagaacaatctgaaagcaattcacaacagatgatatcgtacaggcaaacatacgtatgctgacacaaatatatcaaagaacaatctgaaagcaattcacaacattacttcctgggtgtttggatcaacttgtgctgacacaaatatatcaaagaacaatctgaaagcaattcacaacgcagcaaccatacatccgcactccggacagctgacacaaatatatcaaagaacaatctgaaagcaattcacaaccacaacgtagaaaaaataaaaataattactgctgacacaaatatatcaaagaacaatctgaaagcaattcacaacatatataatatttatttaatatgcaaatatgctgacacaaatatatcaaagaacaatctgaaagcaattcacaacacgctgatatcggatatactggtggtacaggctgacacaaatatatcaaagaacaatctgaaagcaattcacaacacgctgatatcggatatactggtggtacaggctgacacaaatatatcaaagaacaatctgaaagcaattcacaaccggcacgatttcttaccgctgtcccgttacgctgacacaaatatatcaaagaacaatctgaaagcaattcacaacacaattagcattaattatttgtataattatgctgacacaaatatatcaaagaacaatctgaaagcaattcacaacactaagttcaatacaaaatgattattccttgctgacacaaatatatcaaagaacaatctgaaagcaattcacaacttctaaagttttcataatatttgatttttagctgacacaaatatatcaaagaacaatctgaaagcaattcacaactttgcagcaacagaaagaatcacacctgcagctgacacaaatatatcaaagaacaatctgaaagcaattcacaacaaactggtgaaactgtttacgaagaagaaggctgacacaaatatatcaaagaacaatctgaaagcaattcacaacacatgatactacacatagaatatagattcggctgacacaaatatatcaaagaacaatctgaaagcaattcacaacctgttcggtctgcgagcagttccatggcatgctgacacaaatatatcaaagaacaatctgaaagcaattcacaaccaattcgtttataaaaaaaaagcgacctttgctgacacaaatatatcaaagaacaatctgaaagcaattcacaactgatttagctccttaataatgatacctatcgctgacacaaatatatcaaagaacaatctgaaagcaattcacaacaagacgatttaaaataagtcgattggtaaagctgacacaaatatatcaaagaacaatctgaaagcaattcacaacgtattgtgccctgttgcatttcggttgttggctgacacaaatatatcaaagaacaatctgaaagcaattcacaactctttaggcgttttgcttaacccggaatcggctgacacaaatatatcaaagaacaatctgaaagcaattcacaactgtttgaatcagaggtagtgcctgtcacatgctgacacaaatatatcaaagaacaatctgaaagcaattcacaactcactatcaaattcaatttcaccatcttccgctgacacaaatatatcaaagaacaatctgaaagcaattcacaacaatatgatactacacataaaatataggttcgctgacacaaatatatcaaagaacaatctgaaagcaattcacaactacattcctaaatggatgtgtaggtttaagctgacacaaatatatcaaagaacaatctgaaagcaattcacaactaacggcctgtcagggctatcaattacagggctgacacaaatatatcaaagaacaatctgaaagcaattcacaacccttaaaaagttgagtttttaattgtggttgctgacacaaatatatcaaagaacaatctgaaagcaattcacaaccggaaacaatgaaaggttatttcctttgttgctgacacaaatatatcaaaaaacaatctgaaagcaattcacaaccttgaggcatctgtggcaaattgaatcaatgctgacacaaatatatcaaagaacaatctgaaagcaattcacaactgctctgtttaccggtttcagttttgaactgctgacacaaatatatcaaagaacaatctgaaagcaattcacaaccaattcgtttataaaaaaaaagcgacctttgctgacacaaatatatcaaagaacaatctgaaagcaattcacaacccgcatcacttaatgccgcaatagccgcacgctgacacaaatatatcaaagaacaatctgaaagcaattcacaacgtcggttgtgaaaactgattatagtgcaaagctgacacaaatatatcaaagaacaatctgaaagcaattcacaacagattgtgggtctatatccacccccacaacgctgacacaaatatatcaaagaacaatctgaaagcaattcacaactcatttaagtacaatattaatataatttatgctgacacaaatatatcaaagaacaatctgaaagcaattcacaactggcgaatgaaaaggagttgaagctactaagctgacacaaatatatcaaagaacaatctgaaagcaattcacaacggggtatacctgtaaatgtttgaagtagtagctgacacaaatatatcaaagaacaatctgaaagcaattcacaactaatcttcacgcctgaaacatccaccggtagctgacacaaatatatcaaagaacaatctgaaagcaattcacaacggtggcgtttttcagcgacgagcatctcctgctgacacaaatatatcaaagaacaatctgaaagcaattcacaacccatatataaaccaactgccaaccgcctcggctgacacaaatatatcaaagaacaatctgaaagcaattcacaacccgcaagctgaaggcttatgaagaaaatgggctgacacaaatatatcaaagaacaatctgaaagcaattcacaacgcgccgggaaacggtcgaaatatttttgtggctgacacaaatatatcaaagaacaatctgaaagcaattcacaacctagccgcttcgatgcgtacagtagggttcgctgacacaaatatatcaaagaacgttctgaaagcaattcacaacaccatcgccttgtgtaaaaatcgggtagcagctgacacaagtatatcaaagaacaatctgaaagcaattcacaactgtctaggctcaatcaaccgcaccatcctgctgacacaaatatatcaaagaacaatctgaaagcaattcacaacaagaacttttaaagcaaaaaaaaggttatggctgacacaaatatatcaaagaacaatctgaaagcaattcacaactgatactggaaaatggtatacttctcctgagctgacacaaatatatcaaagaacaatctgaaagcaattcacaacaatcaatttggaataaccttaaaaccatagctgacacaaatatatcaaagaacaatctgaaagcaattcacaacctaagccttcgggctttttttacccactttgctgacacaaatatatcaaagaacaatctgaaagcaattcacaacgtggtcttggaagagaaaaatccaagaatagctgacacaaatatatcaaagaacaatctgaaagcaattcacaacagatacaacggtagtgatttggtagctctggctgacacaaatatatcaaagaacaatctgaaagcaattcacaacgtattataatattataattcaagtcaaaaagctgacacaaatatatcaaagaacaatctgaaagcaattcacaacctagtgggctatacaattttaaactgcaatgctgacacaaatatatcaaagaacaatctgaaagcaatagaatccttttccataaatcgtggcctttttcgtatatttacacctctgaaaaaaaatctaccgatgaaaaaatacattttaggtcttttgatcgttaccatgctgcacgcatgcataaaaacagatagtcaaatgattatacaatcacccgacgga

SEQ ID NO: 3285 - DNA, 17450 bp, synthetic construct
  misc_feature 1..17450: note = Synthetic
  source 1..17450: mol_type = other DNA
  variation 17156..17297: note = note, n is a, c, g, or t
attttaatatttatttaaagatttaaagcaactattttctaaaaatactgttcttacaatagccataacaattcaacgattttaaaatgaaaacagaatttatttatctgctgttaatgatttttattttgccgtttacaaccaacggacagtttgctgtaatcaagggtacaatcacaaacgaaaaaagcggaaacacgcttgaaaatgtaaatttgcttgagacgctttcaggaataggaactatttcgaattctaccggagaattcagattgatgctgaaccccggagatgcagaactgttaattactcttgatggttataaaaatgtaaccaaacaaattaagttgctgaacgacacaaccatcaacattcagctacaaccacaattgaatctgaaaattcgccagaaagcaggtgcacaaactggtctggcgaataaaacggagaaaagataaccggttattctgatattccttcaattacttttccctggcttttatcgggatttggaattccaagcagcagcgacaaggttggaacaagatcgattgcatcgtatttctcatgaattacagtgggtttaatattcattccgtaaaacagcagcggaatatgggtttgatcggtgtaaattatctttttgaacttgtatgttggttgccagccttcctttaacacaaacaaacaatcaccagaacgacctttcacataggttttgtacatcgactccaacataccgttggcctgtattccccgctcaatcaggtaagccggcattgccacaagcactccttcaaattcatcgataaaagtggcaactgtgctttgaaattcattcaggtcgagtttgtttttagcaatcagtttatgattcagataaatctggtgctcatcgtaatactctatccatttctgctctccaaaagtgatgttgaggtacgaagaaagcaatgccaccgcactttccacattaaaatgatccactggcagatgaaactcttttttcagataatcaaccggatattgggccgaagtatttgcagtgagaaaatacagcacatttccttctccatattttttgtcaacggcacttattatgtcggcaataaaacggtcaatattcaggtaagtatcttccatttcgagcgaaaccggcccaaaagcgttattttcataatccatcgatgaaaaaacagtggttacaaaatcagtgttttcatcggtaccaatatcttcgttctgcagaatctgaagggtaaaatcttttatcatcatattggccgatggggttgttttaaacgggttgaaatttccggcttcttttaaatatttgcttatcgtgtgagggaaaagtttatacaacccaaaatatcctttttccaactcgtaatcgtcgcggagactttctgtatattccgattcgggcagcagcggagtccagtttctgaaactgtatttttcggcgtaattctcgctgttaaaaagtctcacccaatcaggaaaaacattcaggtaaaacgaacttgaaatcatccggcccgattctgagtcgaaccaataagcagcatcagcagcatgaccggccgcaaagatggccgattcgcggtttaacgccacgctgaaaacctttgatttacccatcgaataaatcttaagattgtcggttattgtattcgaaagcagcttcactggcgaagcatttccctgtttggtatcggaaccaacagtcataaaacctttgtcttcggtacattcagtttcgttaccgttaaatttatcaaaccaaattttattgatgatgccgtgtgttgccggggttacaccggtaaaaagtgttgcagtacctgatgcgtagttctgtatatgttgtttcaacctgacatttgtacacaccgctccattggtgtacagtttttttaacccgttttcgccaaacttattccagtaccgctgcacataatcgggcctcatattttcaaccacaatgccaacaactactttaggtttagcgttggttgcaggtattaaagggttggcgtttacttcagaaaacaagaaaaagactgcaagtacgaatgctattttaactgaaaacttcatctgtttcaaattttgcgcaaagtagcaaaagaaaagattttggcaaaaaccggtcgattaacgatggttgccaataacaataaaagaaaaaataaaggaaagtatgaaactcaataagactgaataaagcaacaatagaatttatgctatttttaccagtcataactaagtcgataaacttaataaaccaaagaaaatgaaaagcatattcaaacttcacacagcagttcttgcactggttgttttatttctggcctcgtgcgcttcaaaaccaaaaacagaaactacagaaaaatcagcaaccgaaaactggatacagttattcaacggtaaagatttgaatgactggcaaatcaagtttaaaggagaggaacttggtgttaactacaataacactttcagggttgaagatggtatgttgcgggtttcatacgagaactggcctgagtggaatggtaaattcggacatattttttacaaagatgaattttcgcattaccgtttgcgggttgaataccggtttacaggcgaacaggtaaaaaatggtccgggatgggctttcagaaacaacggattgatgcttcatggtcaaagtgcagaatcgatggaacttgaccaggattttcctgtttcacttgaggttcagctgcttggcggaaacggaacagacgagcgttcaacaatgaatgtttgtacgccaggcacaaacattgttatggacagtgttttgatagaacagcattgcaacaactcaaattcgaaaacataccacggcgacgactgggttactgtggaagttgaagttcatggaggtggcattgtccgtcattttgtggaaggcgttgaagtgatgcattacgaaaaaccacagcttgacccgcgcgacccgtcctaccagaaacttttaccggctgatggtaatataataattacaaaaggaaccatttcgttacaagccgaaagtcataataccgatttcagaaaaattgagctattggttctggaggaataataaatagtgaccgggattaattgctcattttcaatgaaatattccgtcatacggtttctttttatcatttttttgatatttccggttgtagcttattcgtcggaaagtggtaattcgagcgattcgttattcctaagaatgagtcattcccgtgggttttacaatgccggattttatctgtcgatagaagcaaatcagcccgatgcggttatccggtttacaagtgattgttctgctccatcggcacaaaacggtgaacaatacctgttgccggtttatatcgattccacctgtgttatcaaagcatttgcatttactaaaaccgatacaacagtaatcaccacacaaacatttatttttcctgaattggtagccttacaaagcaaaacaccaaaaggatttccgctggtttggggtggctcaacttctattggtgccgattatgcaatggatgaggatgttattgcgaatccggcttataccggagaatttgaacaggctttaaaatcgttgccagtcgtttcgctttcgatgaataccgatgattggtttaatcaccagaccggactttatgtgggttatccgaactccgatatttcgcgcgaaaaagcagttaccgcagagtttttattcagcgacaccacgcagaattttgcggtgaattgcggtgtacaaaatcagggtggcacaagcattattaactggaaagtgccaaaacaatcgatgcgtctgctttttaaagaaaaatacgggctaaagaaactgaaatacaaattgtttcccgatgctgaaattgaatcgataaacactttggtgctcgatggttttttgtattcgtggcttcacccctgggatgaaaaacaacgcgtaaccacacttttttttcgcgaccagctggcatcggacatgcagaataaaatgggctggccatcttttcatggaatgtatgctcacttgtttatcaatgggttgtattggggaatgttcgatttgcacgaacgccccgatgaggaatttctggctggatatctttttgccgaaccagaagatttcgatatcatcaaacacaatcctgaaacaattgtacagggttcaaatacaacttacctcgaaatgctcgcttttgcgcggaaaggactgagtacaccggccgctttaaaaactatggagcagtaccttgatttacctgcttttatcgattatatgattctgaacttttaccttggaaatttcgattgggcgcatcagaattattatgctgcccgcaacaaaacgcagggttccggttttcggttttatacctgggatgccgaacatgtaatgcgttattcggagttggaatacaataatataaacaaaagcgatgaaggaggccccacggaaatacacacccatttaaaaaagaatgctgagtaccggatgatgtttgccgatgcggtttatcaccacttttttaataatggtgttcttacacccgaaagtttcagggaaagttttttgtatcggaaaaatgaaattgagaaggcagtaattcttgagtcggcgcgctggggcgattatcttgaaaacactacaaatgttacttacacacgagatgaacactggattccggaagtaaaccgtgtactggctgaatacattcccaatcgccgagatgtggttttacgacagttaaaagctgacttcagtggtttatttcctgccacaatgccaccgttgttttttgaaaaaaccaaaaataatcaggcgtttacaactattgaaatcagcaatccaaacattgggggaacgatttattttactttggatggaagcgacccgcgcgctgttggcggtacggttaatggaataaaatatacaaaagaacttgagattcagaagggtacttatctgaaaacgagaattcttgccgatgataaaaaaacctggagtgcactggctgtaaaagcggttcagcccgcaggtatttatggcgaaacgttggttatcagcgaaatcatgtaccatccggttgaaggatttcctgagtttgttgaaattatgaataccggagaaactacagcggttttggatggttttacattttccgacggtatcagctttgaatttcaatcaggtacccgtttatttcccggcgaaggaatcgtactaaccaatgatacgcttctcttcagaaataaatatggctttgccgcttttggtcaatttaataaacaacttgaaaataagggcgagatgcttattttacaaaatgggttcagacaaactgtcgattctgtagcattctccgatacagttccgtggccattgaataccgatggcagtggcttttcaatcgaaattattgattcggatactgataattctgtagccaccaactggaaaacatctgcaacaatcaatggtacaccttttcaaatgcattcagttgcaacacacgatcctgtattttatccaaatccttttgctgataagattttcgtcgatatgttgaatcctgatttggcttataaaacatttaaaaccgatgtgtacaatttaaccggattacttgtaaaatcagttgagagttatagttacggaacagtaattgaaattccgatgaacgatgtcgcgaagggaatttatatttttaagatttcgccgattaataaatctgattttgaaacaatcacaaagaaagctgtgaaagcgggtagataatcagctgcttattttctggttggcataattcagcatgataagcgatagcgttataacagccattccgatgagtgaaatcaaatcgggcttttcgtttttaattaatatccagctcaaaattgcacccgaaaccggaatcagaaatttccacatattaatgtgcgagactttaacacccgggcgttgcagcaaaccgtaccagatggcaaaggccgcagccgaaagaaatgccagccagcctaatgaaaaatagtaagccggcggcgcgggtttaaactgaaacccttcaaccggaattgaaaccagaaacaaggtgataccaccgataaacagcgtggttgaactcaaaaccagcggcgaaatttttcggggttgttttgaaaccatgacattcgaaaaacctgaaaacaggttattgataaacagaaaaccaatgccaagcaattctgcattgctgttgatggccacttttgtccgtcccaaagtaataatcgcaatgccaaccacaccaaccaaaatacttactgtttttaacggtgtcattttatcgttatgaaatgtaaaatgagccacaactgcgatgaataaaggcgatgaaccaattatcattgcgccaagcgcgccgggaaccaattccattcctttatagaaaaaagcatattgacctgaaaactgggcaaacgaaagaaataaaatgaatttccagtttgcttttaattcattgataataaagcgcggcttgccgataaacaaaaagagcataataccagaaatgataaaacgaataccggcaaattgaaatggcgtagaatattcaagtccgatttttattgtagcaaaagcggttgaccacaaccaacaggcaaaaatggcaagaaaagtggtgctttttataatgtttttcatcccggttcttatagcccgcaaaggtgtgaatttattacagaaaattgtcggacatttaaaattagaacatacaggcttaatattctgccctgaatttgattatgtagtgaaattaggcctgccttttcggaaaaatacaaaacgacgaagtttttcgttttatattgcgacgaattatttaacaacatggaaagaaaaatcatcaacaattacgaagaatttgaagcttttttaggaaaggaaatcggagtttcagattatatcaccataacacaggagcaaatcaacaaatttgccgatgccacgctcgattaccagtggatacacaccgatccggaaaaggctgcaaaggaatcaccttttaaatcgacaattgcgcacggatatcttacactgtcaatgttaacctacctttggtttaacgtggtcgatatccgcaacgtaaaaatggtggtaaactacggaattgaaagtttgcgttttcaacagccggtgttggtgaacgaccgcatcagggcaactgtttcactcaacgacattaaaaatctgcgcggtgttaccaaggttcaggtgaaaattattgttgatattgaaggccagaaaaaaccggcttacgaatcgctggtgaattttctgtatcacttcgagagttaagacaatgtttgggtataataaattgatgacaatgagatgccgaaatgaattcggcgtgacgcactaatagcgtttattattaatccgtcaccctgaactggtttcagggtctttattttcaaacagtctttagtagtaaagccggttatcgcagcttttcgagcaatccttcgcaagagtcttccagcaaatcgagtacgagttcaaatccttcgtcgccgccataataggggtccggaatttcctcgtaactccatattttgcggtaatctgtcattttgctgattttggtgaggtcggttttgtttcgtgccacgtttttcagcgactgcacattctcgtcgtccatggcaattattaaatcgaaatggtcgaaatcttttgccggattaaatttacgcgaaatgctggtgaggttgtagccacgttttgcagcgtgtttctgcattcttttatcggcagcttctcctgcatgatatccggctgttccggctgaatcgatttcaaattgttcacccaagtcatggtcgttcaccatttttgtaaaaacgccttcagcgcccggcgagcggcagatattacccatgcaaacaaaaagtacttttttcataacagagaagaattgtgatttatagtgattgattgagatttgttgtcattgttgtcgttgttgtcattgttatcattgttatctttgttcaaaacctgataacccgacaaccattacaaccatgataactttccaacaatgacaacgttccctcattcttcattccagatttcgtatgatttttttgcctgtaaaagcagcatatcgtaaccattttttactgttgcacctttttccagtccctgcgccataaagcgtgttacttcggggttgtaaaccaggtcgaaaagcaaatgtttgtcggttaaaaactggtacggaatgttggcgcaaccctccactttcgggtaagtcccaagcggcgtggcgttaataatcaaaagtcgctcagccatcaccttttcatcaatgtcttcgtatcttatttcgttttcttttaactcttcaatcgaagccgaaagaaactcaatccccagctttttcaaaacatatttcagtgcttttgaagcgccgccggtacccagaatcaatgcttttgtgtggtgtggtttcagcagcggtttcagcgatgtttcaaaaccgtaggtatcggtattgaatcctttcagaaaaacaccctttgcggtgcgtgtaatttttaccgtgttcacagcgccaatctcacgggctgcatcattaagctcgtccaaaaacggaatcacctgttctttgtacgggatggtcacattcagcccaatcagctccggattgccggcaatgatatccggaaaccacgaaatcgattcgatttcaaaattgttgtaagccgcatcaattttctctgtttcaaatttttcggtaaaatgctttttcgaaaacgagtgggtgagcggatatccaataagtccgtattgtttcatgtatataaattttcaatcttgtctctaaatatttcgtaatcaatatattgtttcaatctacttttgcaacgacatggaattcgtcccgataaatcggggctcatttcattgctgttatttttatccgggcaaaaatacaagctaaaccaatatttgcaagtggttgggcaaaagaaagctgcttaacgtaactcagcatgtacgtaactcagctggtgactttaagtcacctgttgagtttctgctcatttgcaatgaaatgcgatttcaatatgaagtaatatcatttttgtgtgctgtaatggctgtcgatgttcggaaactgttatcagataccgtaatcagtgtaatctgtgactctgaaaggtttaaaaacgattctgaagcgttaaaaagtaattctgaagtgttaagtaacgattatgaatggctaaaaagtaattctaaagtgttaggtaacgattatgaatggctaaaaagtaattctgaagagttaagtaacgattctgaaaggttaaaaagtaattctgaagtattaagtaacgattatgaatggctaaaaagtaattctgaaaggtttaaaaacgattctgaagcattaaaaagtaattctgaagtgttaagtaacaattctgaaaggttaaaaagtaattctaaagtattaagtaacgattctgagaggacaaaaagtagttctaaaggagagtattcacgaaaaatcaaaggtgccaatgtgagggtgtgagagtgttcgaaaaactgaattttttacaggcgttttttattgttgttaaacacaaaatgacctttgtttttttaaacaattgtttttatttttgagggaaaccatttgaaatataacagattgggtttttagaacaaaaatcagcactaagccaaacattaaaaatcgggtacaaatgaactcaaacccacaacgaagttttaaaaagattgtttctgagacaaattcgccccctgttttttctgaaaattacttaaaagtaattgttcccgaaaatctgaattttcttataaataaaagaccccacggagtacgcgaggtcgagaaatttcttcggcttatagccttattgtgaaaagtctttcaaattgtataggaacaaatataaacttataaatcaaaaatacaaaatcatgccaaaaactttcaccctagatttaggaactgcttcaataggtttttctttaagagatacagaaaatgggaatacatttgttgatcaattaaccaattttggttctgttatttttaagactactgtcaataaggatggtaaaggcaattataaatcgcttgctacgaatagaagggaaaagcgttctcctcgacggctatatcaggcacggaaatatcgaatatgggagacattgaaagttttgatagatcctgtaaataaaaataagaaagatgaagagatagatttggataaagcaggtatttattgtccattaactatgcgagaactaaaccgttggcgaaaatatgataaagcaaacggtttgaaacgtcaatatcctgttgatgttttaaattttgaacagtgggtgcgtttagactttgatggaaatgaaatagccgattattcaagtccataccaactccgggcagaacttgcaactacacaattggacttttctttggaaataaaccgatataaattaggccgcgcattgtatcatattgcacaacggcgtggattcaaaagcagcaaaggagaaactcttaaagaacaagaagaagccataaaagaaagtgctgacaccacagttgatttggaaaatgtgtcactaaaaaaatcagaagaaaaaaaatccaaagatttaattacttatatgattgaaagcaaattgccaaccataggctgtgcatttgcaaaattagaaaatgaaaaagttgatttagcaggcaatccagttcctcgtatccgcgcaagtatttaccaagctatacgttcccaatacaaagaagaaatcaagtatatttttgattttcaaaatggattagatatcaatagtagcttttttaatggtatttacagtgacagaaaagatggcagcattttttataaacgcccattacattcacaaaaaagttcagtgggaaagtgtactttagagattaaaacaataaacaaaaatggtaaggagattacaattggaaaaccacgctgcccaattagtcatcctgagtttgaaaaattccgagcttttagctttatcaacaatattcaataccgcaaaacgacaattgacgaatggggaaatttaactcccgaacaaaaactcaaactctacaaggagaaatttctgcttgcaaaacccaattttaagttcgaggaaattcgcaaatggattgaaaaagaaattggaaagcctttatcgaaggaacaaaaagtagctgacagtactataaattatagcgacaaaacaaatgtttcaggttgtccgatatccggcaggttaaaaaatttattgggagataattgggagaaatttgtttatgagacttctgaaaaaagaaacgataagtacggcaaagagcatattataacatactcatcggaagacatctggcatatctgcttttcatttgacgacgaagaagctgttgctgaattcgctaaaacaaaactaaaatttgacgataaaaaagcaaaagaccttgtaaatctatgggtcgctattccgcaagggtatagcatgttgagtttgaaagctattcgaaatataaatcagttcctagtgccaaaaattgacaataaattgtataaaggctttatttataccgaatcagcattgttgggaaaacttcctgaaataatgggagatgaattgtggaaagaaaatgagaatgaaatattagagtctattagtgattggattgatacaaacagagaagagaaacgtattcttaatattgcgaatagcttaatcgcaaattataaatcgttggaatataatgaagaattaggctttgacgaacaatttgcaagaaaaaaccctgaatataaattaatgaattctgattttagagaagttgaacaatacactattgaggcttttggcaatgaaacctggaacaaaatcgatgataaggaatttattttaggtcaagtagctgaaaaatatcagacgttttttgctcacaacgataaagaaaggattttttacaaattgcctaaactaggggatacacttaaattgtatttgtctaataattttcctttattacaatgcgaaaatcaacagattgaccctgaaacaaaattgccttgccaatgtcctgcttgtaaaaagttgaacaaactttaccatccgtcaatacttgagttttacaaaccagccaaagaacaagagtttgaatacgatggcattctgttatcgagaaagttattagaaagtcccgtcattggtgcgtttaaaaatccgatggcaatgcgaaccttacatgaactccgcaaacttgttaactactttattaaggaagggataattgatgaagaaacacgaattgtagtggaaacggctcgtgatttgaacgatgccaatatgcgttgggcaattgaggcataccaaagagaacgagaggaagaaaacaaggaatttgaatctgccatacaagaactcaaaaatagcaatagagaagttaataatgatgatattgacaaagctcgccttcttgttgaacaaataggtgagacacaagatcaagaaatttttgaattaaaaaaaataatacgtgatatttataaaaagaaaaaagaacgcactgaagcacaaaaaaagttattgcaaaaatatcgcctttggttagaacagggaatgcaatgtatttatacggggaaaatcattaatataaataacttgtttgacgaaaatttaacagattttgaacataccattccacgaagcttatcttttgataattctttggctaatctaacaatttgcgactcttactacaatcgccaggtaaagaaaaatcgtatcccgacacagctcgaaaactatgacgaaaatgccactataaacggtcaagtatattctgcaattaaaccccgtttggaaaagtgggaacagaaagttgaacagcttagaaacaatgttgagttttgggttcaaaaatccaaacaagcacaacccggcgacacaaaggattatgccattcgccaaaagcatttatggaaaatggaattggactattggcaagacaaattagcccgcttcacgatgaccgaagtaacgaaaggatttaaacatagccaactgaatgatacccgactgattacaaaatatgcttatcattatttgaagtcagtattcagtaaagtagaagtacaaaagggaagtgtgacagcagatttccgaaaaatgttaggagttcaatcggtagatgaaaagaaaagtcgggataaacattcacaccatgccatcgatgcggctattctttcactgattcctgttgctgcaaaacgcgacaaaatgttggaactgttttataagattcaggaagaaaagaaattaaatcgaaacactgaagatttagaacaagccttacaaaaagaaatcagaacttgtcaaattggtaaagtttccaacttagcccagaacattgaagagaatattctaatcaatcatatttcaaatgatcaaacattaacaccagccaaaaggaaaaaaaggcaaggagggaaagtggtatggttaagagatgaaaatgggataatcataagagatgtgaatggaaaaggaatttcaaagtatttggtaaaaggtgatagcattagaggacagctacataaagatactttttatggcaaaataagattggttttaagagatgtaaatggcaaaccattgagaaataaaaatggaagttggaagtttcaaacagataaagatgaatttgcattcgtaaaaagaattccaattgctgatttaacttcattggaacaaattttaaatcctgaattgaaaaacaatattcaaaatcaattaaatggaagaacattaagtaaagccattgaagatggattgttcatgtttgataaaagagggagaaaagtcaataaaatcagacacataagaataaaaacatctatatcgaaccctatttctgtaaaaaaacatatctatttatcgacaaaggagtacaaacaggatttttatgcggaaaatgcggaaaacactctttatgctttatattgggacgggaagaatgaccttaaaggatttgattgcagaaatttatttgatgttgcaataattcttagaaccactaattcaaaagtaatagaagacttttttgagccggaaaaactgattggaaggggaaacaacaaaatacttgttccattatatactgttttaaaacctgggacaaaagtaattttttatgagaaaagcaaagaagagttgaaaacattatcaaatactgaactatccccaaggatttacaaaatgaaccgaatttttagctcagaggatggaagaatacaattttatcaccatttagatgcgagagatgataaacaattattaaaagattttcctgaaaaagcaatttggtttgatgggaaacctattgggaaaaggcaaaagaatggggttgctaaatttactacgaggtttattgcaccgcgattattaatcgcaccatcgaatttcaattttattgttgaagaaaaagattttgaaatgaaattagatggaatgataagatttaagttttagcattcaataatgctgttattttgtcatcagccatacttgttctaattctgccaacaaattttaattgagggatttgccggtgcaggtgctgttattttttatcttcttgttgttatttcgccagcttttaccaagttcaaaactttggaaaagttatactactaaaattaaactaaaatttaaaaaagatagctcgaagtttgcgatggaaaaattacagccgggaatatcataccatattttcaaccatgccaacggattcgaaaatgtgttttgtaacgatggcaacttctggttttttcgcgataaataccggaaatacatttcgcccatcgccgaaacgtatgcgtattgccttatgcccaaccattttcacctggttgtcagaattcgcaaacgcgaagtaattgaagaagtaatccggaataaatcgaacttaaattcttcaaatccagataacttttcaaatccagataacttttccaaagtttcgaactttggaaaagttgagtttggaaaaattataaatcaggacgaaatcgaaaaatttctgtcgaaacaatttgccaacctgtttagcgcttacacgcaggcatttaataaggtaaattaccgcaaggggtcgttgtttatcaaaaactttaaacgcgaacccatcgccagcaaagagcattttatcagggcggtggtttatgtgcaccgaaacccggttcatcacggtttttgcgcggatatgaagactggccgtacagttcgtattatggaattttaaacaacgacgaccttggcgttgaaaacgaaaaagtgttgactgtttttggcggaaatgaaaattttaaaactacccatgctgacgctttaaaatcattgcctccaaacctgtttgaagtaccttaaaacccaataaaaatgattaaaagaaccctctttttcagcaaccccgcctacctcagtaaaaaggaccagcaacttaaagtggttgaaccccgcacaaataccgaaaaagcatcggtgccgctcgaagacattgccgttgtaatacttgagcatccgcaaattacgattacacaggcgctgctggccgatctgattgatcgcaacgtagcttttatcagttgcgacagccgccatctgcctgcagggttgatgttgccattggccggaaacacagtgcaaactgagcggttcaaattgcaaattgaagctaccgaacccttgctgaaaaatctttgggcgcaaactgtaaaagccaaaattgaaaaccaggcagctttgttgcagcaggttggtaaggaaaacaagcaattactggcgcttgctccgcaaattaagtcgggtgaccccgataatatcgaaggccgtgctgcctcggtttattggaaaaaactatttcaggaacatgagtttacccgaaaccggtttggcactgaacccaacagtcagcttaattattgttatgcgattctgcgcgctattgttgcgcgtgcattggtgagtagcggcatgttaccgacactcggaatttttcaccggaacaaatacaacgcttattgtctggccgatgatattatggaaccttatcgtccgttttgcgatgagctggtgtataaaatgtttgtttccggtgagattgaagatgaaaacattacccgtgagcaaaaaataaaaatgttggggattgccacctgcgatgttttaatcgacggaaataaaagtccgctgatggtggccatgagccgcactaccaattcgttatacgaatgttttgaaggcgtacgccggaaaattatttatcccggattttatgccgctgataaaaacagataagttatgtcgtcgtttgaagcgctgaatcaataccggattatgtgggtgcttgtatttttcgatatcccggtggaaaccaaaaagcaacggaaagttgccgcgcaattccgcaaagaacttgtaaaagatggtttttccatgttccagttttcgatatacctgcgcaattgtcctagtcgcgaaaatgccgaagtacatgtaaaacgggtaaaaaatatgctccccgaattcgggcatgtgggcattttgcaaattaccgacaaacaatttggtatgatggaactctttcttagccggaaaccaacccaaaaacccgaaaccgtacagcaacttgaactgttttaaaattgtaacagaaaattcttccggcatcatgctattccgataattatcgggattatttctacatcttttccgaataatacagattttgaaatcggtcgtgataatagttcactttactttttatggagttataaattctctttttgtaggaataaactaaaaaagcagggcattacccctgctttttttaattctgacaactcgtgaaattcattgatttgttgtgacttatacggcatacgttgtcaatgaacccgataaaaatacaaattgaaagcaattcacaacggagtttttagctatctgaatcaacctgtagttgtcaatgaacccgataaannnnnnnnnnnnnnnnnnnnnnnnnnnnnnnnnnnnnnnnnnnnnnnnnnnnnnnnnnnnnnnnnnnnnnnnnnnnnnnnnnnnnnnnnnnnnnnnnnnnnnnnnnnnnnnnnnnnnnnnnnnnnnnnnnnnnnnnnnnnnntacaaattgaaagcaattcacaacatggaaatgggtgccgaatgccgctgcaccgttgtcaatgaacccgataaaaatacaaattgaaagcaattcacaaccttctgttaccgttgttactttgttgatttgttgtcaatgaacccgataaaa

SEQ ID NO: 3286 - DNA, 14725 bp, synthetic construct
  source 1..14725: mol_type = other DNA
  misc_feature 1..14725: note = Synthetic
tatttcgtccgacatttgtttctctttcgtccgacaattgtcggacgaaagagaaacaaatgtcggacgaaatattattggcatacaaagatatagtttttagagatatggggaatagttttggggagagaatttattagttgatagaaaaataaatataaatacgagaaatattttacaatatataaaaatgttgtaaatttgagaaaaagaaaagctccacggagtacgcggagctaagatttcttcggcttatagccttattgtgaaaagtctttcactttaagtatcttgagtacaaagataataaagaataaaatagtaacaaaataaaaataagaaaatcacatggcaaatgttttaggacttgatttagggacagcttctatcggctatagtttacgtgataccgataaaggagcaaatattacagaacaattagtaagattcggttctattatttttcagaaaggggttggaaacagtaaaaccggagaattttcgtatgcggcagaacggacaaaacaccgttcttcgagacggctttatcaagctcgaaaatatcgtatttgggaaacacttgcggtacttattgaatttggtttttgtccactatctaacgaagatttggataagtggaggatatatgataaagcaaagaaattgaaacgtcagtatccgattgacgctattaagtttgaacaatgggtaaggttggactttgatggagacgggaaacctgattatttaagtccttaccagttgcgggaagagttggcaatcgtgcaattggatttttcacaagagattaatcgctttaagctggggcgtgctttgtatcatatagctcaacggcgtggttttaaaagcagcaaaggagaaaccttgaaggaacaggaagatgctgtaaaagacaatgcggttgatgaaataaacttggaatctgtttcattgaaaaagtcggaagaaaaaaaatctaaggatttgaccacatatatggaagagaatgctctatatactgtgggttgtgctttttcccaattagaaagagaaggtattcgagtgcgagcaagtaaatatcaggctgtgcgctctcaatataaagcagagataaaatatatattcgaatttcaaaatggattggacataaacggagatttttataaacgtatatatagtgacagaaaaagtgggtgcatcttttataaacggccgttacgttcacaaaagggattagtgggaaagtgtacgttggaaccggcaaaacctcgctgcccggttagtcatcctgaatttgagaaattccgtgcatttgctttcattaataatattcaatacagaaggactattgatgaggaatggcaaaatctcaccattgaacaaaagttgaaactttataatgagaagtttcttcagataaaagcaagttttaagtttgaagttattcgtaaatggattgagaaagaaattggaatgttgcaagactgccacatgtctaaggaaaagaaaaccattaattatagtgatagaactaatgtctcgggttgtcctgtttccgggcggttgaagagtctttttggtgaagaatgggaagaatataagtatcagtctgataaaatacgaaaggataaaaagggcaaagaacatattgtttcctactcaatagaagatatatggcatgtttgtttttcatatgatgatgaagaggtcgtagcggaatttgccaaatcattgggattagatgataaacaagtaaggcagtttctgaatctttggattgcaatacctcagggatattcaatgttgagtataaaagctattcgtaacataaataattttttggtaccgaagaaaggtaatcctttatacaaaggttacatatatatagaagccgcattgcttgctaaaatccctgaaatcgcaggacaaagattatgggaagacaacgaaaagagtatcttggagtctattaatggatgggtaagccgaaaccgagaagaaaaacgtattctgaatattgtcaataatttgatttctgcttataaatcgttggaatacaatgagcagtttgcttataaaaatgtagagtatcaattggatgactcagataaaaaagagattgagaaatatgtaatagaagcatttggagagaaatcatgggaaaaggaaacgcaagaagcaaaaggtaaagtattaaaagatgttgagaatttgtatcagcgatttttttctacatccaaacgtgattattttcatttgccaaaattgggagatacgataaaactgtatctgtctaataatttccctgacctatattgtgctaatggttttgttgaacctcaaacaggtttgcagtgtcattgtgctgcttgtaagaaattggggaaattatatcatccgtcaatggttgaattttataaaccggtcgatgaacaagagtttgagtataatggtgtcatgttgtcgaaaaagttattgggaagtccggtaataggtgcgtttaaaaatccaatggctatgcgcactctgcaccagttacgcaatcttattaattatttcattaaagaagggctcgtcgaagaagatacgaggattgttgttgaaacagcccgtgatttgaacgatgttaatatgcgatgggctattgaagaataccaacgtgaaagagaaaaggaaaataaggcgataattgaagccatcaaagggctaaaaggtgaagagaaaagtgatgatgatatagaaaaagcacgcctgcttattgaacagaatcctgaatacttattcgataaaaagcgatatgaagtagaaactgaagacgatacaaacaacaagaaaaagaagaaaataatagggaagactaaggatttcctatataagaaagatgttacaaagtaccgtttgtggttagaacaagggatgcaatgcatctatacaggtaaaaccattagtatttctgaattatttgatgaaaataaaactgattttgaacatactatacccaggagtaagtcctttgatgactcattggcaaatttgacggtatgtgacgcttattacaatcgtcatataaaaaagaacaagataccgacagagctgcctgggtataaagaagaaatagaacctcgcttgcaaccttggagaaataaaatagagcaactgagaaataatgtggaattttggaaacagaagtcaaagcaggctcagactaaagatctaaaagataaagctatacggcaaaagcatttatggcagatggaattggactattggcaagacaaactgtcacgttttactatgacagaagtgaccgatggattcaaacatagtcaactgaatgatacaaggctgattactaagtatgcttatcattatttgaaatctgtattcagtaaagtcgaagttcaaaaaggcttggtaacagctaacttccgcaagatacttggggtacagtctgttgatgagaaaaagagtcgcgataaacattcacatcatgctattgatgctacaattctttcattaatacctgtggctgctaaacgagatagaatgctggagctgttttataagaaacaggaagataaaaaactcggtttaaacatagaatatttggagaatgaattgcaaagagaagttcgctcttgccgaatagggaatatttcttctttatctgattatatcgaggagaatattttaattaatcatatttcaaaggatcagaccttggttccggcaaaacgaaaaatgaggaaaagagggaaagttgtttggcagagagatgaaaatggacaaatttgtgtggataaggatggaaataaaataccaaaacattggattaagggcgattgcattagaggaaagttacatggggattctttttatggtgctattaagcaatccaagaagaaagatgaaaaagattatttaacttcatataaagatatctcgtatgttattcggagagaattgaaatataagaaaacacctacagataatggatttaaggacttagatgatttacatatatctattgttgacgaacacttatttcatataatcaagcggcaatgcgatgggaagtcttttaaagaggcatgcgatgagggcttttatatgctgaatagggatggagataaggtgaataaaatcagacatataaggtgctatacctctatgcaaaatcctttaaccgttaagccacaatcatatctgtctgataaggaatacaagcagtattattatgctgagatgggtgatttgtatgcgatgtgtaaatattctaatgcagacaaaacaaaggtacgatatgaagtgataagtttatttgatataagtgagaatagaaaatatggttatgacatagcagaagtcttggaagatgataagaaaaaagaaaagtattatttggaggctatattacaagctggtaagcaagtaatactctataaagatagtaatgaacttgcaggtattatggagatgtctaatgataagttgtcggataggctatatgttattcttggttttgagaatccttctagaataaaattgaaaaaacatatatgcgcaaagcctgatagtgaattaggaaagggggaatctataaagtcgtttgatgctttgccggaaaaaataaggcagggtattaatgttacaaattgtcttttagaggatattgatttttatatatctccggatggcttgataacatttaaaaatcgtttataatatttgctaatgaatatgtggaattagacttctactgatagtgtgaaccctacagactatttgaaaaaaatgagaaaacgagatgatgcattggctatttacctggggacaaattgtccccaggtagaaatgatgacggaaacgggaaaaagaaagaaaacattggcggcaaatgtacaagctttgtttcgcattattcaatctattccttcttctaaagctgagcctttcaaactttggttagcgcaagtaggatatgaacgtgtactagaaattgaaaatccggaattagcccaagagcgtatgaacgaactttatgagcaaaaaggatatccaaaggattggattgataaacgtttgaggggtattgctattcgtcagagtttgacagatgaatggaaggaaaggggaattaccgagaagagtgattatgccattcttacgtctgaaatttctaaggctacattgggactgactccttccgactataagatatataagggtttgacaaagaaaaaccagaatctccgtgatcatatgtctgatttagagttaatcttcactatgcttggagaacgtgttacgaccgaaatttctcagaaagaaaagccggatacatttacaaaaagtaagcaagtggcacagcgtggtggaaatgttgcaggtgtagctcgtgaacaggctgaaaagagctggaagtattatttctcctgataattttttatcagattctgatggaaaagatgacattttgcaaatgccttttgaagaaaatgatgaataaataatctataagtctaaatattatgattaagaaaacactttatttcggaaaccctgtttatctatctttgaaaaatgctcagctggtaattaaattgcctgagattgtcaaaagtactgctttgcctgaagacttcaagcagaaatctgagataaataaaccgatagaggatatcggagtggtggtgctggataataagcagattactattacttcgggagcactggaagctttgcttgaaaataattgtgcaatcataacatgtgatagtaaaagtatgccggttggtttaatgcttcctttatatgggaatacgacacaaaacgaacggtttcgacagcaacttgatgcttctctgccattgatgaaacaactttggcagcaaacgataaaagcaaaaatcgagaatcaagcagtggtgttgaatgaatgtacaggagaagaaataaaatgtatgaaaatatgggctgcggatgtgaaaagtggagattctgataatttggaggcccgcgctgcagcatattactggaagaatttgttcaagatagaaggatttacaagagatagagagggcattccgcctaataatctgttgaattacggatatgctattttacgcgcagtggttgctcgtagtttagttgtcagtggacttttgcctactttaggtatacatcatcataatcgttataatgcttattgtttggcagatgatataatggaaccatatcgtccgtatgtagataaattagtatatagtataattcgaaagggatgtaattatactgacttaactaaagatttgaaagcacaattgcttactattcccacattggaaactaatatttcaggaaagcgtagcccgttgatggtagctgtaagccagactacagcttctctttacaaatgttttgatggtgaattgcgtagaatatcctatccaaagatgtaatggatcgatttagtgaatatcgtattatgtgggtacttgtactgtttgatttgcctactgagaccaaaaaggataagaaggcatatgcagattttaggaagaatctgcaaaaagatggatttacgatgtttcagttttctatatatgtccgtcattgtgcaagtagcgaaaatgcagcggtacatataaaaagagttaaatcttttctaccggaacatggaaatgttggaatcatgtgcattacggataaacaatttggaaatattgaacttttctatggaaagaaaacaatggatgtgaatactcctgggcaacagttggagttgttctgaaaagaaaatcccaccatctggtgggattttctcttggaaacaacctcctttttttatttctaaatagtgatgtaactatttgaatatgagtcgataaatgataatgagttgtttctaatggttcaaagatactaaaatgaaagcaaatcacaacccttcgcgatggtaacctcacacgcagaggttgtttctaatggttcaaagatactaaaatgaaagcaaatcacaactcagcgcggggaacgccgacagacgggacggttgtttctaatggttcaaagatactaaaatgaaagcaaatcacaactacgggctatgcttttggcggaattcggcgttgtttctaatggttcaaagatactaaaatgaaagcaaatcacaaccttctgctgcagaattaatattctctcaagttgtttctaatggttcaaagatactaaaatgaaagcaaatcacaacatctcccgtaacagtattagtatgagctagttgtttctaatggttcaaagatactaaaatgaaagcaaatcacaacagggggtccccgtggagtgggaaaggggtgttgtttctaatggttcaaagatactaaaatgaaagcaaatcacaactcttcgttagcacggttttccatcgtggatgttgtttctaatggttcaaagatactaaaatgaaagcaaatcacaacctttcctcgccgaagggggaatgttccggcgttgtttctaatggttcaaagatactaaaatgaaagcaaatcacaacgcattcgctccgctgaagtggaattcgggagttgtttctaatggttcaaagatactaaaatgaaagcaaatcacaacttaccaccttcgtgtttacaacacaccagagttgtttctaatggttcaaagatactaaaatgaaagcaaatcacaacaagctctgattgactccaacaagaacctttgttgtttctaatggttcaaagatactaaaatgaaagcaaatcacaactactttactacaatccggtcaggtgaaaaggttgtttctaatggttcaaagatactaaaatgaaagcaaatcacaacgttacccacgccggctgtttaattgttattgttgtttctaatggttcaaagatactaaaatgaaagcaaatcacaactaacggcaactggtggaaatgggacaccacgttgtttctaatggttcaaagatactaaaatgaaagcaaatcacaacccttaaagcaggattcgctacagattacgggttgttctcaatgattcaaagataatcaaataaaagcaaatcacaacctgggaatgggattctttctcatcaaaaaacaaaatcttatattttccgatactcctttcaattccttatctttgtaccttctttgaaatataatctgattgtgaataataaaagaatgaacataaaacaacgcatccaattgctcttgtctgaaatgaatcgtggagtatatgagaaagaagctgaaataggactgtctttgctggctgctttggcaggcgaaagcatattgctgctgggccctcccggtgtagccaagtcgatggtggctcgacggttgaaagaagcttttgtgggtgcaagggcgtttgaatatctgatgtcccgtttctctacgccggatgagatttttggtccggtgagtattagcagactgaaggaatcggataagtatgagcgggcgatagaaggatacttgcctacagcggatgttgtatttctggatgaaatatggaaagccgggccggctatacaaaatacgttgctgacggtaatcaatgaaaaactgttcagaaatggagaccgggagctaagactccctttgaaattgctggtggcagccagtaatgaactgcctacacaaggagaagggttggaagcattgtgggatcgttttttgatccgtatcgtcagtacatgcatacagcaggaggaagcattctacaaaatgctgttggatgattgtgacgagcggaataccgtcgatcggcaaaacgtccatgcttccgaatggcagatctctaatgaagaatacgacgaatggcaaaaagaaataagcaaaataacagtaccttccgaagtcttgtcctgtatcaccaccattcgtcagaacctgacaaaggtggatatgcaagaatccgaactgcatcgcaacgtctatgtgagtgaccgccgttggaagaatattgtacgattactgaagacctctgctttcgtacacggacgtacggaagtcaacatcaccgatatgcttcctatctaccattgcctgtggagtgagccggatgagtgtgccgagatccgccggattgtcatccgctctttgtttgccctttatgtaaaagatattgctgccatcacctcatctttgaaatccgatttaaaagtcagtcgcgttcgcgaggcgctggacagagcgcggctgaatggagaccgacgggatgatgacttgttgataacagatcatttctattatcaggtagagaaccatggaacgggaaatacctacatctttattgtggactataaaaacatgaaagagtataacgccaaggatgctccagccatgggagtgatgtacacagatccgttgaatccgaagcgtacaatcatccgcgccttctcggacatcagccagatgaaagaagagggagctgaacgcattactctttaccgggacgacagacatctttatatcaatggcgtacgtttcccgatgaggcgcctgaagaagggagaagaacagcaattgtggtttggtaacttgtccattaccgaccgagactatgaggcagagttggaagccgttaccgggaagataaaccggctggtacaggacttatcggaaaacatcttcgcttcccgtaccgatgtggcaagcatagtgcaatatgtagccactatccggaaagaaatagcctgggcgagagttgatgtgcgcaaactatgctacggtgatgagtaacagcagatacgatgctgccttctatgtacaggcactggataagttcgtaaagaccggagaatgtgcagcggacagcaaggagccgctgtatgcctatctgctgtctgtgatgaacgaaccgatgattaaaatccaggtcctgagcgacgacatctgtgcccgtattttttacgacaccatgattcaatttatccaattgaatctggaaaaggagaaatataacttgcagaagagccagtcggagcggaatgaaatgaagcttgtactggaatggtcgataaagaagcggaaagacggttggcaggcattgatgcaacaaatctcagataagtatcaggagtatggtttcgaccagcgcttttatagaagccagtttggtactgaaggcaagtatgccgatgatgaagtttgggagaagatggtggacgactgggaagaggcttttcagcagaagatgcaggaccagaaagaaaaggaaatagaattccgtaaagatgccttggaacgcaggctccgttccaatctgaaagacattccggagtatatccggcagaaacagatcgacaaagacgagttcttccaggcatggggactgatgagcggcatgtggaatacggtggatttcgagcgtataaggaaaatagtccgcattcaaagggagcatcctgagattgtgaaggtggcgaataagatggggcgcattgccgacgatgaagggcaggaccagatatacgtttccgagggcgatgtatacaaactggaacacgcttccaaatgcgatattttgggtatcaccgtaggtaatgacctcaacgccctgctgcccatcgaactggcacattgtgccgatagcgaattggaagatttgtttgtctacaaatacctgacccgtaagcttcagacatttcgctataagtctgaaataatgcagcccgccagacgtctggaaactaaacctgcccgacagaagggaccgatgattgtctgcctggacacttccggcagcatgggcggaaagccggagaagattgcccattccttgctcattaagctgctggaaatagccgacaggcagcagcgggactgctttctgatagctttctccgtctctattcacccgattgatgtccggaaagagcgggcgcgtctgctcgaattcttttcaaggacggcctgcggagatacggatgccacacgcatgatggaagctacattccgtttactgcaatccaggaaggaatatatgaatgcggatgttctgtgggtcagcgatttcaagataccccatgtcccgactgcccttactgacaaaattagggaataccgggaggcagatacacacttctacggtttgcagataggcattgcagagaatgaatgggcgcctttcttcgaccgcattttcaaagctgaatatactccctcccggcgttattgatcagaaactcagattgacccctcccatgaaagttgctttcggcatggggaatcctgcattgatttcataacgttgtgccagcatgttctcacctctgacgaagaggttggccatgctgcacaaacgatagccggcgcggaggttccaaagcacgaaactttcctgcttctcctggtctttagtaaccgaggtgtacaggtcctttacgtattgtactccggttgagagggtccaacggccttttgtatagtctgcgcctgcatagagtttatgttccggggcggcaaggacgggattctccatgtgcagccagctataattggcattgatccgccaatgagggttgatacggtagccgatgttggcttcggcaccccaattctctatttcaccggagttgacattcttgcgaagcgtcgggtctgtcataatgatattgtctccgttgatataatataagtttattccgtaagacaaggcgccctccagtaatcgctgtgaaaaggaaagctcataattcatcagactctccggttgcaaatcggggttctgcggcgggaacatgtacatctcgcggatagtggggttacggaaacctttgctcaccattgctttcatctccgcgctttggggcaggtgaaaggccaggcctccttggggaatccattccgtgcccacgtgcgagtggtagtctacacggatgccggcatccagtgacagccagctgttgatgtcctggcggaagtcgatatatcccgcaaattcatccatttgtttgtcaacgcccggctcatgctcgccggtagccaggaccttattccacgattcgccgccgaagtgctggtagtcgaaacctgcggtcaggcggttgccgttgaaaagcgtggcgctttgataccatgagaggcccagcatctggtctttggagttgaagtgggatgtttggggttcgcctccgggtttgtatccgtcgttgatattatggcgtccccagttatagaagaagctcagggcgccggaggttttttcgtaatggttttccagcgcaaacgaagtcatgcctcgtgtgatgcgcgaatcgttgtctatgagcggggctgaaaccggaccggggttggaggcgttgaaatgagtgatattcacatcgccccacagtttccaggtatcggcgaggtcgtatcccagcttcacgtagccgccgtattgctcgaactccatgtcgtcacgatgcccgtcggtccggttgtacgaaccggtgactacgctgctgaaacgtcctttctttacgcggttggaaacctcggtctgcaaggtgttgtacgagccgtagcccacttgcgcgtctgtctttacgccgtcttcctgcatcttgcgggtgacaaggttgatgacgccgcccatggcattcgacccgtaaagtacggatgcagggccacgcagcacttccacgcggtcggtcatcatggtctggtaggcatcggcgatggggtgtcccatcagtcccatgtattgcgggtgtccgtctatcaacaccagtaatcctgccgtgggactgccgcccacaccccgcaggctcatgccgccggcagcaccggttgacacgccgtagcccatgatgccgcggcttgtgacaaagagtccgggaacttcttcggtcagcgtaggcaggacggaaggctggtagctttgttccagttgtttgcgtcctacgatggaaatggtcatcggcagatgccggatatcggtttcatttcgggttccggttactacgacctcgtctatggtgaggcttcttgctatttgtatactgtctttagtagtttgcgctaatcccgccgtagcgcaaagactggctacggcgagaagtaatacagattcttttttcatgttttggggttattttaaaattttccgttcaaagtgcgatgttattttagcgtgagttcgatataagaaatttagttcgtttctgataggttatgggcaagagtatctcaaactcctccgcctgaaaggggaggtgcccgtagggcggaggggtcttacatccgcagggacttatgtattgcagagtctctctgtattgcaaagttactctctgcttatgtaagaccccctcccccctacggggtactccccctttcaggcgggagagtttgagatactcatgtttatcatttcaattcatttctatcatcggatatgagagcggctcatatccgactttcatgcctccgctcgcgggcggaacctcgaaactgccgcgtttctgcctccgcctgcgggcggaaccttgaaacgcccgcgttttgcccctccgcctgcgggcggaacctcgaaacgcccgcgttttgctcctccgtatgcgtacggagccttgaaacgcccgcgttttgcccctccgcctgcgtacggagccttgaaacgcccgcgttttgcccctccgcctgcgtacggagccttgaaacgcccgcgttttgcctctccgtatgcgtacggagcctcgaaacgcccgcgttttgcccttccgtatgcgtacggagcctcgaaacgcccccggttcgccgctcttatatcgaacgttgttttatcagagtttttcttgtttcaaatcttctacaaaccggtctatttcctgtagctttttcgggatgtctatgttctgcggacagtgtggattgcactggttgcagcctgtgcagtggcttgcctgccggagcttcggcacactgcggtcgtagccgatgaggaaagcacgacgggcttcgcgatagttctcgtcctgactgcttttgggcacattgccctcgttgacgcagcggttgtagtgcagcaagatggcaggaatatccagtccgtaggggcagggcatgcagtatttgcagtcgttgcacggaacggtgggatattgcagcatccgctgtgcggtgtcttccagcagggcaagttcttcttctgtgcagggctccagcggagagtaggtgcggaggttgtcttgcagatgctccatgtacgtcatgccgcttagtacggtcagcacatcggggaagctgccggcatagcggaaggcccaggaggctacgctgttttgcgggcgatgctgtttcagacggcctaccaggtgatcgttcagtctggagaggcgcccgcccagcagcggctccatgatgacggcgggaataccgcgcttcaccagttcgttgtacaggtattcggcatcggtattgcggtcgttcatctccttggcatgcttccagtctacgtagttgagctgtatctgcacaaaatcccatttgtactcgtcgtgtttggacagcaggtagtcgaagacttcgacgtcgccgtggtaggagaagccgaggttacggatgcgtccggcttcgcgctctttcagcagaaagtccagcatgccgttgtccaggtagcgggcgtggagcgcatccatgccgccggaaccgatgctgtgcagtagcatgtagtcgatatagtctacttgcaattcttt

SEQ ID NO: 3287 - DNA, 8230 bp, synthetic construct
  source 1..8230: mol_type = other DNA
  misc_feature 1..8230: note = Synthetic
ctgtaggcatcacgctcgtttcggtatccctgtttgattgcgctgttcagtggcgaaagtccctgattgaccagtttaaacttcatccggtgcgccaactgtttctccgtctttggatcattggatatggggagagaccgaaccacctgggtaccatttcttacgtatgtcactatcggacctattttgccgctgagccctccgagaatagaatctttaaatcgtgccattgtattcaaaattaataagtgcgtatatcattgatttaaaaagggtaattgctctattcttgtttctgtatgtgcaataataaaaaataaacatccttatcgataatcttgttggttgtaatttttgaatagaattttgtttttgtaaaaattatatttagttttggatgtttaataggagtgcatccatgtaccagattttataatcgttattgttaccagagaatccgtcagattcattgacaatcacttgcatggaaatctctttttattcttggctggattatgtgagacaaagtaaatatataaaataaattaaattattttttttgacacaacttgtcaaattggcccttttactttgtcctttattctttgttgtcatgagattcagactttctttaaaccgtactacaaagcaacgcatgttgcccatggattatcagtactatatcagtgcctggatttataaggtgttgaaacaggcagatgaaaattttgccctttttcttcatgaaaaaggttatgggaagaatgatcccaaattgtacaaactattttgcttttcacccttaaattttgggaaacctatcctgtggaaagaaaagaagtcagtttttaagcagaacaagataagttaccggtttacctttctcccgaggattccaaaggggaaaaattccaagctgttcttctctactaacccggaaatgagcgggaaggatgtcatagagtattaccgcaaccgatttcaaatcgaatttcgtttcagggatgtcaaaggcttcaccggactaatgcaatcccaggcaagggacgtagcaaagctatcgttcaactttaatgcatctcttacctcactcaacctgacaaacgtgctatcaaaaggaagaggcatccccttttcggtggcctcatgtaaaacgttgatacacaacgattgtctgtttgaacgatttatttgcgtgtctggaattaaaccggacagaagattaaatgaaaaacttgttaaagaactccttgagttcgtagccattgctgcttgactctattaaatgatttttttagtaataacttgttaactaaaaatattaattctaaatttgctagctaagggattacataataaaaaaatcccacggaagtacgtgggactaagaaatcttcggcttatagccttattgtgaaaagtctctcaaaagaatgtattttttcaggttcaaaagtaagcaaaatattaatatacacaaaataataacgataaatttatggctaaaacttttagtttagatttaggaacggcatcgatcggctatacgattagaaatactgacaatgggagtgagctaattgaacaattggataattttgggtccattattttcaagaaaggagttggtaatagtcaaaccggtgaattttcatatgcagctgaaagaactaagcatcgttcttcccgacgactttatcaagtaaggaggtacagaatttgggaaacactaagggtgttgatagaatatggtttctgtcctttgtccatggagcatttggataaatggaggaaatatgacaaagaaaaaggattgaaacgtcaatatccaattgatgctttggaatttgaacaatgggtgcggttagattttgatggggatgataagccggattattctagtccgtatcaattacgatcagaattagcaacgacgcaattggattttacgaaagaaatcaataagtacaagttaggtcgtgcattgtatcatattgcgcaaaggcgaggttttaaaagcagtaaaggtgaaacactcaaagaacaggaagacgtaataaaagatatcagcaatccgatagaattggatatcactaccctaaaaaaatcagaaggtataaggtccaaagatttaatgacgtatatgtcggagcataatatgaaaactgttggctgtgctttagctaaattggaaaatgaaggagtcagagttcgcgcaagcatttatcaggcagttcgatcgcaatataaagaagaggtaaagtatatttttggttttcagaatggtttggatattaatagcgatttttttcacaaaatatacagcgacagaaaagacggtagtatattttataaacgtcccttgcgttctcaaaaaggattggttggtaaatgtacgttagaaccgataaaacctcgttgtcctataagtcatcctgaatttgaaaaatttcgtgcattttcttttatcaacaatattcagtacagaagttacacgaatgatgaatggaaggatttaacagttgagcaaaaaattaaactctacgatgaaagatttttactgacaagatcaaattttaaatttgaagaaatccgccaatggcttgaaaaagaaattgggaaaccgttatcaaaagaacagaaagcttgtgatagtactataaactacagtgacaaaaccaatgttgcaggctgtccagttacaggaagattgaaaaacttacttggcgatgattggcgaaattttgagtatattacttcggagaaaagaaaagataaaaatggtaaggaacacaccatagtatattcaatggaggatatctggcatatttgtttttcgtttgacgatgaggaacttgttacagaatttgcaaaaacaaaacttaattataacgataaacaaatcaaatcattcgtaaatctttggattgccattccacaaggatatagtttgttgagtctgaaagcaatacgtaatatcaatcaatttttagaaccaaaggctgaaaatgaattatataaaggttttatttataccgaatcagcattattggggaaaattccagaaattttaggtgaagatatatggaaagaaaatgaaaaggatattttgagatccattagcagtttgattaatgaaaatagagaagagaagcgaattttgaatatagtcaataatttaatttctgcctataaatctttagaacacgaagaacaatttgcctataaaaataatgaatatcaattagatgaactcgatttgaaagatattgagatgtatacgcgggattcatttggagaaaattcttgggaaaaggaaactcaagaaaataaaaataaaatcttggaacaggttgctgataaataccaacaatttttttccacctcccgacgtgattattttcatttaccaaaatcgggagaaacactgaaaacttatctttctaataattttcagactttacattgtgataacaattttgtcaatcctcaaaacgaagatttaccttgcagatgcgatgcctgcaaaaaattgaataaactttaccacccctcaatggtagagttttataaacctgcgaaaacagacaaagacgtcggattaaaacttttggaaagccctgttattggcgcattcaaaaatccaatggcaatgcgtacgttacaccaacttcgcaaacttgtaaatcatttcataaacgaggggataattgacgaagaaactcgtattgttgttgaaacagcacgtgatttgaatgatgccaatatgcgttgggcaatagataaatatcaaagagagcgggaaatagaaaataaggagattgcaaaagccattaaagaacttcgaggcgaagagcgcaatgacgatgatatagataaagcgagattactaatcgaccaaaatcctgactatctttttgataaagttcgctatgatgcagaaaaagaagaggaagatagcggtaacaagaaaaagaagaaattcatcggaaaaacaaaagacttccaatacaaaaaagatataacaaaatacaaattatggttggaacaaggaatggaatgcctttatactggaaaaatcatcaacatctctaacttgtttgatgaaaatgcaacagactttgaacacaccattccacgaagccaaacttttgataattcgttggcaaatcttacaatctgcgattattattacaatcgacatatcaagaaaaatcgtattccaactcaattggaaaattatgataaagaagtagttatcaatggacaatcgtactctgccattaaaccccgcttagagaaatgggaacaaaaagtggagcaactaaaaaataatgttgaattttggagatacaaatcaaagcaagcgcaaaccaaagaaaataaggacgatgctattcgccaaaaaaatgtatggcaaatggaattggattattggcgagataagttaagccgttttacaatgacagaagtaacaagcggatttaagcacagccaattgaatgatacccgattaattacaaaatacgcttaccactatttgaagtcagtattcaataaagtggaagtacaaaagggaagtgtaaccgccgattttagaaagatgcttggcgtgcagtcggttgaagaaaagaaaagtcgcgataaacattcgcatcatgccattgatgcagcagtcctttcgttaattcctgttgcagccaaacgcgacaaaatgcttgaattattctataaaattcaagaagagaataagttaaatcgaaatacagatgttttggagcaagaattacagaaggaaatcagaacttgtcaaattaaaaatgtttccaatttggcgcaatatatcgaggaaaatattcttattaatcacatcgccaaagatcaaacactaacacctgccaaacgtaaagcaaggaaaagaggaaaagttataggaataaaagatgagaatgggaaatatttattggacgacaaaggtgaaaaaataccaaaatattggataaaaggagactgcattagaggacagttgcacggtgatactttttatggggcaattacacaaggaaaaaaagatgaaaatggctgtttattgagagatgaaaacggcaaaataatatcggatgaacaaattttttatgttgttcgccgagaactcaaatttaaaaagaacgaccaagataaaggatttaagactttggacgaattaaaaatcagtattgttgataagagtttatttgaaattattgaaaaacaatgtgagggaaaaaccttcaaggatgcctgtgaagaaggtttttggatgattgacaaaaaaggaaatagagttaatcgaataaggcatattagatgctatacttccatcaaaaatcccttatctatcaaaaaacaaacttatttgtcagataaagaatataaacagacttattattcggaaaatgctgaaaatactttatatgctttgtactgggatggaaagaataaagaaaaaggatttgaatgtaggaacttatttgatgttgcattaatcttaaagacaaataatccgaaaacggtcaacgatttttttgaaccaaacaaacagattggtcgaggtagaaacaaaattgatatcccattatatgcaattttaaagccagaaacaaaagttattttttttggaaaagataaagaagaattaaaagaattatccaataatgaactatcaaaaagaatttacaaaatgaatagaatctttagttcagaggatggacgaatacagttttatcatcatttagatgcaagagatgataaaaaattgttagcagatttccctgaaaagacaatttggtttgatggaaagccaactggaaaaaggcaaaaaaacggattcgctaaattcagccccgattttgtagctcctcgtttgttactagcaccttccaattttaatttcattatcgaaggcaaagatttcgaaatgaatttggacggaacaatgacttttaaatactaacagccatgtctaagacccggttaaaaaaagaattccaacgcctccccaaagaacaattggtagatcaaatttcggatttgtacaataaaaacaaatctgtgaaagagtcttccgatttttatctcaatccgaaaaataaaaaggtcttggctgaaaagttcaaaaagcttatccgcagtgagtttaatgtggaatatcctgaatgcggcgggagaaattttgccaaacgcgctatttcagatttccgcaattttgcaaccttcaatcgaagaattagccgatatgatgctgtatttgtcaaagaacgcatacgagccgacgttttgttacggagactattggaaaccaatggaatatatcgacgccttttttagggttatatggttcaaatgttgtgaccaaataagagttctcgcgcaacgtaccatttgaatggctgtgcgatactgtgaaacagcacctgctattcaaatttgtaccgcttacggatggaacgaagacagcatgttttgtgatcgatatgcaaaagaaaatatgaaaacgtgtgaagattttgaagattacaataccatgtctgtggttaattctcctcgtaggggcgttcgagcttacgaatgttgtgttgtcgataaggagcggggtggtatatttatgaaaaagaaacagttatgattaaacgtacgctttacttcggaaatccggcctatttatcccttcggaaagaacaattggttattcaattgccggaagtagtgaaaaacgaaacactgcccgaaacatttaaagatgatgcagtgaaaactgttcccatagaagatatcggcgtggtgattttggataacaagcaaataaccattacacatggcgtcattgaaaaactattggacaacaacgtcgcactcattacctgcgacagtagccggatgcctgtaggtttgatgttacccctgtcctacaacacgactcaaacagagcgatttaaacatcaactggaagcatccgttccgttaaaaaaaaatttgtggcaattaaccgttcaggcaaagatacaaaatcaggctcatttgcttcattcggctaccggcgaggtggtaaagaatatgcaaatatgggcttcggaagtaaaaagcggcgatccagataactatgaagcacgtgccgccgtatattactgggcaaatatctttccgcagacacccggattttccaggaaccgggacggcattccgcccaacaacttattgaattacggatatgccgtcttaagggcggttgttgcacgttcattggttgccagcgggctgctccctactttgggtattcatcatcggaacaaatataacgcttattgtctggctgatgatgtaatggagccttatcggccgttcgtggataaactgattatcgagctaatgcaaaaaacagacgatttatcagaaataactaaagacgtgaaagccgaactattgaatgttccggttctggatgttatcattaacggacaaaggagtcctcttatggttgcagtaggcatgacaaccgcttcactgtataagtgttttgctggtgaagtcaggaaaatcaaatatccttcgtttgaataaaagactctataacttatgcaacgttttagcgaatacagaattatgtgggtacttgtactttttgatctccctacacagacaaagaaagaacgtaaaatctatacaacttttcgagacaaactcatcaaagacggatttaccatgtttcagttctccatctatttacgacattgcgccagtcgtgaaaacgctgatgtgcatattcagcgcgtgaaaaacaatcttccgcccaacgggcagatcggtattctgtgcattaccgataaacaattcggcaacatggaattgtttatcgggaaaaaggaaaaagaagtaaccgtgccttaccagcaattagaactgttttagaaaacagaaatcctgcagttaaagcaggatttcatgttcggaacaacatctttttttaattgcaattttcgttgtaaataacttataaataacggaatatacagattcggttgttccagataccaaaggtactaacttttgagagcaagtcacaaccggaggagggtgatagtaatgcgtgtgctggttgttccagataccaaaggtactaacttttgagagcaagtcacaactgggactgaccggaacgccatcaccgaacgttgttccagataccaaaggtact

SEQ ID NO: 3288 - DNA, 8148 bp, synthetic construct
  source 1..8148: mol_type = other DNA
  misc_feature 1..8148: note = Synthetic
cttggcggcgatggcgtcggcggtcatcagctccgcatcgtccacgccctccggcagcggctcgttctggtattcggcgaagaacgcggcctcgctgcgcaggcgcaggttcatcgcgtgctggacggcggagagttcatcggggttgtagcgggccggccaggcgactaccgcgccggcatccatcgcctcgcgatgctggcggtggaactcggtggcctcgtgtccgtcgccatcgttgcggaggctgtcggagcgcaagccggcgtattccgcccatagcttggtgtcggtcgggaaggcgtagaccatcttggtgcgctcgccttgccattcggggtgcttctcgcggtcgaggatggtgtcggccaggtcccccttgcggatgacggtgcagggcatgacggcggcgattcgtcgccccggttctgcgaggttgaggatcgcaccattgatgacgctgagacactcatgcacctgactgggcgaacgagccgactggtcggtctgggggtcgtcgatgatcaccagcgtcggacgtatcgatactccgtccggccggacgtgcatcgccccgcgcacgttgcccggcaaccccgccgtgcggaccagcgcaccagcgcaccggctgccggggatggtgggcaggacgatctggtccgccgtccagccgatgtgcgtcagccggccgtagcagcgctggccgggcgtcgcgccagggctggcgttgcacgaacaccaaagctacatacaggagtcaaccgcccaaccggttctcgaagtcgcgtcatgaaacagacctgcgggcaattccgtaggacgggtagtcgtgccgggaaaaaaccttgacttcgccaggtcggggcgctagataataggcgccctgatgttccggtctgccgttgagaatctcacccgcagcggccatatgccggcgcgcgcgatgttcgcgcgatggacggtgccgttgctcctcgcggcgttcggctggtatgtgccgagccacggcgccgggcattttgagcgcttcaatgccgccggacacgagcacgggaccggctgcactttgtgcatgctggcggcgacgatgtcggcttctgcccctgccgactgtgtgcccgtgcccggtctggtgcccgagcgggccgcgccggatgagccgcagagcatcgtggcggtccggactttcgatcagtattatagacgcggtcctcctcccgcctgagatgtcccatcgcaatcgtatcgcaattggtctgcgctgatggtctgcgcccgcagcaggcctggggcgtgcgcttcggtgtgcacgcgccggccggtttccggcgctattcggcatcgcgggaggccgaccatgtatcgccgtcgagggtttacgctggtcgagctgctggtggttatcggcatcatagcactgctgatatctgtgctgatgcccgctctgtcgcgtgcgcgtcagcacgccgacgcggtcaaatgtctggcccacatgcgcaatctggccgcggccgccgtcatgtatgccaacgaaaacaagggttttctcatacaggcggggctcggacacggcgggtctcatcagcacgacgatgtcgcctggttcaacactcttcagcgctactaccagaacaaactggtagcgcgctgcccggccgacacgtcgatctactgggacacgccggagccgtcttcgaaccagttgcgtaagaccagctacggaatcaaccctttccttgaccgcgacctgtgccccgtgtgggccggcgggccgtatctcaaggtaacgcaggtgaagaacccctgggcggtggtgcagtttctggagatggcttatacgggaacttttgctgtttccgaccatccgcatccggacatgtggaccccggaggctgacgcgccgcttctggccgcgcagcaggtccagaccaacgctcacggagggcgatggggcaccgctgacgcccgtgccaactgggcgtttctcgatggccatgtcgaaacacgcagttttcgacaggttttccgcaatatcggagcaagtttgaacacgtggaattgttttgacccgcgcgtggccagataggccccgcggtcggtgtttttcgtgagagggctttaacatgaaattcagattcgcattgtttgttatgtgtgtgctggcggcgctcgtgccggcggcgttcgccgacgagcatgcgcatttcgacgtctccccggtactgatagacgggaagatcgccaccgagggcatcacccacatggtggggggccagcgctggtggtcgccggcgcgacgggtgttcgagtatgagttcggcgaaaacccgctgttccccagacgctctgaccacccgggcatcaaccgcgaaccgggcacggtggcgctcgacccggatggcaacagcgtcgtgctcggcagtacgggtctgccggccggatcgatcctctatatcaccttcaccgacgacctgcgctactggacgggcgacggtttcgggcctgtgcccggcggcgaaacgctcacgttcaccttcggcgacacgcgcacggtcggaacgggcaccggccggcttgatccgctgccgatacatcttttcggccccgattcgcttcactatcacctggttgcaacgctgtatggcccgcccggcaatccgtcttcaccggctccaggcgtgtatctggtgagcgccgtgctcgaaagcagcagcccaggcgtggagcaatccgacacgttctggatggtgtacggctatcaggcttcggaagaagaccaccaggccgccgccgcatgggtcgaggccaatttggtgcccgagcccgggattgtcgccaccatatggtttctgggcatgttcatgctgcggcggcgcggaaggtgaccgctgaacgcagcatgagtatgcgctggccgctcgcattgcccgagggccgggcgctcgtccgccggccgtggtccgaagcgttctgccgaggccacggccggctgactatctgaaaacagcacggaaagccgggcggggcgaacgaagccccgtcactccgtggtcgcccatggcatatcggggcaagtgcgcgcaaaaaaagacgccctttttttgtgcgggcgtcttcaaggtcgcctcgagggcgtagccttgcgcggggcgaaagccaccgcattactgtgacttgcgggacaatcgccgctcggatacactgacctctgtataaagctgtgggccctgcttgtcaaggggtaggcgtatgttttcacgcgcaaattctgtttcggataacgattgctcgtcggtcaacgcccctgccgcaccgcgcgatacggcttcggaggcacagccccagccgtcgcaaccatctgccggaacgaatgttccgtatgttctcggccttgatatcggtgcaacgtcggtgggatgggccgtgctcgacctcgatgcgcagggcgagccgtgctgcgttcgcgccatgggcgcgaggtgcttcgaggccagcgttgacggcgacatagaacacggaaaagattcatcgcgcgccgtcgcgcgtcgtcaggcccgcatggcacggcgcatattgcggcggcgggcgcggcggttgaagaaggtcttccatcttctccagcgtcacgggcttctgccggccgggccatcgcgcacgcccgaagaacgccatcgacttctggcagatctggaccgccagctttttccgaagtatgcgccgggcggcgaccgggttgcggcacacgtcgtctgctaccgtctgcgggcggcggcgctcgacagggctctggaagatcatgagctgggcagagcgctgtatcatctggcccagcgcaggggtttcctttcgaatcgccgcgacgatcgcagggcctcggaaaagggggaaaaaagccaggacaccaaagtgattgagaaggagatcgcaagcctcaaggagcagattaccgcctccggcgcgcgcactctcggtgaatacctctcgcggatagatcccgaacagcagcgcatccgcaaacgctggacctcgcgccagatgtacatcgacgagttcgaggcaatctggagcgcccaatctcaacatcggcccggccggcttaccgaagcgctcaagcgcgaactccgccaagccatctttcatcagcggccgctcaaaccgcagacccagcttatcggccgttgcgaactcgagccgcctcgccacccgggagcgctgcctccacgccgcgcgccgctggcccttcccgtggcgcagcgcttccggcttcttcaaaaggtcaacgatttacaggtgatagagccggatggccgcatcaggccgcttaccgccgaggaacgtaacaagcttcttcaggcgctctccgagcaggccaggatggagtttgacgatgttcgcaaactgcttggcctgtccgctccgcgcaagcgcaaggacaaggccacagggcagcaaatctgcacacccgggcacaggttcaatcttgaggaaggcggcgaaacaagcatccccggcgataccaccactgcccggctgttgcccgtactgggcgataaatggcgcaccatgcctgaaccgctgcgcgaatccctggtacgcgatctgctggacttcaactatccggccgcgctggcggagcacctccagcgcgtacaccgcttcgatcgccacgaagccgaggccctgtccgaaataagcctcgaggacggctacgccccgtattgccgcatggcgctgcgcaaactggttgcccgcatggagaacggcactccgttcgcaacggcgagaaaactcgaatatccgcagagcttcgccgcgaaaccgccgtgcgagctcctgccgcccgtgcgcagggccgttcccgaccttcgcaatccggccgtcatacgcgctctgaccgaggtgcgccgggtggtcaacgccctcatccgtcgctggggcaagccggagatcatacgggtggagctcgcccgcgatctgaaaaagcctcgcaaggaacgcgaaaaagcatggaaaggcaatcgcgagagagaaaaggaaagaaaggcagccgcggacagactgttgaaagaggccggcatcacgaaccccagccccgccgacatcgaaaaggtgcttctgatggaggagtgcggaggcatatgtccgtataccggccgcccgatcacgattccggctttgtttggcgacagcccccagttcgacgtggaacacataattccattctccgtgtcgctcgatgacagcttcgtaaataagacgctgtgctggcacgaggagaaccgtcatcacaagcgcaacaagaccccctacgaggcatacagcggcaacagggagagatatgaggagattcttcggcgcgtaagtcgtttctcgggcaggttccggaaggaaaaactcaggcgattccagatgacgctcgcggatgtcaaagccgaatacggcgatgattttaccgcccgccatctcaccgatacccgctatgcatccaggctcgccgcggattatctggggctgctttatggcggcacggttgacgccgccggccgccggcgtgttcagacatccagcggaacggcgacgtggtatcttcgctctgaatgggatatgaatgctgtcatcccgggtctttccggcagcccgacgggcagtgcttcggggacttttatcgagaaggtgcgtaccgaccatcgccaccatgccatcgacgccgtcgctatagccctcacttcggcgcgggtagtcaagatgcttgccgacgcggcgcgcaatcccgaacagcatcgccgccggcgattcgctcctgtgccgcctccctggccgaactttaaagacgaagtgagtgcggccgcagaaaagataatcgtctcccatcgtgtcgatcgccgcgttgccgggccgcttcatgccgaaaccaactacagcccgccgattgttcatgaaaaccgggagtaccgccaccggcgcgttcctctgtccagtatcacaagatctcagatcgcgcagatcgtggatgacgtcatccgccagctcgtcgagcagaaggtcggcagcgccggcgacccggcgaaggttttttccgatccccgcaacctgcccgtgctcaggagccgcgacggtacgcgctgcataccgatcaagaaagtgcgcgtgcgcgaacacgtcgcggcaacaacggtcggcgccggcccgcgccagcgccacgtggtatcgggcaaggatactctccatcataccgtgatagtcgcgcgacagacgcccagcggcgaggtctgggaagacaatcctgtggaccgtctcgaggtgcatcgccgcctgcgcaacggccaaccggtaatccagacagactggggatccgatgcccgctacgttttccatctgtgcaagaacgactgcatagagatggacgtagagagcggcaacccctcggccggtcggcagatttatgtggtgagaagcatttcgaagcgcgatatcgccgtgcggctccattacgacgcaagaacccttgaacagatagtcagggcgaaggagcggggtaagttccgcatcagttcggcagatctgctgcgccgacggaacgcccgtaaggtgatggtctcgcctctcggggaggttctgccctgtcgtgagtgattacatcctggacgtatcggaaagcgccgctgttctgaacgttgacctcgcgtgcctgcggcttgaaaccgctgccgggcactgtgcgcgcataccgccgcgcgagattgcggccgtggtgctgtgtcatccgcagattaccatcagccgtgccgcgctggccgccctggcaaatgccggggcgggcgtggtcgtgtgcgacgagaagcgccgccccgtgggcatgtttctgcccctgggcggctaccacgcaccggcccgcagattcgccgctcaggccgccgccagcctgcccctgcgcaagcgcctctggcgccagataatcgctgcgaaaatccgcgctcagggaacgctgctggcggagctgcacgggaacgattgcggcctgctggaaatggcgcgcggcgtcaggtccggcgacaccaccaacctcgaagcgcaggccgcccgaatctactggtcggctctgttcgaagaaccggggttccaccgcgacttcgagtctccgggctataacgccgcactgaactacggctacgccgtactgcgcgcgctggtcggacgcgcactgtgcgccgcaggccttcatccgggtctcggcatccaccatagacatcgcgagaacccttattgcctcgccgacgacgtcatggaaccgttccgccccgtggtcgatcgcgccgttgccctgttcggtcgcgatcacggcgaaccgacacagcttgatccgcccacgaagagaatgcttgcagcaccgatgacgggtacctgccgctatgaagtcgacggcgcacgtcgcacgctgatggacatcgtcagtcgcgtcagtctttctctggctgcggttttcgagaagcgcagccggaccttgtggctgccgccgctcgggcacccgatagagtctgaaaactgcgcactgccggaggaggcgtaatcaatggcgttaaggcgcaaccttccctcggagtatcaggctatgtggctctttgcgatgttcgacctgcccgtgctgacctcgcaacagcggcggaattacgcgcagttccgcaaggcgctgctgaagcatggctttttcaagatccagtactccgtctacgcgcgctactgctccagcgaggaaagcgccagcacgcacattgcgatggtgtcgccggcgctgccgccggaaggacaagtgcggtttctgcttgttacggagcgccagttcgggaagatggtggttatcacgcggggaaaaccgtcgaaacctgaaaaggcgccgcgtcaattacagcttttctgatggccggaaacgccgtaaccgccgtttacgacggcggttacgggccagacaagtgtatccgagcggcgatttcccgcaagccacagcgagcaattcacgggcacgcgcactccggcgagtgtatccgagcggcgatttcccgcaagccacagcgccatgtcgcgcggtctgtgcagcgcgcacagtgtatccgagcggcgatttcccgcaagccacagctcccatggcacccg

SEQ ID NO: 3289 - DNA, 23219 bp, synthetic construct
  source 1..23219: mol_type = other DNA
  misc_feature 1..23219: note = Synthetic
ttaaccactatctgggaagattcagtacgagctacacacacttttttaagtgatgcggatattaactttttcaaaccgaaaataatgaatgagtatctatatgcggtaaaactgttcgcatataaagacgaagctgaaaatatttgcggttttataggaattgatgaaaatagagtggaaatgctttttattcattctaaatattttaaaaaaggtataggaaaaagacttttggagtatgccattaaaagttacggtattaatgaactagacgtaaatgaacaaaatgaagatgcagtagctttttataatcattttgggtttaaagttataggtcgaagtcaaacagatgagtttggaaaaccttttccacttttgcatatggaattaaaatagaagtataaaaggaacttcaattgcaaataaaagagtggaagaagagtataaataatttatagataatcttttttaatctattacagtgtcaaatagttacagtttttctcttttttctttaatattataaataaataaaaataatttattaaatcaaaactttattaaaagttttaatttagtagaatgaaataattttttaatctatttttataggaaatctctatgcaaataaaaactcttaaaaactattttcgtatttcaatggttggtataacattttctctgtttttagtattttatcttttctcttcgtatattcatacaaatttggcaattagtgaaaatcagaaaatatcagaagctttatccaagcaggtttttaattcaatgtatcaagttatgagacaaggatggagcagagaacagcttcaggagtttgtaaatgttacaaaagactcttttcaaggaagttcgtacagcgtcgatatttttagatggaaaaaggttgaagagttatttggaaaaatagaacaatcacctattacaaacgatgttcaaaaggtatttgagagtaaacaaaagttttttgaaacagataaaaagtctatgaaaagcgtaatgcccataattgcaaaaaacgaatgtctaaaatgtcatacaaattcaaaaacaggtgatatcttaggcgcagtaaaagttgattacaactttgaagagattgtctctagtactcaaaataaatatcttcttttctctttgattattctacctcttatgtttttgattgcttattatatctctcttaaaatattaaaaagaataaatctggcaatagaaaattttaaagaaaaaattgaaagtgttaattctgtcaaagagtttaaaaatatagatactacgcatgttgaaaagagtttcaacgagtttgaacaaattatggaaggtttagatactttaagcaaaaaattaaaaaatattgcagttgataagagtattttggaatttgaggtaaaacttcttgataaaatggttattacttccgatattataaaagattggaaagagtatataaaagatcttttacaagagatacatatagttttacccgtttattgtttgataacaatttttaaaacagatgaagagaattatgaaatagagattttttggcttggagaacctgacgaagatattaaaaaacatatggaaaaaacttctattgatatgataaccaaatatcataatcttacggtaatagattactctataaaccacaatctctcaaacggaaaatattgtctctcttctcttactatagatgatatagaacacgaggcaaaatcaatcttgctcgatactccaagaatagggggaatcgtaggattgggaattcagtcaaatatagaaaaagattctattcattcaatagtaattgattcgattttaacaactcttttaaatctagtgggttcaataaaagctataaacaaatacacggaaaatcttgaattttatgctacaagagatcctttaaccggacttttctctcaaagagtctttagagatcttttaagttatgagataaaaagagccgcaagacataaatatcagtttggtgttcttgttattgattgtgataattttaaacctatcaatgatacttacggacacagtttcggtgatgattttctaaaagcttttgccgatcttctaaaagattcaaaaagagatgaagatattctttcacgttacggtggagatgaatttaccgtaatcttaccagaaagtaccgaacgtgaagtatataccgtagcaagcagaattttggaaaaagtaggaaactttgaattagaagcacctgatgctacaaaagtcagcttaacagtatcaatcggtatggcaatttatccaaaccactcgactcatgcaaaagagttgtttaatatagcagatacgatgatgtatcaagcaaaaaatcaagggaaaaacgcaattagatttccaagtgaatatgatattgaagagattcataaagaagtcgaagataaatcaatgatagttttagatgctattaaaaatgaaaaaatagtggctcacttccaacctattatgaatacttcggataatagtgttgaaataaatgaacttcttatgagaatagagataaaagatgaagttctaacagcaggaaaatttatagaaacagcagaatctttgggaatagttcataaaatggattatatcgtaatagaaaaagccttcaaaaaaataaatgaaacaaactatgaaggaatattatttataaatctctctccaaaagcacttataataggagaatttatagaaaaaatagtgaatttaacccataaatataatataaataaagaaaaaatagtatttgaaataacggaaagagaaacggtaaaaagtttcacccttttggaaaaatttgtaaaaaatctaaaactagaaggttttagttttgcaatcgatgatttcggttcgggtttttcaactttccattatgtaaaaagatttcctattgattatattaaaattgacggagattttataataaatttacataaagatgaaaaagatttagcttttgtaaaatcaattgttgctttagcaaaagagttaaaagtaaaaacaatagcagagtttgtagaagatgaagagatcttgaaatttttaaaagagattgatgttacttatgcacaaggattttatataggaaaaccctctcctgaactttcggttaggaaataaagtggaaataacaattttcaaagatgaaaatattccttttttaatctgcttgtcatgaaaacaatttatttatagttagcctaagattaattttgataatctatatcaaaaatacttaggtgcattgatgttaaaatattacaatgaacttctatattttgcccaaaaattagtcggtgataaagaaaaagcaaaagatattatacaagaaacttacagtaaagttttagaaactcaaaataaaagagaaataaaaaatcaaagagcatatttatataaagtagcaaaaaatgtagctgtagatgaagcaatacaaaatcaaaaattacaaactgccgtttatgaagagagtgagcatcttactcaaaaacatgaacaacccgaagagatagcaataaaacaaaatcaagaagaactttttatgcaaatagtaaacaaattaccaaaaagagcaagagaagcttttattttgtatacgattgacgaatacagtagaaaagagattggcaagattatggatataacttcaaatgctgttgaaaagcttataaaaagagcaactttaaaaatcgaagaagaacttgcaaaaaagggattttaagtgaataatgataaaaagatgaaagaacaagcagtttattggctaagctgtgaaaaagaagggtttacagagtcccggaaattagaatttgaaaactggcttaaagagaatccttctcatcaaaaagtatataatagaatgaaatttatacataaaataccaaaatctctatcagaaaaaaacagagaagatttaagtcaaaaagttcataaagagcttagtaaaacaaaactctctttaaaaataaaatattattactcaggtgcagcagttttgattttaattctatttttctctttgtttaaaacttatgataataactctttgcagtatgaaaaaatatatgtaactgatgttaaaaatctttcaaaacagagtttgcctgatgggtctatcatttcacttgatgctaaaacgaatctaaatatagagttttataaaaatagaagagaagcttttttaacaaacggtaaagttatattcagcatagcaaaagataaaagcagaccttttgtcatatcaagtgataatattcaaatagaagtagtaggaacaaaatttgaagttataaatctagataataaaataacaataaatgtgcaggaaggaagagtaaaaacatatcatttaaataagaacaaaaaaagagaaaatacaataatccttacaaaagcagatactataacttatacaaataaaggagaagtaaataattattcaaagattaatcctgaaaaaatagcaatctggcaagatgatttgataaactttaatcaagtaacattaaaagaagcctttactgagtttgcaaaatatacaaaccatacttttgaattttcatcaaatgagataaaaaattatttggtcacaggagagtttaaatcaaatcagctggatatatttttaaatacaattataaaaatctacccaataaaaatagaaaaaaaagataaaacaataaaaatcataaaaaaatagaaaattaatgtccgtttttttataatttctcagtcttatattaaaaatgattatcaagattgtttttaaagaataaggagaaattaaatgagttcacttaaaataaaatttttaagtccgattgctgcaatgacactttgcataaatctttatgcaaatgagataagctatacaattaaaagccaatctttaaaagaagctatagaagtaatctcaaaaaaatcaaaaataccatatattgtaaatggaaaacttcttgagaataaaacttcaaaagcagtaaaagatataaaaggtacaaaaaatgccttaaatcaaattttggaaaacagcggcttagaagcagagatagaagatggtgcaattataataaaagaaaaaaagccagagaataaaagtaaaaatgatttagggaaagtggatattttagccaatgaaaatgacggctctgttgaaacaggatacttggtaaaagagttaaaacaagtaggtccttggggtgcaaaatcacttcaagatactccttattctatgagtgtaatgtcaagtgattttatttcaaatatcttgtcaagcgaaattgatcaattatataaaatgaatccccttattgatactggtgttacaatgaattattatggagctccaactgtaaatataagaggatttacttcgagaaatgtagcttttgatggaatgagtttatctgctgatttagctgggagtttagaagaagttgaaagagtagaaataatgaatggccttacgggatttatgtatggctctggaaatgtaggaggtcttgtaaattatgttcttaaaagacctacttataaaagacttacaaatttaacggtaggtaattatggaggggattcatattttgcccatttagatgtaggaaataagatagatgaagagggtaaattcgcttttagaataaatgcttcttttcaagatggaaaaactatttatgaaaatcaaaatattgaaaaaggcttaattagcggtgctttagattggaatataagtgataatttaatacttcaacttgatgcttcccatagacattatcgagtaaatagacctagattggcctttcaaggtatggcaagattatttaaagttccaaatgcggattcttttgatacagataaaatttatggaccatcttggtcgtattctgaaactgatacagataaatatggggtaaattttacttacaatataaatgaaaattttactttaagatcaagatatttacataaagtagatgatttacaatattcaggggcttatcctaccctttcaaatgatggaacttatggctattatatttatgcaactgcgccaagagaaattatttcagatgcaggatatatttatttagatagcaaatttgatacaggatatataaaacataaattaacattaggtgtttcgggggatttcaataaaaataaatggtatacaaatgataccgtaacatcctggccatcaggattaacttatgatgagtcaatgtcatatcctgaagtggaagctccttctaatggacataagtatacaaaagagaaatcaagaaatataaatattattttaggagatgacatagtttttgatgaacaatggagtgctttaataggaataaattacacaacaattaaatcaaaaacatatcttgatacatctgccagtattgatggtccagaggtagataattcatatgataaatcagaagttacaccaacattatctttaatatataaaccttttaataacttgactacttatttttcttatatggaaggtttagaagaggggacaattgtaggtaattattatagtaatgttggagaagtattagaaccaatgataagtaaacaatatgaaataggtgcaaaatatacattaaatgaaaatttgcttttaagtaccgcactttttagaatagaaaaaccaaatgaattttcagatggagcaagtccccaacctaaatatgttcaggatggtgaagaagtacatcaaggtttagaattaactttaactggaaaagttactgataatttgacacttatgataggaggtactataatggatttaagtgtcgaagatgcaagttcaaaagaattagaaggtaaaaaaccaacaagacaagcttctaagatggcaagtatttatgctgagtattcaatccctggattaaaagatttaattttgacaggaggggcatattatgtgggtaaaaaatatgcaaatactgataattcactttatattccttcaactactacttttgatgcaggtttaagatataaaacaaaaatagataaatataaaactacttttaatttgaatgtgacaaatcttatggataaaaaatattgggcatctcctgaaaatttaggtgcaccaagaacaataatgtattctatgaaaatggagttttaaatataaagagacaaaagtctctttatattttttaatcttacgcatgggtttcaaaaaacatattctcccaaaatataaaactttggaacccagtcgtaagtttattatcttttaaatactaaaatataacaatttgcaatattctcaaatcaaatcttatttttatgttagagttttatagatcatctttttaaggttgagttatgaataatatattaaatagtatagtttataatgacggagagttagagttgaaagtttcagtagatatagagtaaagtctcaaaagggtgtaagatttcgtcaatgggcaacttccatactaaaaagctatattaaaaacggttatgcaataaacagtgaaaaaatcaccaatgaaagatttgtatctttagaaaatgatgtaaatatcctaaaatcacaaatggtgaaataaaattacttgtaaaaataataaacttgaaacaaagcaaggaatattttatgacgggcaaatatatgatgcctacaacttcgtattcgatctaattaaactaactaaaaatgaaataatcttaatagataattatattgatgaaactattttaatcctagatcaaaaagagatttatcatattggtgcaagtcttaaagacttaggtaaaaagtggtttgcattttcaaagatagatttagatgctaaagaacttatagcaaaattagactaagttttatttattttgcttgtcatgatacttttttgatacagacaactatgaaatttcaaaagaattatttagtttagcttaaaaatgataaagaatacagagcttataaaagatattaagagacttccacaagagtaattaaagcaaacaaaagttcaaagtagttatttttatgcagattttgtgatacatttcaaattggatatatttttaataatagtataactaaattaattcattatatatgataaagtaaaatcctttagcaaaattgtattatactaactggacaatataaagtccaaaaggtataaaatgaagaaacatgactatgataaaatactttataggctcaccactatttgggctaggttaagagagggtgagattttaagtacaaatgaactggcaattgagtttaatgtatctgcaaaaactatacaaagagattttaacgaaagactaatccatcttttccctatagaaaaaattgggcataaatggagagtaaaacaggggtatgatattgataaaactttggattatgaagatgagattgttttagatattttaaatgaatttggttcatctatgagttctttaataagtaaaagagtaaataatctttttaaaaaaatttcaaatgaacatactaatcctatatattcaagaatagaaatagaagacttgtatgataaacttgatttgataaaagctttgcaaggcgcaattgaacaaaacctgcaagtggagttttatcataaaaagaaatatagatatatagaacctataaaaataactacttttgaaggatactggtatttatatggtaaagatgtacaagtggataaactaaaaacattttatataaaagatatcagtaatctaaacactacaaataaaaagtttattgtagagccaaatgctataaaaataatagataatgctataaatatctggtttaacccacaaaataaaccctttgaagtacatctaaaagcaaatgcaaatatcgcaaaatattttataagacgtccactatctaaaactcaaagagtagtgcaattttatgatgatggctcactactgctaagtgtttatgtcacctctgagcttgaaatcttaagtgaagttaaaaaatggatacccaatctttttatcctaaaccctgcaaaaatagttaaaaaacttagagatgaaactatagagtttcaaaaaaaacagatggatttattaatagatgtataaaaacggacattaagtgttctagcaaatatcttaaactgcttttatataaaaatataaaggcttaaaaatgttttatccaaatttgatggagatgtttcatccactcattggttcaatgactttagaacaaaaaaataatttaaaaaaagacaatagcaaattttttgattctattgtagaacactttaaattgttattacaaaataaaatagataataaacatatcttagaagagatatactcttatcaagaagaatttagcttagagcagtgctattttctaacaaatataaatgatagggcaaaagcaataactcaaatatatctacactatataactacaagagttgaacctgataaattacttgggatttgtttatttgaaataatagttgcaggtacttcttatgttgatggaatatctgaaaaaattgataatctgaaaaatggtgaaaagttaaaactagatagagaaaaaaataatccatatgataaaaatgccatcaaagttttaagtaaaagaggaaaattaggatatataccaaaacaaaaaaataaggacttaatatttttgatggaacaagactacaaactttttgcaatacttaaaagagtagtttggacaaaagagagtataaaaataaaaatttatgtttattgtgaaaattgataaaggggaataagatgataaataaaatttttgattatcatgaaagtatatgtttggggaaatggacatgaagcataattggaagtggatattggatttactactttatgtttttatgatacaaattataatagatattttgtataataaaggaaattataaaaaaggttggttatgaaatatactttagggatagatattggtacttcctcattaggattaaatgtaaatgaattggatagaaacaatgattctaaaaatatattttatacagctgattatatatttggagagcctgtaataaacaataaaggtaaatatataacaaaaaacaaagaaaaaagttcaaatcaattagaacaaagacagcatgaaagacaaaatcgtagaaaaaaagctatttattatttggcaaaagatataggtataaaagaagaagatattaaggatatacaatttaatgaagatattttagagataagagcaaaagcgtacaaagaaaaaatatctttacctaaattttttgcagttatggtgaatattagtaaaaaccgtggatatagtggaagattaaaaaaagaagatagaggcttaggagagctttttgctcaaactaatgaaaagatacaagagtttaacgctaaaactataggagagcttaaatttaaacttgtaaaagagcaaggttctaaaatattgtcacatgtaaaaaagaataatgtagagggtactttttttagaagagaacagattgaagaggagtttgatcttattttacaagaacaattaaaacattattctattttaaaagaaaaaacaaaatacccatgtaaaaacgatagtgaacataatctagttatatacaaaaaactaaaagcaatcattttttttcaaagacctataaagtgggataaagatagtatcggtaattgcaatatctatgaaaatgaaaaagttgtatcaagatcgagtattttatttgaaaaatatagggctttacaattattaaataatcttgagttcaccgataatacgaaaattgatataaaagatttttcaaaagggatagatttattaaatggctttaaagaaaaaagtgtcacaaagtttttaaaagagttaggatatgagaataaaactttgaaaaataacgggaatataaaagacgaaaagataaaaggtttatatacaaataaaaaattatttgatacttttggtgaagcttgggagagactttcattaaatcaaaaagagagtgttatagattttttaagtattttatcttctggcgatgagatagagctaggagatttggaaactatttacaatgattatataaagtttgcacataaagatgaaaagataaaagagtttttggaactaaataaggataaactttcccctttaagcgagtttgatttaccaaaaggtagagctacttattctttaaaagcattaaaaaaatttattgaattttttgaaaatggtgtagttgaggggataaatgaacctgacaaaactttaagagagatagaaaagattgatgagcctaaaaaaacttttgaaaatctaaatattacaaatcctatcgttcaaagagcaattaaagaaacaatatttgaaatagataaattggttaaaatatatggtgaaccttataaaataaatattgaatttactagggatataaaaaaatcccttaaacaaagaggagaaatagaagccaaaaataataaacgatatagtgataaacaacttattaaaaaagagcttcaaaaatatgctataaagccaactagtaaaaatattcaaagatatattttatggcaacagcaaaaacatcaatgtatttatacagaaaaaacaattggcttatcagaactcactcattatgagttagagcatatagttcctgaatcaaagggtggtactagagtcatgtataatcttgtattagctgataaagaggcaaataaagataaaaacaataaaacaccatatgagtattttcatgataaagaaaattggaaatatattcaaagctatataaatcatttagaaaatattctaaaagagacaaaagatttagaggtttttattgaagggaaaaataaaataacacttgataaagaagagttaaaaaagaaattgaaacttttaaattcccaaaaaagtgcttttgaattgggtaaaagtgaatttggacaaaggagctatagcgatacaagttatatagcaaaagaggtaacacaacttctaaaagataaatatccaaatacaaaagatatcgttattacaaaagggggtattgttgcttatcttagaagcatgtggggactcaatgatattctcccttttgtaagagataaagaaaataaaccgatatatgataaagatagaaataaaatatcgtatgaagactaccaaaatgcaaaaaaagaaaatctatttgaatttgataaaagatgtgaccatagacaccatgcaatagatgcgatagtaatatctttttgtagtagaagtttgataaataaactttcagcttttcatgcaaaatatggatatcttccaaggaaaaatccaaaagaatttcataaaggtgaaaaagagctttttgctgaggtaaaaaatatatttgacaaaaatagtttttatacaaaaattcaaaatattatgagtgagatagtggtttggcataaaccagatagatatccaaaaggtgatttttttgatgaaacaatttatggtaaagataaagagggatattttacaaaaagagttaaagtagttgatttttttgatggaattacaaaagtggataaagccaaagaaaaaattgaaaaatgggtagcaaatgaagagacaaaaactgcactgttagaaaactttgaaaagtttaaagatgaaaaaagtgttaaagaaatagttttaaatttgtttaattatcaaagaaaaactcctataaaaaaaatacaaattaaatttggaaaaagagcaccacaaaaatttaatgagaaactggataaagagctaaaaaatggttatgctgtaaatagtggttatagttgtataaatattgataaaaatacttttaattatgaattaataccaaatcataaatttttaaaagtaaaagataaaaatatagtgcaactatttgcaaatgatattatttttgataaagaatccaaacaattttataaaattgtgagttttgcacaaaaagagattatcaaggctaaaaatattacagaaagtgataactttgattcgttactgaaacaagataaaggagggagatcatataaattttttggaagtacaagtttaaaaaatattgttctagtaaattcacaacctgatatagagacgattaaagagaagtacttatgaacgaatatataattgatatacaaaacccatgtaaaataaatataaaaaatggagtgttgcatatccatctttataaacaagatgctatacaaaaagtagccattatagatattgctgttttaattatctcaaacaaagaagttactataacttctttggctattgctgaattatcaaatagtagtgtgataatcatatttacagataaaaatcttttacctgtatcaatttgttcagggaaagttgtaaatacaaatggatcatatagaccatttcttcaggcaaaatatatagatacaacttattcacaaaattggcacaaacaattgatacaatcaaaagtaacatcacaagcttttatattagatatctttgcttgtaaagactcatttaaactattaaatttatcaaaaaaagtaaaagaggctgatagttcaaatattgaagctcaagcttcaagaatattttggagcaatttttttacaaattatgaaactactaccaaaagagtaaagcaaggtgcaactgatattattaatatctctttaaattacggttatacaattataagggcaatggtagcaagagcaattttttcatattccttacacagtggctttggaattattcatataagaaaggataatccatataatttagtagaagattttatagagccttttcgatttatttgtgaacaaactatttttagaatatttgataaaaaagatacaaaaaatctaatatttgataaatatattaaacaagagatcatcaatacagttttaaatgctactgtcaagatacaagataaggattacagaatattaagtgctatagataaagtaatcgtatcattttgtcaaagtttagaaactccaaataagaaactacttctaccatttatatctgataatagacaaaaacaaagtgaaaatatagaacaaaagatatatgtctaatataaaaaagaacagctttagaattatgtggataatagcagcttttgacttgccaactgatactccaaaagagagaaaagcatatcgcgagtttagaaaaaaactacttgaaaacggttttaatatgtttcagttttctatttatttaaaacatgtacctacttttgccaaagctaaagctgtcactaaaaaaatagaaaaagatatacctaaagatggaagtgtagtatttttttatcttacagataaacaatttggtatgacagataattttataggtgaaaaaaagtcaaatgatgaattgcctcaacatacgcaacttctaatgttttagaaaactcccatttagggagttttagtttacggcgttgtctcgcctatttcttataaatcttccccaagatttaatgtgttaagtaataaaagtttaacaaaaataagaacttttgtcaagctttttttcttatgaaagccttatttaagggctatattgcgagctttattctaacatattaaagcttggggaggtataagaactttctacatcatatgtattaaatttaaaatattctaacatattaaagcttggggaggtataagaacaaaatagagcgttgggaagaagatggtgtaattctaacatattaaagcttggggaggtataagaacctatctcctaactcaatcgctaagtaatctattctaacatattaaagcttggggaggtataagaaccttgtaggcttaggatactccatacctaaattctaacatattaaagcttggggaggtataagaacaaataccctttttgtataaaattttacataattctaacatattaaagcttggggaggtataagaacttggtacgttgtgcttacctcaataaactcattctaacatattaaagcttggggaggtataagaaccggtactgttctacataaattaatgttttaattctaacacattaaagcttggggaggtataagaactattttcccgagaagttgacatcgcttcagattctaacacattaaagcttggggaggtataagaacaacattttgtatttagataatccattgctattctaacacattaaagcttggggaggtataagaactatccccatcttctatcttgtaaactttaaattctaacacattaaagcttggaagagttgctatatgatatcgataaaaaataagtaaattattagatctccttgatagaatattaagagattagaaaaaaataaaataaggttatatgaactattagaactttttaagtataagaaataaatatgtttataaatgataaaacaatagatataacggtattgaagagttatatttttataaatggaaaaaaagaattataagacgtggaatcaatatatttaaatgaaaataaaacaattaatttgaaatttcaagagagtgaacaaaaagctttttatagtttttaaagtaaaataacaaaaaagtaaaaatatggcagaacaactaaaaaatgtatatacaaaacaatatcttgaagatttggctttaaagattaaaaatgaatttaaagagtttaatgaaaaagctttttgcaaagctgttttagatgatatttggcaaactttagagttaaaacagagaatgagacatattgctttatgtttagataaatttttacctttttcttataaagagcaattagatattttaaaaacagtttcaaaagattttagcggttttgaggctatgttttttcaagattttgttgaggtttttgggcttgatgattttgaaaattccataaaagctttagaagtttttactcttgattcctcttccgagtttgcgatacggcaatttattttaaaatatgaagataaaacaatggctcaaatgaaactttgggcaaaaagtgaaaatgaacatttaagaaggctctcctgtgaagggtgccgaccaagacttccttgggctgtttctttgccaagatttaaacaaaaccctataaaaattttagagataattgaagttcttaaaaatgattcttcaaagtatgtgcaaaaatctgtagctaataatctaaatgatatctcaaaagataatccgcattttgtaatagagtttgtaaaaaataatttggggaaaacaaaaagtttagattggatttgtagacatggcagcagaacacttttgaaaaaagcagataaagagattttaggattgtttggttattttgactcctcttttatagatattataaatttcaagtgtgacaaagaagtaaagatgcaagaggatttaaatttctctttcgatattattagttctaaaaatatcggtaatataagagtagagtatgctatttattataaaaaagccaatagtaaacacaataaaaaactctttatgataatgcaaaacgagataaaaacaaaacataaaacttttttaaaaaaacagagtttcagagatatgacgacaagaaaacattataaaggtgaacattttatctcaattattataaacggtgaagaaaaaattaaaaaggagtttactctttcatgacacctgcaattaatttactaaaaaaaaataaaacaaaatttgaaatacataaatatgaccatgaccctttgaatacggattttggaaaggaagcagttacaaagttggatttagatgcagatcaagtttataaaaccttattagtggaacttacacctaaagagttggttgtttgtgttgttcccgtatctaaaatgctaagtctaaaagaggttgcatctgcttttaaagctaaaaaagcagtaatggcagacaaagaagaggctcaaaaagtaacaggttatcttttaggaggaatttctcctttaggtcaaaaaaagaggttaaaaactctaattgacagcatggcttttaactttaagacaatctttataagcggcgggaaaagaggacttgacctagaactttctcctagtagtttaaaagagttattaaatgcaaaagagggcaatattagcgtttaatataaattatccctttgtatattattttaacaattttttaatcttttcagtgtagtattgttataaataaaagtttaaaggattttttatgggaactacttctgatatgaatgcaatttgttctcaacttttgactcctgaagatttaaatatttcagaagagttatttaatgaagttgttgagaatacaattgttacaaacatagcaaatagtcaagatacgaaatgtatcaaaatttattcgacataccagttgttcttatcctcaataacaccgattcttcatgatatcggttttatgattattgatgaagtaacttacaatattagcaagagttccaaacttatttatgtatcaagatttaatctgagaatcaacgataaagatgatttaaaaaagattgaacatgcaagaagaaatcttgaattgattattacaagatgtttaaaagacccttcaataaaacactcaaaagtcttttctcttgtttgcaatcaaaattttgattttagaaagttgatgcttgtaaaagcttttattgagtatttagatcaatccgtacttacgataaatagcgttagtgttttaaatactttgacttcccaccatgaaataactgatttatttgtagattatttttgtgttaaatttgatccaagagtaaaaaaaagagaagaaaaattaaaagcaataattgaagatatagaagaaaaaattaaagagattccccaaattatggatgatagaattttaaaattaactttctctttacttcaatctctgcttagaacaaactattatctaaataaagagacaatagctttgaaaatagatacgaaaaatttcggtataaatttaaaaggacttcagccgaatttggaaaatttcatttttcatccggacttttacggagttcacttaagaatgagcaatattagccgaggtggactaagatggagtgacagacatgaagattatagacaagagataaaatctttaatgataacccaagaggggaaaaactcaattattattccagatggttcaaaaggcggatttgtaataaataaagataattctcaaattacaaaagagtattttcaagagatttactctatgtatataaatgcaaatcttgatttagtagataatatggttgattcagaagtagtaagagatgaaaaaatcatagcatatgatgaagatgatccgtattttgttgttgcagcggataaaggaacagcctctatgagtgatgttgcaaatgagattgcaatcagcagaaattattggttaggtgatgcttttgccagtggaggaagcaacggctacgggcataaagatttaggaataacagcccgcggtgcaataatgtcaacaaaaagattctttatagaaaaaggcatagatatttacaaagatactatttccgtaatgggaataggttctatgagcggagatgtttttggaaacggactgattgaaacagacagatttgaacttcttggggctatcggacataaagagatttttgtagatccaaatcctgatttacaagagagttttaaagagagaaaaagactttttaactctaaaaacggcggatggagtaattacgataaatcaaaaatatcaaaaggcggtggagtctttttacgaagcgataaagagattgaactctcacctgaaatgaaaaaattgcttaataccaaacgaaaatttgtatcaggtgaagaactttgtgttttacttcttaaaatgaatgtagatttgctttttaacggaggtgtaggaacttatgttaaagcaagtgacgaaaattctatagatataggagataaacaaaacgaagcagttagaattgatgcaacggatttaaaagcaaaaatcgtatctgaaggaggaaatctaggttttacccaaagagcgagaatagagtatgctttaggcggaggtcgaataaatattgacggaatcgataatgccggcggagttgatacttccgaccatgaagtaaatctgaaaatacttcttaacacggttagttcacatgaagatctttgctccgaagagagacaaaatactttacgttctatgacggatcaagtcgtaaatttagttttagaaagtaattataatcaatctttggcaatctctttggatgaatttttctctaaaaaacatttaaacagttttatcagggctatagaagtgctggaaaaaaatgttgacgcttttaacagagcctctttttttattccaaaaaatgaaaatatacaagaagtagttgatataaacgattcaatagtaagacctgttttatgctctttattatcttattctaaaatttttattaaaaaaatacttcttgattcaaaacttattgatgaacaatttgctttgccgtatctttacagatatttcccaaaatcatttataagtgcatatgaaagggatattttaaatcatcctttaaaaagagagataatagctacaaaaatagcagatgttataatcaattctcaaggctgtacttttatcagtgattatgaaagattgggaaaagagagatttttattgaaaatccaatcttatttagtagctaaaagattattcggttcaaaaggaatacgatataaaattgcttctcaagattatattatgagtacggaaaaacagtatgaattgattaataaacttgaatatattttatctgcaagtacaagatggatggtaaaatatttgaaaaaaaatcaattagatgcagctcatattttagatcataaagatgaactattctcacttttagaacaagtgcataatcaaaaaatagaagtcttgattgaaggtgatgatagatttaatcttttcttctctgtaatcgattatctaagatttgctattcctgcaattgtaattaaaagtaatacaaaccatcaatttaaagatgttgtcgtaatattctactcattgattcatgagtttaatatattggatattattgttgcattaaataaaataaaagttgttacatcaaatgatttggttcttagaaatcaagttttacagttcatagagtttattgttgttcattatacaaagaaaattttagattttcaaagagtaaatgaagaagcagacgtagcttttgcaaactttattaataatgaaaaatcaacattttataaagtaagagatactttggatctgtttatgacaaaagagaataaagatatcaaagagattgcaataaccgttaatcaaatgatggtctctttattataaaagagtaaaatgacgttataagaaaaagttaatcaaatattaaaaaatattataactttaacttatgactattattttaagttctaattagataaagttcttaaaaaggagataacatgacaagtaatatggacgatgaattatctttagaaaaaattgacgactataatggaaaagagccaaaagaaaaaagaaaaattgtttggctggttataatattttgtttaataattggagcggtatttgctattataaaatcaacaaatcagtttgatgattatataggaacagaagaatctccaggtattgttacaacaaaaaattagcatttataaatagtgccgaatttccttattcggcacattttaaatgataaaaaaatattataatatctttttacctaagattttttttacagtttatgaacatatactttaataaagttttaggttaaattactataatcttatccgtaaaaaacctttttcacttacaaaattatatacttaaaaggtcttaattaatgagatatatttttatacagctattgttattttctctgtttctaacaggatgtgttagaaataacgaggtgcaaataaattctcctaaagtttcagctgaaacgcctgaaaagaaggaatcttctatcaaaactgatattattgaaaaaaaagatgaaattttaaaagataataaagaagaaaaaacagaagaaaacaagagtgtcgaagaaaaaaaagtcgaacccaaagttattataaaagagaagactaagattgtggttgtggaaaaacctatcagcagcgattctaaaattatagtaggttcaaacgaatatgtatatgttccctctttaaaacttacatataaagctaaaattgataccggagctacaacaacatcaattcatgctttagatattaaagagtttgaacgagacggcaaaaaatgggttaaatttaagttagacgatacaaaaggcggcttaatagaaaaatcacttccagttgaaagagtcgtaaatataaaacggcataaagaagatagtcaaaaaagatatgttgttaaaatgcgaataaatcttggaaaaacaagtgaagtcgttgaagtctctttaacggatagaagccagtttaactttcctgttttaataggaaaaaattatttaaacggctatgttattgttgatgtttctaaaaaatatttaacaaaacctaagaaaacagataaataatgcagtcaatatataaaatattaattttctcttttcttctgattgtcgcagctttctctttaatgtggtacaaaatagtctatttgggctttccactgcttcaagacaaaacagaaaatatttggaatattcaagcaaaaattacatttaacagtaaatataaacaaagcggagtagtatctttaactctaccttccaaacaaaacggatttttgattataaatgaagaatcaagttctccaaactacggttatagtgtacaaaacgtaaatgatgttagaaaaggtgtttggtcaaaaagagaacttcaaagaggttctcaggttttatactactcaatagatattataaaagatagatattcaaaagtcgatcctcaaaaagagtttgaacaaattatctaccaagaagatgtttctactccgattatggttgcgggaaaatcgatattaaacagtatttatgaaaagagtgcaaatgccactacttttacctctttattaatagatgaatttaatcaaaaagatccttctcaatcaacaaaattaatcagaaacaattttatgaaaaatgatattcaaaaaagagacactcttctaaaaatggttgattatatgggatataaagtaagaacggtcggagctttatatttagaagatagaaaaagaaatgtcgatttagttcctatgctggaagtttttgacaaaggcaaatggcagctttttgatataaacaaaggaagaatttcaaacaattcgcatatctttatctggcaaagaggttctcagtttttactagaagcagaaggtgtttcaaactcaaatgttaaattttcaattacaaaaaatattgttcctgcaagaaatgcagcgttagtaaaagatgtaaaaaatcagagtgctttactggacttttctttattcattttgccaaatgagacgcaaaatacttttaaatttttattattgattcctcttggtgctttagtcgtagtttttatgagagttttcgtgggaataaaaacctcaggaacttttatgcctatactgttatctatggcatttatagaaacagaactgcttcccgggatagttatgtttatagttgttgtaactatgggattggtagttaggtcatatctttcttatttaaaccttttgcttgttgctaggatatcttctgttttaattgtagttcttgctattatggcttttgttgcaattatgtccgaaaaactaaatttagagtatgccacaagtattacttttttccctattattattctttcttggacaattgaaagaatgtctattatttgggaagaagacggagcgaaagaggttttccagcaaggaacgggctctttgattgtttcggtgcttgcatattttgcaatgacaaaccagactcttagttttataacttttaactttcctgaagttttattggcagttttaggattaactattcttttg

SEQ ID NO: 3290 - DNA, 4388 bp, synthetic construct
  source 1..4388: mol_type = other DNA
  misc_feature 1..4388: note = Synthetic
acaacccaagttctatgtttgtgatctcgatccttggcgcttgtgcatctcttcagcgttccattcagaaagagcactgcaagcttggaatcgaggttgctaaagccaagggagtcaaatttggtaggaagccgattttcgaagagaagctgcccactttgaagagactgcttgctggtggagcatctgataaggaagcgatgacggatcttggtgtgagtcgtgggacttactacaagatgaagtcgatgcttgcagatgatcgcgttacctcgtgctagttgtcgtgttgttcaacaaggcttcggctttcacgcgaagcctatcatcgccttgctgtagaggcagccttaaaccagtgaggattgaatagtcgaaagcattcaatcttaaaaaatgctccctcggcaaatggattagccgaaggagtattaatcgccagcgaagctagctaaagtcccgaaggacactgacataccttaaaggcgcattgttggagccccggttttgcctgatctgatacaatgcaactatacctcatggaacgcaaattaatcttcggactcgatttaggattgaacaacgttgggcatgctgctgtatccattgcagatgacaatgtggagattcatcatgttggagtttatgtatttccgtctcctctggttgatgacaatgacttgaaggctggttactctgctggtcagagaggtgcacagcgacgggcacggaggactttacgcagacgcggagagcgcaagagagaaatctatttcattctctcggaatttggtttccttccgaaagatagaaaaacaagggtcaatctcctgtgtaaaaattacaacaacgacagacctttcaacccatatatcctccgcgaaaaagcgctaacgaaggaattaacaccgtatgaattcggtagggtggtaacgcatctagcaaaccatcgagggtttctcagccctcgtgctcagcggctcattggtattgccgatgatctgctggcgaactctactgacggagcagaggagacgggcaagcttctcaaccaaatcaaatccactcgcgttgctattgccgacgcaggagcaccaactgtcggagcattttatgctgagagggtcagacagaatcttctggttaggagcaagacaaagccgaatagaaaagttggtggcgagcgaaacaaagatcgagaggagcttaaacccaaggaacaaatagagcgatttgtccgaccagatcgccagatgattagagacgaattcgataaaataatcgcagttcaaaagcagtttcatccactcctcactgacgcattggttgctcgactcaggaacagcatctttaatcaactcccgattgaaggagactcggacaagcgtggagcttgtacgtttttcccaaaggaaaatcgaatgtaccgggcatctttggcagcccaaaaatttgttattgcacaaactctggcgaacctagagttattggacaaatcgggatcgagccggaagttgtcgggcgaagaaaggaagatattatgcgacgcattgcttgggggcgcggacctagagtgggcagctgcaaaagcacttttaggcttagattcttctgctacgtttagccgcgaaccaaccaagaagacaaaaggcaagctctccatgttaaaggggagcgaaacatctaagcgactccatgaccttttaggacaaagctgggagatccttgaatatgaatctcgggttgaactggtcggagacctgatcagttttgcgtcaacaagagacaactcacaagctgagcgtcggtacaaactgctccagcgaaaaacttacggatcaagtcaagtcaaatttgaactcaaaactattgctgaactcgtcaccctagaactccccaaaggaactttaaatgttagtctcaaagccgcgaggatgctgagcccccttatgcttgctggagccggttacgacgaggcgtgccttattaaggggcttaaccattcagcaccgcagggacaactacttaaggtcaagcgcctagatccgtccctcgcccaagacatacttcacccctcagttcggtcaagtgtgcaaaacgcttttcgcgttattaatgcaatgtttgacaagtatggtgtaccaaacgccatccatattgaacttcctcgtgaccttgctaaaagtttggcagaccgtctcgaagtggaaaatcaccaacgggagcgtgagaaagtaaatagttctgcgcggaaaagacttgtcgaattcggtatcaaaccaaccgcagacaatgttaaacgcgttctactttttgatgaatctgacggtggagtccttgtgtatgagccaggtcaaagaatcaaggacttagaggaactttgctcaccagacttcgagatcgaccacgttgttccacgcagtcaccaaattaccgacgcaatgtccaactttgttctctgctcagcggatgtcaatcggaggaaaagcggagcaactcctcatgagcactttggtaaagaccctgaacaatggcaaaacatccaagaaaccgttaaagctctaaagaatatgtcgcctagcaaaaaacagcgcatcttgtctttaactagaccggaaggcttccttggtcgtcatgaggcggctattggttacatctcgcgagaaattctctccgctgtaaagtctctcgaaggagatttcgatgtaattgtctctccaggtcaagcgacggggatgctgcgtcgcaagtgggggctggggaaggtgatagaacttcatccggaagaaagagaaaaactggatgcccataatcaatcagtcgatgctggaacagcatttggtgaccctcccaagctcagaagtaatttcaaacatcatgcactggatgcgcttgtggttgccctcacttcaagaagcaccttggttaaggttgtcaactactataaaaagggcgaaattactggagtcagacctcccgaaggctttccaacacctgatcgtgctttaattgccaaaaccaaagaagccctcgaacgatgccttgtcgttcacaagccaaatagaaaaactgaagggcaaattcatgagttaacggctcgaactccgccagaaggtatccctaatgcaagaccactttctgcgaaacgtttcggtagtcaattgatccgatttgatggcgacggcaaacctactcaagcttatgacctcggaaacaatcatcatctagcaatttttgaggcaacagatggctctggacgccgagtcggcgaagttcgttctctactccaagtttatgaaagacgtgcgaagaaattgcccgcaatcgacaaggagtgcgctcaacctggttatcgttttcttttttccctatgcaagggggacatggttcgaatgagtactggcgaagtaggtgtcgtcagtcaattttcggtgagaccgaagtggggcgatgttcaggtcgctatttggaaggtattcgcagcccaacagtgcggaaaactcaacctgcaaaatccttatttgattgcaaatatacaatcggcatccaagttgtcaacaattgaatctaagtgtgaatcaaaagtattgggttagatatgcggcgttccatcgttgtaacaaagccatccagaatatcacttgatcacggtcagttgagaatcgagcagggcaacactatttcgacagttcctatcgaggatcttgatattgttgtcctagaccatgcttggatcgacataacttccccagtattagggaaattgtcgtcagaaggaattgttgtcgtgttttccaacgagcaacatttaccgtgcggctaccttgtgcctttgcaaaaccatcaccttacagcccaaatcctacgtggacaaattgattcaacgctcccagctaagaagcagatttggaaggagattattgtctcaaaaatcttatctcagctccgtctgcttagagagatcaattatgaaagcagcgagttgctagatctatcgaggtcggtcaaaagtggagatcgaggcaacaatgaagggcgtgctgctgccatttatttcccaatattgttcgggaatggatttaaaagaatccagagggatgatccacatatcggaatggaatctgattttctcctgattaactcgatgctcaattatgggtattcagtgttgcgcgcaaccgtggctcgggcagttgtcgcgagtggacttaatccaacgctaggcatttttcatcaccatcggaacaatgctctcgctctagtcgatgacttgatggagccactcagagttcttgtggatcgcagagttctaaatattatcagatcatcaaattcacttactgctgaaattggggagctaacaccccaacttaagagagagagatcgg

SEQ ID NO: 3291 - DNA, 23969 bp, synthetic construct
  source 1..23969: mol_type = other DNA
  misc_feature 1..23969: note = Synthetic
gatatagctaggttctgtcatatagctaaagatgccataatgataggctgttttgtatttttccaatcctttagctgctatatattcttttattttttgagctaaagtagaaaaataatctgaaaattctttgtaattgagagtgttgtttaagtaagtgtcttctactataaatactgcttttttgtaatctaaaggcttttttccttctagcatatcagacaattgaatataagcttgttcatatttttgtttgggtgttttttctttggctgaaagggagagtgtaaaaagtaagagtagaactgagaggaggtttttcattgaataaatactatgtaataacttttttggatagttgaaattagaaaactgttttcaatggttacatttaatttgttctattttaataagagttaaataatcaaaaatctgttctaatgattctttatcccactcatctctaccttcaataactacataaatttctttattctttttaaaaaaacgtaaaacctgcctaacaataccttttgaaactgcatcaaaacaatactgaaactgcaattcatcaaaatttaaagtgagttttctttctgatattattttgtaatagtaaatactaaatgatttatcatattcgttaaattcaattagatatggcgttttcaatacatataagtatattgaagaaaatataacactaactacaataaaaaaatacgagtcattgataataaaatttattaaaaaaactgcattaaaaacggataatattaatagattttttataatgaaatcactccttaaatttttgtttttgtgtttaaatttcattgtaaatgctaattaataataagaaaaagaatattataccaattaaattttaactagattatttacttttatttatcatatttaggaatagatttttttgttaaatcaactacatcattgctagttgcataaatatcttttacagtcatataatcactaatgacagatgctgtgctcaaaatagtttctgatgttttggtagaactaactaaatcctttgcagaacccaatattggcaatttagctactccttgattcgctacaactcctggagttacacctgttacaacatcgaaaacagcaccagctagtttaatattatcattttgtgattttgacgtaatcatgccaccaataccattagcatctgtaattttaggattatttggatttttaataccatcaccaacttgagacattcctaagccaatttgaataattgaggttgttaatgccaatgtgcccccaagtggtgctgcaactccagcactttgtgcaattgtgtatgtagaacctactgcccctgcaatccctaaagcaatattagtagctcctgtttctatttgggttggctgtcttagcattgctctattaacataaacagcattgctaggaggggtatgtctattataatcagatgcaggtataacaaatgtagagcctggcactttataagcacgttcaagtccatctaaatcaacaaaattaattggatcttcctctgcaaaaccatacgttgaaatattagggtaatctttcgcgagtggatctacactcaaaaactttagcatatctgtagaatgtatgctatcagtacctatggcaacattatttttatcaaaataggttactatttgatttttggtatcaaattttatgctttgaatttttgcagtggtatcagcatttataagtaccaaatgttggtttttaattttctcctgttgggattgcatcatagtgccctgatagccaaattgggtgtatggattataatcttgggcaaaaatattagcagataagcttaatattagaagcaatagtttgtgtattaatttcatattattaatatttgaaagcaataatacaaatttgttttgaattgtaaaaatatttcataagcaaacaacaaaatataaatttcttgtaaattcgttttgccattttcgaggagttcaaaaggatttttaattgagaaattatttaagcaaattactttgattttgtcaaaataatctactaatttacataagtattattatgaaatcatttatatgaacatacaatacatttcagacaaaaaaggaattacaactggggtgtttatacccattcaagaatggacaaaactcaaagaacactaccatctccctgaagatgattttgaattaagtcaagcccacttaaaagaggtggactatcgtattgaccattattttaaaaacccaaacattgttttagattgggatgaaatggaaaaaagacttcttgtaagaaatcaaaaataatggcttacaaaattttgccttttgctgaaattgatattcacgaaagtatggactggtattatatccaaaatgcaggacttgaaaatgattttctattagaaattaaaaagaccatgcttcatgtagatcaaaatccatattcatatcaaacaagatataaacgaaaaggccaggaaataaggtatgcatctgttgaaaggtttccgtttataattgctttttttgtagatgagattattaaggctacaatcttttcgctatttggcacaccgctcgcaaccctaaaaatttaaaatctagactataaagtttaaccgtttacatcaataattttaaccatcaagcaaacaacaaacttatatatttattctaaactcgttttgccattttcgaaaagttcaaaagcattttgagaaaaggtttttattcctttttcgactaaaaaaatgaatagtatttattttgagattgaataatgaagagtttaaaatcattaaactatcaaaatcaaattataagttagttcataaaggggtggaaaaagttatagggtaagggtagattaataatcgtcattgaacaactccagatcaaagagtttctttaaagaagcaaatgttctcgttttatttatttttaaaaaaatatttttagattttgtctgatatgttttagacttttcaaattcattttcctttttaaagtaaaaagaagaatataaaaaaaatctagcaagatcttcatcttcaagttgaagcgttttaatattcttttcatttttttgaaaataaaccttagattctataggtttattatttaataaaaatgcaaaagctagttcctggttatgtttaaaaacttttattttattgtctccaatttttttaagattttcttctaaaagtttaattgcattatcatatttttttaatcttatttcacaaagtgccatattaaaattcgctgtttttatcatattatgataaaaatattttttacaaagtggtaaattttttttatatacattaagtccatcaacccatttttgttgtaatataaataagtttcccttaaaattttctattaatgggactaaatcaatttcgccagccttcaaagcaattttttcggcttctttcaaataaaatttgattttttttatgttaactttacaatcaacataatttaatgttgccatttcaaaatacgttctagctaagcctccaatatatccagaatctttttttagtttaatgctttttataaaacacttttccgataacttaaagttttttaaaaatttgtatgtatttccaatctcatgtaaagtttgagacattgatttggtttcgtttaacttatactcttttttatataccaaatagtaaaactgtaatgctttttcatattcatttaaaccatctttgtatattctacctattctgtaatttaaatcataatataattttataaaattttcatttaatattttagttttattttttttcattatttcaattgcatatttacaatcttcaataatttttattaatttctttttgttattactagttctgaaaatagataaggaatattgatttaatacattggcaatttgttctatttcatttgattggactgctaatttgtaggcatttttcaaatattttttaccaaatggaaataaattcatagaattacaaatgcccccagcaatacatttaatttgaaattcatcaaattgggaatgccaagaatttagaaaatttttccaattaatcttatctactttcaaagataatttttcgtttttttttaactcatataactttttaagaaaaaatgttgtgttaactttaattgcaaagcctttacaattcgtattagaaaaaacaggaaaattgttgccgtttttataatcttttaactgatttattgtaattgtagtatcattagtatgttcaactataatgatatatttttttacttcattcttttctaaatataaattgacgtcaaattcatcagaaaagctataaccaatagttataacagtttcatgactaccagttgaaaacaatcttttaaaaatttgttcacgtaaatttaaaagttgaggagtatttattgactctagtgttgttctaatagaatcaaatttatcaattgagccatgaatttttataatttttcttttattattatcaagatttttcttttgaaattctgactcagcaatatatttataataataattattttgaataaaaccatttttttctaatgcagcttcaattaataaatcaaagtttgttgtatatatttcattaatagtatcattaattaacattttgctaaaaccatatgatttatgtttggattgccttttaaaaaaatatttaatagcgaataatcattatttgtatagctaaaaatatgttcaatcattctttcaaatggtattctattttttttaatttcttcatttaaaatcttagcatctttattagaataaaatttagataaaaactgaatataaaattcagatactatagggataccagaatcaaatgaaattccagcaccagctaagaaagtaattttttggttatttaaccaatttaataaactatcaatatttaagattttatcttctatatttagcatttctttattcatagactttactaaattttaaatttttaataaaaaaaaagcttttataatatatagttttctcacgcaaacaacaaactataaatttcttctaaacttgttttgccattttcgaaaagttcaaaagcattttgagaaagagtttttattcctttttcagcaagaatggcatctacttgcatattgttgtttttgatttggtcagaaagcgttttgtctatgggaattacttcatacacagcttttctgcctttgtagcctgtatagtggcaagaagcacaacctttgggtgtatgatggtgtaccaaatgtctaggagcagtaaaatgtttaggataaagtttactttcaaaaggttgctgctctttgcactcatcacaaagcaaacgaaccaaacgctgtgctacagaagtattgagtgtattagctaccaaaaaaggaggtacacccatgtctatcaaacgagaaatagtaccccatgctgagttggtgtgaatagtactcaacaccaaatgccctgtgagtgaggctcttatcgccatagtggctgtttctgtatcacgaatttctcctaccatgattacatctggatcttgtcgtaaaaaagaacgcaaagcacttgaaaaagtaagtcctatgacttcttttaattgtacttgattgatgccttctaacgtgtattcaataggatcttcgatagtaacaatatttctactttctttatttaataatttaagagtagcatacaatgtggtggttttcccacttcctgtaggtcctgaaatgagcaaaataccattgggtttacgaattccttctaagtaattgtctaaatcttcttgctcaaaacctagtttttctatgtcaatattggtagaatcgttactcagtaaacgcatgactactttttcgccatgcaaggtagggagtacactcaccctgatatcaaatttcatcccttctttattaaaaaatatacgtccatcttggggtaatcgcttttctgcaatatccaattgagacataattttaattttgttgataatacttgggtattcgtttttatcaatcttaaatcgctcaaccaacataccatctatgcgaatacgcacacgacatttggcatcatatacttctatatgaatatcactacttcttagatttcgagcttctgcaatcataaatggcaaaaaattgtcgctaccacctgtatagttttgcccagtggaactagaagtttgtgagccattagatttacgataataagtattgagggctttggtcaatgcctcgtctgaaataggtactaatgcaatttttctatcccaaatcatttctagctcctcttttagctgagcaatagaagaagattggctacaaaaaaaagtgtttttattagaagggataattttatagtgccatgcttctactggtgtaatcaattgaacttgagtagtacttagggtttctatagtttccatataaaagaaatattaagcaaaataatgaattatattagttcgttagctaaaaacaattaattccaagttaaaatcattgattttactattttcatataaattattttaaaaaaataatttgcaaaactaataaattgcatacttttgaattgaaaatagttttatagtcaagtttaagatattttattttataattcattaaaaataacaaaaaaatgaaaaaattattaattataggtggtatagtattagtagtggtgttgtttttgtatagtttttttgcaggttcttacaacaatatggtggccaaagatgaggcagtgaaaagtgcatgggcccaagtacaaaatgtataccaacgaagaatggatttgatacctaatttagtaaacactgtcaaaggttatgctaattttgaacaagaaacactgaccaaaatagttgaagctcgtgctaaggcaacttctgtaaatatcagtccccaaaatttatctcctgaagagattaaaaaatttcaaggagcacaagatggattgagccaagccctgggtagattgctttctgttgttgaaaattatcctgatttgaaagcaaaccaaaactttttggaattgcaatcacaactcgaaggcaccgaaaacagaatcactgtagaacgccaaaaatataatgttgtagtacaagactataatggatatgtgcgagcatttcctagaaatatactcagaggaatgtatggtttcgacccaaaaggttattttgaagctactgctggtgccgaaaaagctcctgaagtgaaattttaggcttgctaaaaatgtatcattaattaggtaaaaattaaaaaaaatacaaatttcataaactaaaccttgtagattaatttgtgaaatttgtacatatttagtctttaaaaaagactttcataaaacctagataagaatcattcagccttttcaagcctttcaactacaaattctacttaatgtgtagaacttcaaaaggaaatatacttttttcaaaggaagtgtagttatttgggctttactaaaagattttacggtttattttgatatataatttagtacagtttaaatctataaatttactttaaggctagtttaaaatatcattttcaacatataaacgagccatagttatcaattatggcttttttaatgaaaagatgatttatgctaaaaaaattacttttttggttaaaagtgttgataaaaatgtagtagaccccaaatagttaaactttcgtaaaaaagcacatcgcttgatttgaaaaattctttaaaatttgttgagattaggccaaaatagcttatttgaaaagtatttgagccaagctccgaaattttacttattttagtaaaaaacatcattaaaatactatccaaaataatttatatttggattttcaaaaaaagacatgaaaataattatctcaggtggtggcactggtggacatatattcccggccattgccattgccaatagtttaaaatcaaaacttagtgctgaaatcctttttgtaggtgccaatggcagaatggagatggaaaaagtgcctcaagcaggctacccaatcaaaggattgaacattgcaggtatacaacgcagtttgtcgctcgaggctataaaaaaaaatctactttttccttttaagctcatcagtagcttgtcggaagccaaaaatatagttaaaaattttaagcctgatgtggtcattggcgtaggtggatatgccagtggtcctatattgtgggctgcccaaaacctacgcatacctacactgatacaagaacaaaatagttatgctggccttaccaacaagctgctggcacgtagagccaacaaaatatgtgtggcctatgagggcatggaaaaatattttccaaaagataaaatagtaattacaggaaaccccgttcgcaaagatattctcgatgctgatttagtaaaattggcaggctgtgttcattttaaaatcaacccacaactcaagacaatattggtcattgggggcagtttgggagccaaaaccatcaacgaagccatagaaaatgacatagaaaaactcaaaaattcgggctttcagctgatttggcaaacaggcaaaaattttaatacatcaattcaatttccaaaattcaatatcttaccatttataaaagaaatgcactgggcctatgcctgtgcagatgtggtaatttcgagggctggagccttgtctatcagcgaattagctttggtaggcaaacctgctattttggtaccttcgcccaatgtatccgaagaccaccaaaccaaaaacgccatggccttagtcgaaaaaaatgcagcccttttggtaaaagatagcaatgccaaaaccgaattggtagataaaatcttggctttgatagcccaagaagacctctgtaattcgcttaaaaataatattttgaaaatgggcaaacccaacgcatctgatgaaattgcaaaccatattttggacttggtaggtaatcaaaaataaagttaatttttagataaatattacttttataataaaattactataaaaataatttttagatttgtcagctaaatatacgattactcgttttttgagtgtaataatgagcatttagttaaaagattagttgcaaatatagattaaaaaaaaataaaaaagctcagtaaggtaagatgaggcgacttagatgtttgcactaaggaataatccttattgtgatttgctttattcgacaaagattgattttgaggggagtttcatttgatttgcactcagattttggctgttattattttttcgcttgtgcttttcgttctttgataatttcttcgatttgtttcatggctgttactctatcaactggaacggctattttatgcaattcacgccatacttcgtcagggtttttgccagtaaatgggttgaatggagttgtttctatttgcataggaatcctatatttatatcactacaaatataaaaatattaattaagatttgcaataatacatttcaatttgttcatcgtctgccacatttacttgaagaattacgcatttattatctaagatacaagaagcaatcaataaaattcgttttttattgctataaccacaaataatactatagttatcttttaaagaataaccatctaaccaaaaaaacctgtatttaggattatcaataacacttttaatctcaataggggttattttatcagggtctgaggataaatttagctgcgagtagtcgaggtcgaagggcattttaggtaaaatatttttaaaaagctataaatgtagatgatttaaaatactttaaaagatatttgaaaaatagaaattagtaattaatattgaaaaaaaaagccccacagagcgtaaacgatgcagggatgagattatcttcggcttatagccttattgtgataagtctttcaaaactgatacaaacataaataaataaaatgatatgaacaaaattattggactagatttaggaacaaattctattggttgggcaattagaaaccctcagttggaagaaaatcagattattgataatggtgttttgattttcaaaaagggagttggacaagatagttctggaaatgaagagccaatggtttttaaacgaactaaaaatcggggcatacgaagaaactatcaagtaaagaaataccaaaaatggcaactcataaaaacacttattgaaactgaaagtcaattttgtccactttcaaaaaaagattttgaggcttggtatcattatgataaagcaattagaaaacgtgtttatcctacttctactctatttcacaattggttgaaactagatttcaacaacgattcggtaagtgaatatgaaaatccgtatcaattgagagctaaagctattagagaaaaactctcaaatttagaaataggtagggctttataccatttggttcaaagaagaggttttttgagtggtagaaaagagcaaggaaatgaaagtgaaaccatttctaaaggaatagaaggcagacctggatcagatgcaattactaatttaatagaaactgaaggaagtttgggagctgcattggctacattagatactagatttgatagaattagaaacaggtatatacttcgcaaacaagtagagcatgaattaaatctaatttgtgaggttcaaggcatatcaaaagattctgatttttataaaaacatccataaagcaattatttggcaaagaccactgcgttcacaaaaaggcttggtaggtaaatgtaccttagaaaaaaacaaaacacgttgtcctattagccaccctcaatttgaagtttttagggcttggagcgtgattaacaacatcaaatacaaatataaaagcgaagaaaaaaataattttcgaaccataccaactgaatggaaagagaaaatttggaaagaaaaatttcttaaaaagaaagatacttcttttgattttgaagagattatcaaattgctggatggaggatacgatttcaattataaaactcatcaaaacattgctgcaagtccaatttgtgcaggattatatgaaatatttggagaaaattggcaaacgcaaaaaataggaaaatacactcttgaagatatttggcatgttctttttaattttgatgataaagatagagttgaattgttcgcaattgaaaaactggggttagaacccaaaatggctgataaatttgtaattctttggaaaaagacacctgatggatatgcacaactgagcttaaatgcaattacaaaaatcaatgagtacctacttcaaggttttatatatacagaagcagtactatatgcaaatatgccaaaagttgtaggagtagaattttacaatacgcataagtccgtaatacaagaagggattacatatatctttaaatatcaaaacagtataaatgacaccttaaagattgtcaataatttgattggcaaatttcttgcattgccaaatgaagagcaatttggttgggacaattcgtaccaattggatgcgaatgacaaaaaagaaataaatgattcaattttagactattttggacaaaaatcttggaatgaatttccaaaagagaaacaagatttcataactaaaacggtttcggatttgtacctgaagttcttgcaatatccacggggaacaaaagctaaaacatttttacccattccacgattggatgaagcggtcattcagtttttaagaaataattttgaccacattacggataaagatatagaaaaactatatcatccatcagacaacgacatttatcaaccttctcttcccgataaagaagaccataaaaaatatttgcaaagccccaaaacaggttcgttcaagaatccaatggcaatgcgaacattgcatgagctcaaaagattgatgaattatttgatagaaactgaaaaaatagatgaagatgatagagtggtagtggaacttgctagagaccttaatgatgcaaatatgagggtggctatcgaaaaatggcaaaatgctaatgaaaagaaaaacgaagaatacaaggttgaaatagaaagacatggatataataaaaacgataaagatctcattcaaaaagtacggctttggaatgaacagggcaaaatgagcatctacacaggagaaatgataagtatcgcagatgtgtttgatgggatgaaatttcaaattgagcacactattccagccagtcaatcatttgacgattcaatggaaaataagacactttgcgaaactgcctttaatgccaggaaaaataatagaatacccacccaactggaaaactatacggaaatagaagccagacttacgccttggattgataaagtagaaaaactaaaatttaggtacgaactggctaagaaaaagtctaaatctgcccagtcaaaggactctaaggatttagccattcaagaaaaacacataattaggtttgaattggattattggaaaaacaaactctaccgatttcaaatgacagaagttaaagggggtttcagaaatgcaaatttggttgatacccaaattattaccaagtatgcgtttcattacatgaagtcagtttttaagcgtgtagatgttcaaaagggggaggtaacatctatatttaggaaaatatttgagataaatgaagaaaaaaaccgaagtaaacacacccaccataccatagatgctgctgtgcttaccctcattcctaaggcagctgaaagagaaagcattctgaaacaatattttgaggcacaagagcaaaaaattaaattccataaaaaaccatggaaaaatttccatcaaagtcaattattaaaattggatgatgaaacactaattcaaaattctactagagacaaagccgtaattcaaactgtgaagtatgtgcggaaacgaggtaagatagtctacctcacagataaatcagggcaatttatattagataatgaaggtaaaaaaataccaaaagtagctactggtgataccataagagggcaattacataatgaatcaatgcttggggctatcattttgccaaaattagatgtagaaggaaaccctttacgaaatgattctggcgaatttgaatatgaggaaaatgcaaagcgtgtttacgttattagaaaaaaattagagttcagcgatttaggatttaaagataaaaaagcattggaagacataatagacccagtcgttcgcaaaaaagtacttgaccatatagaaaaatacggattaaacaaggaaacctttaagaatcccatttggatgaacgaagaaaaagtcataagaataaataaagtaagggtaaaaacagacttgaaaaatcctctacagattcgaaaacacgtttttgaatctgaaaaagaatacaaaaaatactactatgcagacactgctaaaggggcaaatattatttgtgctttttatcaatacgattatttaggaaaacaagaaagagaattcgaaattataaatttattggatgcagcttatctggtttctcataaactactcaatgagaaaggagaaatttctatctcaaaattgaataaagcaggtgagactatccagccttatgctttacttaagcctggaactaaagttattttctttgaacagaaattagaagaattaaaggggttagataaaactaccttaaataaaaggctgtatagaattttaaagtttaaaggtatacaaatgacatttgaatatcatttagaagcacgttcagccgatgaaatttcaaagaaaggaaaagaattggaagataaaatttactcatttggatatagtaaaattgattttaataaacccaaacataggtatttattaactaaaggaaacttcaattttgccatagaacacaaacactttgaaatgatgccagatggagaaataaaatggaaagtataattgaatatctccaaagcctaatcatccacgaaaacagcattacgatttgctatttttatagatggttgcaagtgaaaatgaaatttcatacaacattttgtatcatacattttgtatcatacaaaatgttgtatatatttggggtatgaaaaagctatcgaatccattcttatccgcaggatataacggtcctgattatttttgcgaccgcattgaagaaacccaacaaatggcaaatttcattcaaaatggcactcatattgctctttttgctgttagaagaattgggaaaacaggcttaattcatcatgtttttaatcaatataaagacaattctgatatcgtttgtatctatattgatatactttcaacccagaatttagctgattttacgaaccaaattgctacagaagtatacaattatttccctaaaaagaagcattttggaagaaaaataacagatatttttcaactatttagacctgttatatcttttgatgaactcactggcacgccatcgctgagtttaacgatggaaacaaaagcccaaaaagaaaacacgattgggcaaattttaagttttttagacagccaaaatatcaaaatagtatttgccatagatgagtttcagcaagtattgtcatatccagaaaaaaatgttgaatcattgctacgcacttcgattcaaacgcttaaaaacacatcgtttatattttgtggaagcaaccagaaaatgatgaacgaaatattcaattctgctaaaagacctttttttgcgagttgtacaaacataaatttagactttatcgatgctgaaatttataagcaatttatactccaaaaatttgcatcttgcaaaaaagaaataacgccagactgtttagattttatttgtgattggacaggcttacatacgttttatacgcaatatttttgctcgcaattatttttcaaaaaccacacccacaatacgcttgcgattgcccacgaaacagcacatgaaattttaaaactaaacgaaaatgtgtattttcagtataaaaatttgctcacacaggcacaatggaatttgctgtgtgcgattgcgaaagaagaaaaagtatttcagcctcagtcaaaaaattttatttcaaaaaataatttaggcacaccagctgctgtaaaaagaagcctagatgcactgctagaaaaagagatgatttattatcaaacaggaattgacgaaccattttatcaagtatatgataaatttttgatgcgatggcttaaaattaaattctaagaaaaaatgttaaaacgcacactttcattttcaaaccctgtatatttgcgaaccaaaaacgagcaactggtatttaatttgccaaatgcgaatggtctggacgagattggggagttgaatactatccctatcgaagatattggtatagtgattttggataatcaacaaattactatctcacatggtttgatagataaattattagcaaataatgtggctttgattacttgcaacgccacccaccaccccacaggcttgatgctcaatttggatggacatacgttgcaatctgccagatttaaagcccaaatagaagccactgaaccgctcaaaaaacaactgtggcaacaaaccatcaaagccaaaatacacaaccaagcccttttgctggcatcgcaaggcatagaaacaggcaacatgaaacgctgggaagacgatgtaaaatcaggagacagcgacaaccacgaggctcgagcagcagcttattattggaaaaatatttttattaatcatgctaatatacaagactttgtgcgtgagcgagagggtttttatcccaataattttctaaactatggctatgccattttgcgggccacagtggcacgcagcttggtaggttctgggcttttgcccactctaggtattcatcatcgcaatcaatacaacgcttattgcttggccgatgatattatggaaccctacagacccatagttgatgcactggttttgcagattatatcaaaacatcccacaactgttgaaatttctaaagaaataaaagcccaacttttgcaaatacctacattggatatagaaatagaaggcaccaaaagtccattgatggtgggagtgcaaaaaactacattttctgtctataaatgttttgaaggcgattatagaaaaataatttacccaaattttatacaataaagttttgtagttatccacattatcattaactttgaatagaccaaatatttaaagccatgttggaccgactaaaccaatatagaatcatgtgggtaatggtatattttgatttgccagtggtagaaaccaaggagcgaaaagcagccacaaaatttcgtacagaaataatgagagatggatttacgatgtttcagtacagcatgtatatgcgacattgctttagtagcgaaaatgccgatgtgcacatcaaacgtgtacaagatttactacccgaaaaagggcacgtagtcattacaaaaattaccgacaagcagtttggcgacatgaaaatattttattgcagagaaaaaaaacaccgtgaaaatatgccacaacagttggaattgttttagaaaacctacatttgataaaattttagaaaaaagatgaacaggcaattatttctgaccaatctagtaagtttagtaggaatggcggccattccaaaaaacttacaaattcagtatcaaaaaatatatttattacaattttttgttcgaggatttcaatttaacgaaggcaaaaaaatattacacctcatgaaatctaccgacctgttggagcttaaacgagaaccctacaatcagtacgacaactttgctatagctatttattaccaaaatttcaaaataggatttgtaccagccgaaaaaaacgaagttttggcaaggcttatggatgcaaatatgatggaaataatggccgaaatcactcatgtagaactacaatccgaaagctgggaaaattgctgttgtgccatttttattctcaaaaaaatagtaaataaaagttcaaaagatagtaatatacctacatatttatctgaaattgaaaatccaatatattacacattagaaaacaaaaatgaccgatattctaaaataaaatctaagccatcgagagccgaaagtatatatgatttgatggtagagcacagccaaacagacgaagtgtatacgttgattcataatagttttgctaattctgaggcctttgagcaagccttgagtgaagcaaaaataattatgaataccgagaaaataccgcaacatttgtacgaagacaagttgctatttgcggtagaagatgccaaattatatctagaaaacgccatagagggaaaaaaatatatttttattaatatggatagaatgcccgaattggtaaacgaaataaaagaatttagaaaaatagtagacgaccaaggcagagagttttatgaaatggtttttaaagaaataatagaagctaaagaaataatccatagtatctagatacaaaaaagcgggtcaattgtaattactggggggaaactgtatatttgtagtctaaaattatatcatatcgcaccaagcatcaattttctaaaagaagtatttccatcagaatttctcgaatatttcactattgtagattacactcaattatgtgagattgagactagaactgtttattatttaatccacatagaagaacagaatattccaccatcaactatttcattggctgaatatgaaagtaaaggttttacacatggtaaaacggttcaagattttcctatcaggggcaaggcagtttatttgaatatacgaacgaggtcctggcggcataaacagacaggaaagattgtaaaaaacaactatgactttgtagcaaaaggagtaaaactgacccaagagttgtcagattttttaaaatatacaggtcaatacgagggttgatacgatatcaaacatcgctagtttttacgatgtggatgcatcaaaactgcaacgacattataagaaaaacacgagtggatttgataattgggatcaaaaggctcatgcagaggactatatattatatccccataatgtaacagaatcattgagtattgatgaggtttgtctttccaagggagaactttatacggtagttaccaataaaaatgaaggagttagtaacaagggatccttagttgccatgattaatggcactgaatcaaaaaaaatcatagaagtattgaacaaaattcctctatctgcaagacataacgtgaaggaaataaccatggatatggctaggaatatgggggcatcagcggatgtttgtttcccaaaagcacaaaaagtaattgatagatttcatgtagtaagattggtcatggatgctatgcaacatttgagggttcaatatagatggcaggctatagagcaagaaaataaaaacataaaagaagccaaacaaaaaggagaaaagtatttaccaaagatatatgaaaatggagatactatcaaagaacttcttgctagaagtaaatacctattttataagttcaaaacagattggacaaacagccaaactaaaagagcaaaaattctatttgagctatatcccaagctaaaagaagcctataacttggtcaatatttttagaaatatttataaatctacctccattcagaaagctagacttggatttaatcactggttatatgaagtaacaaagtctaaaatagaagtattcaatacatgcgtaaattctttagagtatcatttagaagagatattaaacttcttcgcaaatagagaaaccaatgcaaatgcagaatcattcaactctaaaataaaacaatttaggtctgaagtaagaggagtaagagattcaaaattctttctgtttagattagaaaaactattcgcttgatatacagtctccccccagtaattacaattgacccaaaaaagcctcttcgattaaaggagctttttttatctttaaaccttgatttttgaatttgtaaaattttttcaacttttggaaagtttaaaactttccaaaagttagattagaattgaaattattttgaaaaacgaatctaagtttggtctgatagaaataaaaaaagccccctaaagaggagctttttttatctttaaaccttgatttttgaatttgtaatcttcgtcctaactacctgaaagtcaaacgcttgtaagcaatcggttgtttatcaatggcaaagatacaattttgaaagcaaatcacaactcatcggtgatacaagaagctaaaatttcggttgtttatcaatggcaaagatacaattttgaaagcaaatcacaacagtgagattggcacatttttatcctgtaaagttgtttatcaatggcaaagatacaattttgaaagcaaatcacaactttatattccatcgttatttttattaatttgttgtttatcaatggcaaagatacaattttgaaagcaaatcacaacatggtgtagtatctacttataatgtatggtgttgtttatcaatggcaaagatacaattttgaaagcaaatcacaacacgcaatgattaataattcaactactattggttgtttatcaatggcaaagatacaattttgaaagcaaatcacaacaaatagaaatcaatatttaatttatataggttgtttatcaatggcaaagatacaattttgaaagcaaatcacaacaagagagcaatgaacacgaaactcttacagttgtttatcaatggcaaagatacaattttgaaagcaaatcacaacataaattatgaagcaattatttcaaaaaaagttgtttatcaatggcaaagatacaattttgaaagcaaatcacaacaccgatagaatactcatcacaaggattactgttgtttatcaatggcaaagatacaattttgaaagcaaatcacaacttagattcatttttgatttctaattttaggttgtttatcaatggcaaagatacaattttgaaagcaaatcacaacgaagaagaaatattacttaccactacatttgttgtttatcaatggcaaagatacaattttgaaagcaaatcacaacaaaggatttcgaagcaatttgtaaatcaaagttgtttatcaatggcaaagatacaattttgaaagcaaatcacaacaattgtcaaagcctcttgccgagtacgtacgttgtttatcaatggcaaagatacaattttgaaagcaaatcacaacaaaggtagtttttggttttgagggtcgtccgttgtttatcaatggcaaagatacaattttgaaagcaaatcacaactacctatgtaagtatccgaaactatggtttgttgtttatcaatggcaaagatacaattttgaaagcaaatcacaacactgttagctaatttatcaacgctacctgcgttgtttatcaatggcaaagatacaattttgaaagcaaatcacaacaacatcaatcattatttaaaaatgatgcacgttgtttatcaatggcaaagatacaattttgaaagcaaatcacaaccacttactgaattttgaaataaacttgaaagttgtttatcaatggcaaagatacaattttgaaagcaaatcacaacgatgatgtatgttacatacaaatttatcctgttgtttatcaatggcaaagatacaattttgaaagcaaatcacaacatcttcgattttgtcaaaacaaaaagctacgttgtttatcaatggcaaagatacaattttgaaagcaaatcacaacgttgttggggtcaaatattagtatctttctgttgtttatcaatggcaaagatacaattttgaaagcaaatcacaacaaagcaaggccattccattacacgagctaagttgtttatcaatggcaaaggtacaattttgaaagcaaatcacaaccatcaaggagtaaagcccttaaaccttattgttgtttatcaatggcaaagatacaattttgtctgcgaagcgaatgagaaatcctttaaaatcaatcattcattttcgattaaagccaattacaactatttcaagcaaaattgttataataacagaccaaaaaagagctattgctgcaaatctaactcctgataattataataaaataattgatgaggtttggcttgtagattcaaaaaatagattgcattatatcaaaagtgaatctataaaaaataaaagttatctgtcaatatttgaaaatatttatgataatcaataaatacgaatggctacttaactttgattaaatagccatttatggttgatcgttcagggtataaacccttttcaatcttttacaaatatacttattaattaaatacttgtttaataaacttaaaaaaatatggaaaatcaaattatgccttgcgaaaattgctacaaaaaaatataacaattactttcttattaaatggttatcaaaccaaattcatcagatgaatatacaatggagacaaggagtcatttggtgcacaaaactatctgcatctcacaaatacgcaaccaaaaacaacaaacaaatgaaaaaataacaacccaataaaacataatatatccaagcgttttgtttttgtctgataccatttatacaaactataggcagcaaaataggcaacaacaacacaaaaccaatcggatatacaacccacttaacagcatatagtcgaataaaatgacataaaaaataaacaacaaaaacaccaactattatttccataattcaaatatacgtaaatgaaactatcaggtatagaattcctcttaaaattaaaagatatgctcactgcaacactaaaaaaaagatgactaaaaaaatggtactaccattgatttcaaaggtaaaaatatcaatgaattgaacggacaaatgaaaaagctctcagccttgaataatagttccaacgacactggaagtaccaacctctacaatgcctaaatagaccgaacgcaaggcaaaataaaaacacacacaaactccaaatcgggtattagtagcttgtttgatagtgccaaaggttttttggcagcacaagccattgcagccctcacttgttgtttatcaatggcaaagatacaattttgtgtgcggagcgaatgagaaatcctttaaaatcaatagtaatgccctttttcaaatcatcctttattttttggatatttttgaggggagcggttagtttgtctttgagtttaagaagaaattctatgcctgattgtttcatttgtctgaactatgatttataggattaaatgatttatatgatttttttttaagattattaaacaagtattaaattaatgcgtatatttgtggtgtcgaagaaggtaactcttctttggcagacaagaaaagccttttgtaccctgtatgaaaggctttttggtttttattccaatggcaaatcatctattgtgtttattatgtctaaatattttttactaactatatcatttctattcattgtgtacaatttattatttttgcctataagccatatttcttctattattttgtattgtccagtatttgttaatttgccaccaatagctcgttttaatgtacgcttagtcatattaggattttcaagctctattactatgactttagcattttgaattttagcatccgaaatatctttttcaatacgattttgaatatttttggctaaattaggcgatttcaaatctgcaattttgccattaatgttataatcagggtttttaatcccttcattattgctgtaatgtggtctaatttctactttgtgtccataatcagccaatattttgcctttttgggttaaaagttcaatttcgtctggttttgcatctttgtgtaaatgcaaagtgcctccttttttgcttttataaatttgtgtatatcccatatttggtggcaaatctacctttttatctgcattttgggcatttttgagtacatctgctagggtttcaaataggttgttggcggcttcttggcgtggttttagcacctcagttgtttatcaatggcaaagacacaattttgtctgcggagcgaatgagaaatcctttaaaatcaatcattaactttcgattaaagcaaatcacaacatttgtctgaactaagatttatatgattaaatgaattatttgatttttttaagtttattaaacaaatattaaatttattcgtatatttgtatcggaaaggttgacatcataagaaccaaccgttgcaactcgacctcgtaaaattaatttttacgaggtatttttttataaatatattttttatcaaatcgtatcatcttaccatttatccaaaaccaaatactttcaagttcggataatgagtttagttttcctttagcaattctatataattctttggttgttgcttcaaaatcaaacctaattattagcttattggcttgtttataacctttttttaactcatcttcaattgttgatagtttacctgtattattggttttaaattcccaaatttcatttttccaaaacgcatctggaaatttgccttctttaactcctttaggcattaattttttgtaattttctttatctgtaatattgtttggcaataattgcccattacctccatacttgtcaattaaaaactctaaaatgggcttatttttagtaaattcctcgccagtgtgcgtagaatgaatttcgtatttattaccttttggcgttttaaatgtcttgtatttgagtattttttcattttgcataggcaaatctacatctttttatctgcatttaagaacagggcagggtcttgattgtaaggacagggcatgccctgattgtaaggacagggcatgccctgtccctacggtatcaacaaggtttttaaaaaaatggtaaatggcatagccatatttattattttctaattttttttattaacaataacacaaacattttattttatc

SEQ ID NO: 3292 - DNA, 23297 bp, synthetic construct
  misc_feature 1..23297: note = Synthetic
  source 1..23297: mol_type = other DNA
ttgtgggaattgcggttccgcatctggtgaagacggcgatgaagacggcgaaaccgcttctgctgataccgggctgttttctgggcggggcaattatcacgctgttttgcgacggctttgcgaggacggtgtttgctccgacggagctttcgatcagttcggtgacagccgtatttctggtgccggtagtgattgtgatgatgctgcgcaggaatgaggacaggtaacggaggaacgtgtgatggaacagaggaaaaaagagtctggaatcaggcttgaggatgtggcggcagggtacggcagaaaacctctgcttaaccatatttcactgcatgtaagtccgggaaatgtcctgacgctgatcggaccgaacggtgcgggcaaatccacgatattaaaaaccgtgaccagacagcttgcagagcttggaggaacgatctttctggaggggacatccatgagccggatgcgggaagaggaagttgcacggacgcttgcgatggtgatgacggagcggcttcatccggaatttatgacctgccgcgaggtggttgcgaccggcaggtatccgtataccggaaggctcgggattctctcagcagaagactggaagcttgtggatgacgccatgcagctggtgcatgccagggacaccgcggaccggaatttttcacagatcagcgacggacagagacagcgggtgatgttagcgcgcgccatctgccaggagccgcggattctgattctggacgaaccgacttcgtacctggacatgcgctacaagatcgacattttatccagtatccgaagactcgcggcagaaagaaatatggcggttgtcatgtcgctccacgaactggatctggcgttaaaggtatcggatgtgatcgcctgtgtggagggagaccacatcggaaaaaccgggacgcctgaggaagtattttcaggcgattatattcaaaaattatacggggtggatgcagagtgttttgatccgcggacaggcgccgtgtatctgcgtggaaataaaagccggccaaagatctttgtgatcggtggggctggcagcggcataccggtctatcatgccttacagcggaaaaatgtgccgtttgcggcgggaattctgatggaaaatgatgtggaatatcaggattcgtgtgccgcggcaagccgggtggtttccgtgaagccgtttttcccggtcacagaggaggagatcgcggaggcgaggtcgtggataaagacgtgtgagacgtgtgtctgttgtgcggaaacctttgggccttacaacgaagcgaaccgcgcgctgcgcgagtatgcaaaaacactcggaaagctgatccctgcagaggcgctgcatcatttggaaggaacttgaaatggcggttgactgcaggagacggcgtgtgaatttggagacagcaggtgtgccggaacggtgaatgcatcggggagggcatgtgtaccggcggcagagaaaaagaggtgcgcgatggagcgtggcatattggtcgtgagctttggaacgacttatcaggagacaagagaaaagaatatcgatcagatggtggcgcttgtcagagagcagtatccgcattatctggtggaggaggcgtattccagcagcactgtgaggaaggtgttaagagagcgggacggcatcgcgaaagatgatgtgaggcaggcgctttgccggatgcgcgatgccggggtgcggcgtgtgatcgtatttccgacccacatcattgacgggattgagaaccaccggatgaagcaggaggtaacagactgtgcaccgtggtttgaggacgttcggattgcggatgcgctgcttaagacaccggaggattatcagagaacggcggagactctctgggaatcggtggcggcggaggcgggatcttcgccggtgatttttatgggtcatggaagtgagcatgcggcggatgagagctacgagcgtctggaatgtgtgcttgcacaggtgacagagaatgacgtctatgtggcgaccgtggagggaagcgttacgattgacgatgtgatcgggaggatgaaggtctcaaggcataagagcggacgggtgcttgtggcgccgtttatgctggttgcgggagatcatgccaatcatgatatggcaggagaggaggattcctttgctgccgcactccgcgaggcgggatatgaaccggtctgcctgttaaaggggattggagagtatgagccggtgagagagtgctatttcagacatctgcggcactgcatgggaaccctctacgggatcggcgtgggtcccggcgatccagagctggtgaccgtaaaggcgctccgctgcatggaggagagcgatcttatcgtgcttccggcggcggctgcggcggaatgtcatgcgtatcagatcgcaaggcaggcgtaccccgggattgagaaaaaggaacttgtctgcctgccgtttccgatgacaaaggaaaaagaaaagctgcgcagggcgcacgaggagatttttacgcggattgtttcctatcttaccgaaggaaagattgtggcatttttaacgatcggagatccgtccgtctattccacatacggttatatccaccgcagggtcgcggcgtggggcgggaatgttaaaatgataagcggcgtgccgtccttttgcgcggctgcggcgagtcttggaatatcgctcggggataaccgggatgagatccatgtgattccgggatcgtacgaggtggaggagacgatggcgctttccggcacccgggtgtacatgaaatccggaaaaagcctcgcgcggctgaaagcgctgttggaagaacagcagaaggagaagaaactgtccgtctactgcgtggagaactgtgggatggcggatgagcggatccacctgggagcggaggcgctcgaggagaacggaagctatcttatgacgcttattgtcaaagatgagggagaggtggtataatgacagagaattcatatcgctttttttccaaccgggaatgtcagtattatccgtgccatgagggcattgaggagatgaactgcctgttctgctattgtccgctctatgagagacgtcattgtccgggaaagccagagtatattaagagcagacgggaggatggaagcgaagtacagatcaagtcctgcatgaagtgcacgtttccacatcaggcggagaactatgatgtgatcatgcagtttttgaggaagggagatagataggatgaagagagtatttttgattgtattggacagcgtggggattggcgagatgccggatgctgcagattacggggatgcgggaagcaacaccatcaaagccgcttccaccagcccttatttttccatgccgaacatgagaaagcttggcttttttaatatcgacggcgtggagatcggggaaaaggaggcagctcctaccggagcggttgcccgcatgacggaagtgtcaaagggaaaagatacgacgatcggccactgggagattgcaggcgtcatctcaccaaagccgctgccgacctacccgaacggtttcccgcaggagattattgaggaattttccaaaaagacagggaggggcgtgctctgcaacaagccgtattccggtacggacgtcatccgcgactacggggaggagcatcttaagaccggagatctgatcgtgtatacatcagcggattccgtgttccaggtggctgcacatgaggacatcgttccagtggagaagctgtatgaatactgccagatcgcgagagatatgctgcgtggagagcacggtgtcggccgcgtgattgcaagaccgttcaccggaacgccggggaacttcacccgcacgacccgcagacatgatttttccttacagccgccgaaagtgacgatgttagaccagctctcgggagccggttttgacgtgctttctgtcggcaagatcatcgatattttcgcggagaagggcatcacggagtatgtccgcacgaccggaaatgaggacggcatcaacaagacgcttgattatatgaagaaggattttaacggactgtgctttacgaatctggtggattacgacatgctctacggacaccgcaatgatgtcgaaggctacgcaaaagcactgacgtacttcgatgagcgcctgccggagcttttagcagcgatgggcgaggaggatgtgctgatgattacggcagatcacggctgcgatccgagtacaccgtccacggatcattccagagagtatacgccgcttgtgatgtacggagcaccggtgcgggcaggggagaatttcggaacaagaaaaagcttttccgacattgcagcgacgattctgtcctactttgatctcactccggagtgcgcgggcgaggcgattccggtattcaagaaatagtacagatcttcggaagagaagtttttgcatttttcatgaaattatgttatagtgccaacgtatgcaaagtttcggctttgctgcgttggcatttttgaagtgatttgttttttggaggatagatagtttggctgatttaagaaaagagattgaaaagagacgtacgtttgcaattatttcccacccggatgccggtaagacgacgctgacggagaagttcctgctctatggaggagcaatcaatctggcgggttccgtcaagggaaaagcgacggcgcgtcatgcagtgtccgactggatggagattgagaaggagagaggtatttccgtcacgtcatcggtactgcagttcaattacggaggttactgcatcaatattcttgatacaccgggacatcaggacttctcggaggatacttaccgtaccttgatggcggcggattctgccgtcatggtaatcgacggttccaagggtgtcgaggcgcagaccagaaagctgttcaaggtctgtgtaatgcgccatattccgatttttacattcatcaacaagatggaccgcgatgcgaacgacacgtttgatcttcttgatgagatcgaaaaggagcttggcattgcgacctgcccgatcaactggccgatcggttccggtaagaattttaagggtgtctatgaccgcaacacaagagagattatgacgttttccgatacattaaagggaaccaaggaaggtacggagaagcatatttccgtggacgatccggcgctgattgcagagatcggacaggatgcgtatgataagctgatggaggagatcgagcttctggacggagcgagcgcggagtttgatcaggaacttgtgacgaagggagagctttccccggtatttttcggttcggcattgacgaatttcggtgtggagacttttttgcagcatttcttaaagatgacttactcgccgctgccgcgcaaggcggatatcggagaagttgatccgtttggtgaggatttctctgcgtttgtattcaagattcaggcaaacatgaacaaggcacaccgtgaccgaattgcgtttatgcgcatctgctcgggcaagtttaccgccggcatggaagtgacacatgtgcagggcggcaataaaaagatcaagctttcgcagccgcagcagatgatggcgcaggagcgtcatatcgtggacgaggcgtatgcgggagacatcatcggtgtgtttgatccgggtattttttccatcggagatacactcaccacggcgaagccgttcaaattcgagggaatcccgacgttcgcaccggagcattttgcgagagtgcggcaggtggatacgatgaagcgcaagcagttcatgaagggcatgcagcagattgcgcaggaaggtgcgatccagattttccaggagtacaatatgggaatggaggaggtcatcgtcggcgtggtcggtgtactgcagttcgatgtgttgaaataccgcctcgagaatgagtacaatgtggaaatccgcatggatacgcttccgtatgagcatatccggtggattgagaatgaggacatcgatatggataagctggtgggaacctcggatatgaagaagattcaggatctgaagggcagaccgctgttactgtttgtcaatgcatggagtgtcggcatggtattagaccggaacgaaggtctggtactctcggagttcggcagggaatagagcgtgtgtcagagcagctgccggcagaaaacagtgccggcggaatgcacagaaaggaagcagaatatggcagttgttacaattacaaatgaaaattttgaggacgaggtgctggcggcaaaggtgccggtcattctggatttctgggcagagtggtgcggaccgtgtaaaatgcagtcgccggtatttgaggcgctgtccgaggaacttgccggaaaggtgaagttcggaagcgtcaatgtggacgagcaggcgcaggcacagggagaccatcaggcaggccaccccggccggggccgtggcgatgacgccttcgtggcgggcactgcccgcttcctcgctggtcagcccggaagcgtagagttcccgcagatgcaggcgcccggaacgggccgcgcgtgcgaaaccctcggcccgcagcacggagccgtgcacgaacggcacccccgccgcggcggaacgttcttccaatagcattttcagcgcaaggtcgtccagacaatccagggccacatccacatcttgcagcatgtccggcaaatttttttcatccgcttccacatgccgcacatccagggccagatagcctgccatgtcgcgcaaaccgcgcgccgtggccacggccttgggctggcccagcgtgctttccgtgcagaaatactgacgattgaggttgctctcctcaaagatgtcgctgtcgcacaggcgcaggccccccacgcccagccgcgccagcagggaggccacatgcccgcccagaccgccgcagcccaacacgaagacacgagtttgcaacagacgaaccattgcatcagcggaaaaaacaccgtagtttctacggaagcgttccggccagatgccgtcttgcaggagcgcgaccatcacctcccgttcgggaaggacggcccctgcggccagctgccggatggcagtgccgccgacgaagggcgtaccgtccgcagcccggcgcagcacatgcggcccggcccatgaggccagcgagccgtcgtgcaggaacgcgccgaggcgctcccgtatcctggacgctgtccagggcgggaacgccgcggaacatgccccttccccaggggatggcgatgtgatgggtgtcatgatcaacgggcgtctaacctcctccgacagcaggaaaaaaggccacacgagcaccgtcgcatatcttgctctggacctctttttgacgcccgttgatcatgacgatttttatctcttccagcggcagtcccaccatccttgccacatcggcagccgtggcgtcttcgggcgcatcaagcgttatccccgcttctgggtcatatcccggtacatagtcccgcagggtcgtgctcagtttgacgagtatgctcatgctgcctccgatgatggcgtccgccggtcaagaaaaagtgtgacgatccgggcccgccccaaaggcgggcccggtctcagtctatgctacttcttgatccagttgaagaccgtcttcagctcttcgtgcgagatgtcgaaggtcgtgttgtgcggggccacgggctcgtccacgaagaaatcgggcaggtggtcggcggattcggtgatgccggcacgacggttgaagtcgatttcggtggagaggatgcgctggcccagggtgaccacgtcgtcaccggtcagctgccagccgtacttggcgttgagcatgtccacgatggcggccagggcatccgggatgtccaggatggcgaaggcggtgaacaggcacaggcccacggagtccacggaggccgtggcgatctgcaggttgcgggacagttcgatctggccttcgggcttcaacggatcgaccttgccgccgcagctcaggatgttggcggtcacggcgtaaccggcggtgtggtcggcgcccatgggggtggtggcgtaggtcacgcccacgcccttgacggcgcgaggatcgtacgcgggcaggctctggcccttgacgcagggcacgcggcgcacgccgaacacgcggccggtggtggcggtaccgcagccgatgatgcggcccaggggggtaccgtcgctgatgccctgcatggcggccttcacggcctcggcatcaccgtaggggatgccgccgccggccatggcaacgcccacggccacgcccacgtcgatggtgtccacaccgatgtcgtcgcacatgtagtcgaagcggctcacggcgtcgatgtcgctgatgccgctgtggggaccgaaggaccacagggtctcgtattcaggccacttgctctggaacttgccctgcttgtcggggaacaggccggagcagcggatgatgcagccgctcatgcagccgtgggccacggcaccttcgccgccgcgttccttggtcaggcggttcatggtctcgccggacacgccttcgtgcttatcgaactggcccacggtgaagttggcggtgggcagaccgccggcttcgtgcaggatgttcaccagcacgccggtgccgtattcggccaggcccttgccggtgatgggatgctcggtcagagccttggcgaagcgcttggaagcttcgcggaaggccttttcatccgccagaggatggttcttgccgccctcggggttgatgatgatggccttgaggcccttggaacccatgacggcgcccacgccgccgcggccggcgtgacgcatgggacgcagctcgcggtcggtgaaagcgatactggcggcggtcagcttgaactcaccggcgcggccgatggtcacatagctgcacttgtcgccgtaggtctccaccagtttggcgacggcgtcgaagttgttgaggccggccacggtggagggcaccagcttggcggagtccttgctcagttccagctgccaccattcgccttcggtggccatgtcttcaacgatgatggccatgatgcccagcttggccagatggccgccgggctgaccgccggagttggattccttgatgccttcggtgagggggctcttgcagcccacggaaatacggttgccgttggggctgttggtggcgcccagcaggccgggagcgaacaccagcttgttgtgggggcccagcggcgtacagatggggttgacttcgcgcgccacgatggtggaggtcagggcacgaccgcccagaccggcgtattcttcggggatatcttcaaacacacaggtcttggcggccatgttgacccgcaggaaacggaacatgagactctcctttgattgatgcgaaacaaggcagttcagcagtacatccatccagtttgacccaccttagtcccgcaaaaaaaaattggtcaagaaaacggaaaaacagacacgcttccggccctgcccctccccaaaacggacacgcttccggcagggatgcggcccttgaagcgctgattcttaaaaaaatttcataaaacacgacaaaaaacacgcttttgcccggcaatatccaagtctggagcaaaagcgtgtttttggttgagagtcaggacggaaaaactgccttcccctcatgcagactaaccatctggcagccctcgaaaagaccgttggcgacagaaaaacgaaacacgcctttcctcgaaaaaacagggaaaagcgtgtttcgtttcagcagccctgaccgttgtctttgaccgggaacaaagctgtcataaccagcaaaaaaggctgttaaaaaagcagcacataattttttagtcaactgcaaaacagagcataatacagcatgatatttaaaaaagactcttagaaaagatgtatggggacagatcttaaaatccatccccatacaggagctcttttccacagaaaagattaccgtggttgcgctcccaactgccctctgctaaagagcaaataaaaagtatcctcttattctatatactgtcaaggatattcctatgcaggtacgtgatgacgttatcctcggactggacataggcgtgggctctttgggctgggccctgctggaagaagaccttcaaacaggcgagcagcgactgctgcaacggcaggcaccgcagggagaaacatcctatgccctgggagtgcggctattcaatgttcccgaaaaccccaagaccaaggaactgctgaacgtaaagcggcgcacggcccgcatgcagcgccggacgacggcgcggcgggcccaaaggatgcggcgggtccgtgccctgctggacagcctgggagtacccggcgtgcgggatgccgatgcgttccatctgggcaaagggcggggcgcgcaatacgatccgtggcaattgcgccgcgaggggctggagcggcggctggaggcccgggaatgggccgtggtgctgttgcatatcgccaagcatcgcggtttccgttccaacagcaagaccgacagcagcggcagtgacaaagagatgggccaggtattgcaggctgtctcgaatctgcagcaggaagtggaggccagcggcctgaccgtcggtgccctgctggcctcgcgggagcgacgccgcaaccgggccgaccataccggcgcgccgcgttatgacctgtgcatgctgcgcagcttgcaggaagacgaggtgaacatcctgttcacacgccagagggggctgggcaaccctctggccggagaggatatccgctgccgttatgcggagctggccttcgcgcagcggccgctggctcccgtcagccatatggtggggccgtgcgcctttctggaaggggagcgccgggccccgcgcttcgcccccacggccgaactgttccgttatgtccaggccctgtgcactatgcgcctgcggcaggaaacaggggaagagacgcccctgagcgaggaacagcggcaggcggcgtgcgccgtttttggcagcgtgcagtccgtcacctacaaaaaattgcggcaagtactgcggctgcctgccggttgccgtttttcgggcctctcctacggtgtgacggcaaagggcagcgtccaggatcccgaaaaagcggacgtggtcatgcgtaccggcaaatgctgccagggcacggcctgcctgaggggcatccttggcgatgcgtatgacgccctgcatgaacagcggctggacgaggccgacgccgcccggctggccgccacagacgccctgtccgcccctgcggcggccctgctggcgcggggcatggcggggctgcgcctgacggacgcccttgtccgcatcgtgtccgaactcaacgacctgggccagatacgggcgatcctggccctgctgccgctgccggcgccccggaccgcggccctgtcacaggccgccggggaagggaagctgggctttttccagggcacggcacgtctgagcctgcgggccatggaagccatcctgccgcatatgctggcttgcggcgaatatgccgccgcctgcgagctggccgggttcgacccgcgcgcggcacaaaagaccgacgtgacggacatccgcaatccggtggtcctgcgggtcttccgcgaggtgcgccgccagttctccgccatctgccgcgagttcggcttcctgcccggccgggtgcatgtggagctgctgcgcgaggtaggcaagagcggcgaggaacgcaaccgcatctcgcggggcctggaacggcgcaccaaggaaaaggaggccgcccgcaaagccgtggcccaattactgggcaagagcccagaggcggtcagcgccggtgaagtgcagcgctatgaactgtggaggcagcaggacgggaagtgcgcctattacatgctgtggcgccatgcgggcggcgagcgtgcctacggcaacgccatgccgcaaggcagcatccccccggcatggctggccgacggcgtcaatgccgtgcaagtggaccacatcctgccgcgcagccgtaccttcgacaacagtttccacaacctctgcctgtgctgtcacgcggccaaccaggccaagggcggcaggacaccgtgggaatggctgggcgccgcacagccgcaggcctggcacgactttgagcaatgggtccagagcctgccgctcaaaggactgaaaaagcgcaactacctgctgcgcgacctgagcgccgaggtacaggggcgcttccatgcccgcaacctgacggattccagctatgtggcccgcctgaccctgcgctggctggaggaggagtacgcccgccatgacgtgcccatgcaggacgcggacggcaggacgcggcggcgtttcttcgcacggccggggcaggtgacggactttttgcgccgccactggggcgtgcaggccctgaaaaaaatcggcggccagcgctccggcgaccggcatcacgccctggacgccctgctggtggccgcgtgcagcgaagggatgctgcaacgcatggtgcgggccttccagcgggaggagaacggccccgaacgcctgcacatcccctgcccgtggcaggacttcagcaccacggtgggccgggccctgggctcggtcttcgtctcgcgcgtggaacgcggccgcaccaagggccccctgcatgaggagaccctgcgcgccatccgcgaggaacggcagcccgacggggagacgcggcgcgtgctgtacgagcgcaaggccgtggccaggctgacggcggccgacctggacaggatcaaggacgccgcccgctgcccggacgtggtggcggccctgcgccgctggctggatgcgggcaagccgggggacgatctgccccgctcggcacatggcgacatcatccggcatgtgcgcgtgcgcgccggagagttcagcagcggcgtaatcttgcagcggggctccggacaggcccaggccaaaaacggtggcatagtacgtacggacatctacagccgtgacggcaagttctacatggtgcccgtctacgccaaggacgtggcggacaaacgcctgcccctgcgggcctgcgtcgcgcacaaggatgaaaaggactggctcgaactgacggaggactatcacttccttttttccctgacaccggattgctatgtgctgacggagaaccgcaagggcgaggtgaaggaaggctattttgagggtccagatagaggttccgccaatatcagcttaagccttgctcatgataagaaaaatactattcgaggaatcggcatccaaaatctgaagcgctttgaaaaataccgggtggaccgtttcggccgcctgtccctggtccgccgcgaggccgatccccggggccggccatgagctggcggggcctgtgcatcagcagcccggcccggctggacctgcgggccggacgcctgctgctgcgccgggaaggggaggaggacgtgtccctgccgctggaagacctgggctttgtggtcatcgacacgccccaggtccgcctgagcgcggccctgctctcggcctgcgcggaacagggctgcctgctgctgaccgtggatgcccggcacatgccctgcgcggccgtgctgccgctggcgccctactaccggcaactgtccaccctgcaggcccaggtcgcactgggagaagtacgcaaaaaacggctgtggcaggcctgcgtgcgggccaagatcggcaatcaggcggcctgcctgcgcctgctgggccgtgacggcgcggaacgggtggcggccctgcggacaaaagtgggcagcggcgacccggacaatgtggaagccgtggccgcccgcctgtactggagccgcctgttccgccacttccggcgtgacccggacgccgaggacaggtgcaacagcctgctgaactatgcctatgccctgctgcgggcctgtgtggcacgggaactggcggcacggggctttgccccggcgctgggcatccatcacaggggcccgtacaatgccttcaatctggccgacgaccttatggaagcctggcgacctttcgcggacctgctggtggcgcgccatctggaggcgggcccggccggggacgacgcggaactggctccggcggacaaggccgcgttgctgggcctgctgcacgggcaggtggactgggaagggggccgctgcctgctgccccaggccgtgggccgtcaggtggaggccgtgcgtgcctattatgccgaaaaagggccgctgccgccctttccccagcttggggaataaggggggagcatgcctgcggaagaggtgcgatacatgcgtttgctggtctttttcgatctgccggtcaaaacaaaggatgaccagcgggaggccaaccgcttccgcaactttttgctgcgggacggctatgaccgggtgcagctctcggtctatgcccgcgtttgccggggcccggaaaatgtggagacccatatccggcggctgcaaaagaacctgccgccgcacggctgtgtgcgcctgctgcaggtgacggaaaaacagtacggccgcatgagattgctggtgggggacatgccggtcatggaaaaggaggcggccacgcaattgctgcttttctaaaaagtgctgccatacaacgccccatacggaaaaaccttgtgctcttaccggggaaaatcactgttttctccagtaaaaacacaaggttttccattttccagattagcagagggaaattgggagggcaaccacggcggaagatttgttcgtaaggatggaattcctagattagcagagggaaattgggagggcaaccacggcagccgatggtagcggcaatgtcttcctgcgagattagcagagggaaattgggagggcaaccacggccgtgcatagtgatcttgggcagcttacttgagattagcagagggaaattgggagggcaaccacggcctttcagagcttcgagaggggaggtgtcaaagattagcagagggaaattgggagggcaaccacggctccgtagggtcacaccacaggcgaaatttaagattagcagagggaaattgggagggcaaccacggccaccggcagcatggacgcgggcacgttccaagattagcagagggaaattgggagggcaaccacggccccatgatggcaggatgaatgcccgcgtttagattagcagagggaaattgggagggcaaccacggcgtgccctgattgcggcatgagggggccgaaagattagcagagggaaattgggagggcaaccacggccgttatgcacatccatgacgagatcgtggcagattagcagagggaaattgggagggcaaccacggctaaggattgcggtcattatggtggcgcataagattagcagagggaaattggaagggcaaccacggccagccagatgcctgacagccgcgcacagacccgtatgagcggtttttggcggggaggatgggggcacgggggaaggaggggatccttttttccgcaagaaaaagggtcccctccttcccccgtctcacccttgccccggccctctagccttccaggctccagccctggcccagtttgagctgttccccgcccagggcctgcatgagcgcgggatcatgggtggagcagacgatggccgcgccctcggcccggcactgggccacggcggcggcgatggcacgggcgctgcgcacgtccacgttggaggtgggctcgtccagcagcagggcgcgcggacgcagcaccaggcgcgaggccagggccacgcgctggcgttcgccgccggaaagggcgttgggcccgcgacggcgcatggcatcgggatcatcgaagcccacctgccgcatggcggcctgataggcttcctccagtccgtcccggcggccgcgcagcttcaggcccagcaccacgttctcgaacacggtggtcttgagcagatagggctcctggagcagcaggctcacctcgcggcgcgggtcctcgccgccatgatagatgatgcggccctcgtcgggctcttccaaataggccagcaggcgcagcagggtggacttgccgctgccgttgtagcccaccagggtcagcacccggccgctgtggatgcgcagctcgtccacgcccagggcgggcagatctagcgcggtcacgcggccgtaacggcgcaccagcccgcggacttcgtacaaaaggctcatatgcgcccccggtgcttgatgaaggtcatgagcacattgatggcaaaggccatgaacagcagcaccaggcccagcgcgatgccctgggcgaactcgcccttgctggtctccagggcgatggccgtggtcatggtgcgggtatggtagcgcacgttgccgcccagcatcatggcgatgcccacctcggtgatgacgcggccgaaggcagtcaggcagaccatggcgatggcgaagcgcacctcgcacaggctcagccaggccagttgcaggggccgggcgcccagggtcagcagggtctggcggcagcgggggtcgaggccctccacggcctgggccacccacgagaccacgatgggcagggccagcagggtctggccgatggccatgcccggcagggtgaagagcaggccccactcgcccagcgggccgcgataggtgatgaaggcatagaccagcaggccgatgagcacggtggggaaggccagcagggtgtcggagatgaggcgcaagacctttttgccgggaaaatcacagtagcccagggcaaagcccatgggcaggcccatgagcagcgatgccgccatggcgtaggacgtggacaccagcgtggccgtgatggccgagaaggtggcgtcgtccatattggccagcagggcgaaggccgcccagaagccgttgaccagatagtccatagatcaccaggaatgcgacggagggaatccgtggagggaggtcgaaaaacgaaacggggacggcccggagaccgtccccgccaatggacggaaaaacgctacttgccggcgttggggaagaagagctgcttgccttccagcttgaactcggcgatgcgcttctgggtggagggggccacccaccagtcttcaaacttcttgcccaggtcggccttggtcttggggcactgcttggggttcacggtgatgacgctgtactggttgaacagggccttgtcaccttccaccacgatggccagggggttcttggcgccctgctgggcgttgaacttgatccaggtgccgcggtcggtcagggtgtaggcgctcttttcagcggccatgttcagggtggccatcatgccctggccggcggagatgtagaaggcttccttgtcgggattgaggccggactgcttccacagcttgagttcggccttgtgggtgccggactggtcgccgcggctcacgaaagaggcctttttgtcggcgatggtcttgagggcggcggcggtatccttgcccttgacgcccgcggggtcagccttggggcccaccaccacgaagtcgttgtacatcacctgacggcggtcgataccgtgaccggccttgacgaattccttttcagcggcgggggcgtgcaccagcagcacgtcggcgtcacagttcttggcgatctccagggccttgccggtgcccacggccacccatttcagctcgatgccggtctctttctggaaggtgggggccaggaactccagcaggccggtatcctgggtgctggtggtggtggccatcatcagcgtgtcggcagcctgggccggagcggccaggaaggcggcggccagcacgggcaggaacagtttcttcaggtttttcatgatgcgactccttgattggttgatgatgcgccgccggttcggaacggcggccccttgcgggaaatatcagtccagacacaggcgcgcggcccgtgacgggaaatgggcgtagactttctggccctcgtagatgcccacccggagcaggcccggcgtctccactgtggcgcacaggcgcgagccgtcgcccagttccagcgagacgaaggactccacctgatcctggtggatgctctgcaccgtacagggcaggcagttgcccatgctgagcgtggcacggctgcgcgagagcacgatctgttccgggtccaccagcacggtgaccacctggttggcgtggatctccatatgcacgaactggcgcgtgccgcactgcacgccaaggcgcatgtcgccgaaggtgcgcacgctcaccgaggccatgcgcatgcccacggagatgtcctccacgatgcccagaaaggaattgcagagcgggtccgtgccggacgagggccccagggtcttgttctggaccatgcgccgcgcggcgccgtcggaaaagttgaggaaggccgcgatctgcgaaggcttttgctggcccaggaatttctgcaccaagttgaccggcacatgcaggtccagaagctccagcccgcgggcgtagcggatggcgcgcggccccaccatggccctgtccagccccagcggctgggccacggcatagaagctcttgcggatgaagccctggtcgaagtgcaaaaagtccctgcccatgctctcggcctcgggcaggctcaggatgcggcgcacatggcgcatggcgctcaggggcagcagtacgtcccggctgttgggacccggaacatgcaccataccggtcacggtgtccacatccttgcgggcgtccagctccagcgcctcgccaaggcgcaggccgccgtagcgcagcagcaggaacaacagatgcagccgggcacgcgccaccttgcgttggggcgtggcggcctcggcttcccactgctcccagcagcgggaaagggcttccagtttttctcgggtcagatgggacactgcggcggctctctttaggggctgaacgtctcgcgaagactgcgcaaggcatacgacatttcccggctcttgtcacgtttttggcagaatcaggaatgatttttccatgttttggtgaccatcccctcaggcggcgggcagcggcaacagacagccgaacgcgcacgcgccgctcctgtccgcatgatggcgcgaaaacacgccatgtccgcttttttccggcccctgccttgacacggcagcttttatggccctaaatagccgtgacacggatttgcaatttgtaacaccaaaaccggatacgaccgtcaggccgaccggaggatgtcatgccgaccctcatagcctccctgctgcgcaaggcagcgctgctggtgctgatgctgctggcgctctcgctggcggtcttctacatctcgcgcctgacgcccggcgatcccctgcaatcctattacggcgatgccgtgcaatccatgagcagcgccgagctggacgccgcccgccggcgcctgggcctggacggccccatctgggaacagtaccgacgctgggccggcaacgtgctggacggtgacttcggcatgtcgctcaaatacaagcgcccggtggtggacgtggtcctgcccctgctgggcaacaccctgttgctgggcgggctggcctacgcgctggtcttcgtgctggccatcgccctggccctgctctgcgcccgcttcgaacacagcgccctggaccgcctcatctgccgggtgggcaccacggcctattatgtcccggccttctggctgggcgtgctgctggtgctggtcttcagcgtcaatctggaatggctgcccagcagcggcgcctacagctacggcaaggccggcgacatcgccgaccgcgcccgtcatctggtgctgccgctggccgtcatggtggccagccacctgtggtattacgcctacatgatccgcaacaagctgctggacgaagtacggcgcgattatgtgctgctggcccgctccaagggcctgggccgcacccgcgtgctctggagccactgcctgcgcaacgtcatgcccacggtggtgggcatcatggccatctccatcccgcatgtgctcagcggcacctatgtggccgaagccgtgttcaactatcccggcatcggcctgctggccatctccagcgccaagtatcacgattacaacctgctcatgctcatggtcctgttcaccggggccatggtcatcatcagcagtctgctggcccagagcatcaacgaggccatcgacccgcgcatcaagagcggtgaggtggtctgctgatggacgagacccgtacggccccccacagcgccgcgacccggccggaggaggccctccccgacgatgccttcgagctggtgggcgcgggctggcgggaacaccgcccggccctgcgccgtcccggctggcggcagcgcctggcccgtctgcccctgctgcccctgtgcctgctgctcctgctggtgctgggctgcctgtgcgcgccctggctggccaaccacgaccccgccgagttctaccttgccgaccgcaacaccccgcccggcagccggttctttttcggtacagactccctgggccgggacatctattccatcatctggttcggcggccgggcctccctgctcatcggcctgctgagcgccgcggtcatcaccgtgctgggcgtggcctacggctgcctgtccggcatcgccccggcccgtaccgacgccctgctcatgcgccttgtggagctcgtccagagcatccccgtgctgctggtgctgctgctggccgtctcccttctgggcccccagaacgccctgagcatcgccctgctcatcggcgtcacgggctggttcgccctggcccgcatcgtgcgcggcgaggtgcgccagatacgccacagcgaatacatcctggcctcacgctgcatgggcggcagctttggctggatcatgcgccgccatctggtgcccaatgtggtctcggccatcctcttcgtggtcatctcggccgtcagcaccagcatcgccatggaatccaccctcagcttcctgggccttggcctgcctgtggacgaactttcctggggcagcatgctggccctggccgacaaggccctgctgctcaacacctggtgggtgatcctcatccccggcctgttcctggtgacggccctgctctgcatcacgagcctgggtcaccacttccgccgcaacagcgtccggggccccagcaatctctgaacaccggcaggccccgcctgccccggatacatgccgcccgcccgggggcatctttgttcccccgtccgccgagaaccttcaacccgggccccgggcccgccgccgaggaacccccgccgtgaaacgatccctgctgtcctgctgcctgctggctctggccctgctgaccgcccatccggccccggccgccgacatggccaacaccctggtctatgccggcgagaacgaggacaccatcaaccccgtgctcagcccccatcaggaactgcccaccatcatcttttccgggctcatgaagttcgacgccaagggcctgcccgtgcccgacctggccaaaagcgtggactatgatcccaagaccctgacctataccttccacctgcgcgacggggtcaaatggcacgacggcgcgcccttcagcgcccgggacgtggtctacacctacacggccctgaccagcgacaagaccctgacctccaccatcaccagcaactatcaggacatcagccggatctcggccccggacgagcgcaccgtggtcatccggctggcgcgggtcaatgcggccatgctggacaatttctgcatgggcatcctgcccgcccacctctatgagggccacgacatcaacaccgtgcccgccaaccatgctcccgtgggtaccggccgcttcaagttcgtctcctgggacacggccggcggcatgatcgtgctggagcgcaacacggactattacggcaaggtgccgtccatcgagcgcatcgtctacaagaccgtggccgtggagagcaccaaggccctcatgctgcgttccggcgaggccgacctggcctggctcaacgccaagtatgcccgcaccttccgcggcaaggacggcttcaccaccgtggacttcaccaccgccgacctgcgcacggtggccatggacttccacacgcccttctggcagcgcaacaaggactccatcgcggtgctcaactacgccgtggacaagcaggccatcgtggacggcgtgctggcgggccagggcttcccggccttcagccccatccagaccagcccgctgggcggcaaccccgctgccgacgtctatccctatgacctgaaaaaattcgcggccgagatggagcgcctgggctggaaaaagggcccggacggcatctacgcccgcaacggcgagcgcttctccttcaccatccaggtgcgcgactacgaagaagagcgcgtggacatcatcaacgtcctgtcccgccagttcaagaaagccggggtggaaatgaacatcgccctggtcacgcgcttcgactggaaggccggttacaacggctatctggccggttttgccgccgagttcgaccccgacggcgtgttcaagagcttcgtcaccggcgccagcgacaacaacatggcctattccagccccaaggtggacgagctgctgcgtgagggccgcgccaccgaggaccccgccaagcgcaaggccgcctatcaggcctttgaagtggcctatgccgccatgcccgcgcagctgcccctggtctacctgcacggcaactatgtgagcgtggccggtctcaaggggctggataccacccgcgtcctggggcatcatgccgtgggcgtcatgtggaacatcgaagactggaccctgcagcgctagatgccgcgggaagatgtttctgacgggggtgccgtcgtccgcaggccggacgcggtgcccccgtcgtctgccgtcctgcggccccctgtcccgaacctgacgcgccgcaccggccggatggcccgccgggaaaagacgcgggcgcggctgccgttcccgcgccgtacgctgtccgggcccttctccaacctcaaccccgctcctgccatgacgcccctgctgcaactggaagacctgcacatcaccttcgccacccccgccggacaggtacaggccgtgcgcggcgtcgatctggaactgcacgccggggagaccctggccatcgtgggcgaatcgggctgcggcaagtccgtgctttgccgctccatcctgcgcctgctgccggacaatgcccgcatctcgggccgcatcctgctggaaggccgcgacatcgtgccctgcagcgaacggcagatgcgcgccgtgcgcggcccgcaggccgccatgctcttccaggatcccatggccagcctcaaccccaccctgcccgtgggcgaccagatcatggaggccctgcgccgccatcgccgcatgcgcccggagcaggcccgg

SEQ ID NO: 3293 - DNA, 10264 bp, synthetic construct
  source 1..10264: mol_type = other DNA
  misc_feature 1..10264: note = Synthetic
ccttcccccacaaaaaacaaaaaaggccggaagaaggagaattcttccggccgggccgccccccaaggcagccccgcactgcctgcccgcctgtgcgtcgggcgcaggtagtcggctgtggagaaatatgctggctgccgccgtcaggcatcctcacgagagatgcccggcagggcgcactttaaaattcaaaacgttccagttccggcacggagaagtcggcatggaacagggccgaatccccggcatcgggccgcagcagcaggcgcagacacagggagaccatcagacaggccacccctgccggagccgtggcgatgacgccttcgtggcgggcactgcccgcttcctcgctggtcagcccggaagcgtagagctcccgcagatgcaggcgcccggaacgggccgcacgtgcgaagccctcggcccgcagcacggaaccgtgcacgaacggcacccccgccgcagcggaacgttcttccaatagcattttcagcgtaaggtcgtccagacaatccagggccacatccacatcctgcagcatgttcggcaaatttttttcgtccgcttccacatgccgcacatccagggcaagatagcccgccatgtcatgcaggccgcgcgccgtggccacggccttgggctggcccagtgtgctttccgtgcagaaatactgacgattgaggttgctctcctcaaagatgtcgctgtcgcacaggcgcaggccgcccacgcccagacgtgccagcagggaggccacatgccccccgaggccaccgcagcccagcacgaagacacgggtttgcaacagacggaccattgcatcagcggaaaaaacaccgtagtttctacggaagcgttccggccagatgccgtcttgcaggagcgcgaccatcacctcccgttcgggaaggacggcccctgcggccagctgccggatggcggcgccgctgacgaagggcgttccgtccgcagcccggcgcagcacatgcggcccggcccatgaagccaggctagcgccgtgcaggaacgcgccgaggcgttcccgtatcctggacgccgtccaaggcaggaacgccgcgggatattccccttccccaggggatggcgatgtgatggatgtcatgatcaacgggcgtctaacctcctccgacagcaggaaaaaaggccacacgagcaccgtcgcatatcttgctctggacctctttttgacgcccgttgatcatgacgatttttatctcttccagcggcagtcccaccatccttgccacatcggcagccgtggcgtcttcgggcgcatcaagcgttatccccgcttctggatcatatcccggtacatagtcccgcagggtcgtgctcagtttgacgagtatgctcatgctggcctccgatgatggcgtccgccggtcaagaaaaagtgtgacgacccgggcccgccccaaaggcgggcccggtctcagtctatgctacttcttgatccagttgaagaccgtcttcagctcttcgtgcgagatgtcgaaggtcgtgttgtgcggggccacgggctcgtccacgaagaaatcgggcaggtggtcggcggcttcggtgatgccggcacgacggttgaagtcgatttcggtggagaggatgcgctggcccagggtgaccacgtcgtcaccggtcagctgccagccgtacttggcgttgagcatgtccacgatggcggccagggcatccgggatgtccaggatggcgaaggcggtgaacaggcacaggcccacggagtccacggaagccgtggcgatctgcaggttgcgggacagttccacctggccttcgggcttcaacggatcgaccttgccgccgcagctcaggatgttggcggtcacggcgtaaccggcggtgtggtcggcgcccatgggggtggtggcgtaggtcacgcccacgcccttgacggcgcgaggatcgtaggcgggcaggctctggcccttgacgcagggcacgcggcgcacgccgaacacgcggccggtggtggcggtaccgcagccgatgatgcggcccaggggggtaccgtcgctgatgccctgcatggcggccttcacggcttccacgtcaccgtaggggatgccgccgccggccatggcaacgcccacggccacgcccacgtcgatggtgtccacaccgatgtcgtcgcacatgtagtcgaagcggctcacggcgtcgatgtcgctgatgccgctgtggggaccgaaggaccacagggtctcgtactcaggccacttgctctggaacttgccctgcttgtcggggaacaggccggagcagcggatgatgcagccgctcatgcagccgtgggccacggcaccttcgccgccgcgttccttggtcaggcggttcatggtctcgccggacacgccttcgtgcttgtcgaactggcccacggagaagttggcggtgggcagaccgccggcttcgtgcaggatgttcaccagcacgccggtgccgtattcggccaggcccttgccggtgatgggatgctcggtcagggccttggcgaagcgcttggaagcttcgcggaaggccttttcatccaccagaggatggttcttgccgccctcggggttgatgatgatggccttgaggcccttggagcccatgacggcgcccacgccgccgcggccggcatgacgcatgggacgcagctcgcggtcggtgaaagcgatactggcggcggtcagcttgaactcaccggcgcggccgatggtcacatagctgcacttgtcgccgtaggtctccaccagtttggcgacggcgtcgaagttgttgaggccggccacggtggagggcaccagcttggcggagtccttgctcagttccagctgccaccattcgccttcggtggccatgtcttcaacgatgatggccatgatgcccagcttggccagatggccgccgggctgaccgccggagttggcttccttgatgccttcggtgagggggctcttgcagcccacggaaatacggttgccgttggggctgttggtggcgcccagcaggccgggggcgaacaccagcttgttgtgggggcccagcggcgtacagatggggttgacttcgcgcgccacgatggtggaggtcagggcacgaccgcccagaccggcgtattcttcggggatatcttcaaacacacaggtcttggtggccatgttgacccgcaggaaacggaacatgagactctcctttgattgatgcaaaacaaggcagttcagcagtacatccatccagtttgccccaccttagtcccgtggaaaaaatttggtcaagaaaacggaaaaacagacacgcttccggccctgcccctcccccaaaaggacacgcttccggcagggatgcggcccttgaagcgctgatccttgaaaaaatttcataaaacgcgacaaaaaacacgcttttgcctgccgatttccaaatcaggggaaaaagcgtgtttttttgtggctgcaggcatggccccatgcgctcccttcctccctgtccgctcccctgccgcaacctgcccgctgtccagccggcccgtcccggcggcgcctgtcccgctgccccgtcccatatccggccgccggacagcgtatagctgtgccggacagccctgcacggccccaggccggaacggacgacaggagcagggtgggccttcacttcacggctgccgtccgcgacagctttcgccaaggaggatgctatgagcacaacgtacggatatgtcagggtctccagtaccgaccagaacaccgaccggcagcacctggccctgcaggagcagggcatccccccggaacgtatcttcacggaccgtctttcgggcaaggatttccagcggccccaatatcgggagctcctggcccggctacgccccggggacctgctctgcgtcacgagcatcgaccggctgggaaggaattatgaggagatacagcggcaatggcgcatccttacccgggacatgcgcgtggacatccgcgtactggacatgccgctgctggacacgcgaagggacagggacctgctggggacgttcatcgccgaccttgtcctgcaggtgctttcgttcatcgcccagaacgagcgggagaatatccgccggcggcaggcggaaggcatcgcggcggcgcgcttgcggggcatccgcttcggcagggaacccaggcccctgccccgcaatttcgtcgagatctacgaactctggaaaacaggggccatcccgacgacggaagcggcgaaacgctgcggcatggcacgctcaacgtttcgctatcgggctgaatccataaggaaaaacgactgctgacatggcaaaatggtgtactttttcaccatgtcataattgtccatcttcctacaacgaaaaatattattctgtaaacacaataccctagcctcacaaaccattacgactctggtgaaaaagtacactttttcgtcattcttgtttgtgcgcaaggcctgcctccccttacgacaccagctgtctcttcctgccccgactcgcaacggcaggcagcccatcccgacttcacaggaagaccacatgtccgaagacatcgtcatgatcgcagcccataacctgcaactgcggcgcaagcaggcaggcttcacccagaaagaagcggcccatttgctgggactggaagccgagaccgtctgccgcatggaaaaaggccacaacccggtcagcctgaagcgcctgcaacaattcgcgggtctgtacggctgtacggtcatcgaccttttgcagccgcccaaagcgtagcccccaaccggcaggtccccccttcagccggccgccaccgcactgccggcatctcccgaaacgcgcccggcatttcccttgccaaccggacacgggccatacgccgccagaaaacgaaacacgcttttgccccccgatacgggacaaaagcgtgtttcgtttttcgacagccatgaccgtcacacagcgtccaggaacagagacaccataaccatcaaagaaagctatcaaaaagcagcacaggattttttaatcaactgcaaaacagagcataatgcagcatgatattttaaaaaagactcttaagaaagatgtatggggacagaccttaagatccatccccatacaggagctcttttccacagaaaagattaccgtggttgcgctcccaactgccctctgctaaagagcaaataaaaagtatcctcttattctatatactgtcaaggatattcctatgcaggtacgtgacgacgttatcctcggactggacataggcgtgggctctttgggctgggccctgctggaagaagaccttcaaacaggcgagcagcgactgctgcaacggcaggcaccgcagggagaaacatcctatgccctgggagtgcggctgttcaatgttcccgaaaaccccaagaccaaggaactgctgaacgtaaagcggcgcacggcccgcatgcagcgccggacgacggcgcggcgggcccaaaggatgcggcgggtccgtgccctgctggacagcctgggagtacccggcgtgcgggatgccgatgcgttccatctgggcaaagggcggggcgcgcaatgcgatccgtggcaattgcgccgcgaggggctggagcggcggctggaggcccgggaatgggccgtggtgctgttgcatatcgccaagcatcgcggtttccgttccaacagcaagaccgacagcagcagcggcagcgacaaggagatgggccaggtattgcaggctgtctcgaatctgcagcaggaagtggaggccagcggcctgaccgtcggtgccctgctggcctcgcgggagcgacgccgcaaccgggccgaccataccggcgcgccgcgttatgacctgtgcatgctgcgcagcttgcaggaagacgaggtgaacatcctgttcacacgccagcgggagctgggcaaccctctggccggagaggatatccgctgccgttatgcggagctggccttcgcgcagcggccgctggctcccgtcagccatatggtggggccgtgcgcctttctggaaggggagcgccgggccccgcgcttcgcccccacggccgaactgttccgttatgtccaggccctgtgcactatgcgcctgcggcaggaaacaggggaagagacgcccctgagcgaggaacagcggcaggcggcgtgcgccgtcttcggcagcgtgcagtccgtcacctacaaaaaattgcggcaggtactgcgcctgcctgccggttgccgttttgtgggcctttcctacggcgtgacgggaaagggcaaggtccaggatcccgaaaaagcggacgtggtcatgcgtaccggcaaatgctgccagggcacggcctgcctgaggggcatccttggcgatgcgtatgacgccctgcatgaacagcggctggacgaggccgacgccgcccggctggccgccacagacgccctgtccgcccctgcggcggccctgctggcgcggggcatggcggggctgcgcctgacggacgcccttgtccgcatcgtgtccgaactcaacgacctgggccagatacgggcgatcctggccctgctgccgctgccggcgccccggatcgcggccctgtcacaggccgccggggaagggaagctgggctttttccagggcacggcacgtctgagcctgcgggccatggaagccatcctgccgcatatgctggcttgcggcgaatatgccgccgcctgcgagctggccgggttcgacccgcgcgcggcacaaaagaccgacgtgacggacatccgcaatccggtggtcctgcgggtcttccgcgaggtgcgccgccagttctccgccatctgccgcgagttcggcttcctgcccggccgggtgcatgtggagctgctgcgcgaggtaggcaagagcggcgaggaacgcaaccgcatctcgcggggcctggaacggcgcaccaaggaaaaggaggccgcccgcaaagccgtggcccaattactgggcaagagcccagaggcggtcagcgccggtgaagtgcagcgctatgaactgtggaggcagcaggacgggaagtgcgcctattacatgctgtggcgccatgcgggcggcgagcgtgcctacggcaacgccatgccgcaaggcagcatccccccggcatggctggccgacggcgtcaatgccgtgcaagtggaccacatcctgccgcgcagccgcaccttcgacaacagtttccacaacctctgcctgtgctgtcacgcggccaaccaggccaagggcggcaggacaccgtgggaatggctgggcgccgcacagccgcaggcctggcacgactttgagcaatgggtccagagcctgccgctcaagggcctgaaaaaacgcaactacctgctgcgtgacctgagcgccgaggtacaggggcgcttccatgcccgcaacctgacggattccagctatgtggcccgcctgaccctgcgctggctggaggaggagtacgcccgccatgacgtgcccatgcaggacgcggaaggcaggacgcggcggcgtttcttcgcgcggccggggcaggtgacggactttttgcgccgccactggggcgtgcaggccctgaaaaagatcgacggccagcgctccggcgaccggcatcacgccctggacgccctgctggtggccgcgtgcagcgaagggatgctgcaacgcatggtacgggccttccagcgggaggagaacggccccgaacgcctgcacatcccctgcccgtggcaggacttcagcgccacggtggggcgggccctgggctcggtcttcgtctcgcgcgtggaacgcggccgcaccaagggccccctgcatgaggagaccctgcgcgccatacgcgaggaacggcagcccgacggggagacgcggcgcgtgctgtacgagcgcaaggccgtggccaggctgacggcggccgacctggacaggatcaaggacgccgcccgctgcccggacgtggtggcggccctgcgccgctggctggatgcgggcaagcccggagatgccctgccccgctcggcacatggcgacatcatccggcatgtgcgcgtctgcgccggagagttcagcagcggcgtggtgctgcaacggggctcgggacaggcccaggccagcaacggcggcatggtgcgcacggacatctacagccgtgacggcaagttctacatggtgcccgtctatgccaaggacgtggcggacaggcgcctgcccctgcgggcctgtgtggccgccaaagcggaaaaagactggcgcgagatgacggcggattaccgtttcctcttttccctgacgccggactgctatgtgctgacggagaaccgcaaaggcgaagtgaaggaggggtattttataggcagcgaccgcagtacggccgccatcagtctgagcctggcccacgataggcagcaaagcctgcgaggcatcggcatcaccacattaaaacgttttgaaaaataccgggtggaccgtttcggccgcctgtcgccggtccgccgcgaggccgatccccggggccggtcatgagctggcggggcctgtgcatcagcagcccggcccggctggatctgcgggccgggcgcctgctgctgcgccgggagggggaggaggacgtggccctgccgctggaagacctgggctttgtggtcatcgacacgccccaggtccgcctgagcgcagccctgctctcggcctgcgcggaacagggctgcctgctgctgaccgtggatgcccggcacatgccctgcgcggccgtgctgccgctggcgccctattaccggcaactgtccaccctgcaggcccaggtcgcactgggagaagtacgcaaaaaacggctgtggcaggcctgcgtgcgggccaagatcggcaatcaggcggcctgcctgcgcctgctgggccgtgacggcgcggaacgggtggcgaccctgcggacaaaagtgggcagcggcgacccggacaatgtggaagccgtggccgcccgcctgtactggagccgcctgttccgccacttccggcgtgacccggacgccgcggacaggcgcaacagcctgctgaactatgcctatgccctgctgcgggcctgtgtggcacgggaactggcggcacggggctttgccccggcgctgggcatccatcacaggggcccgtacaatgccttcaatctggccgacgacatgatggaagcctggcgacctttcgcggacctgctggtggcgcgccatctggaggcgggcccggccggggacgacgcggaactggctccggcggacaaggccgcgttgctgggcctgctgcacgggcaggtggactgggaagggggccgctgcctgctgccccaggccgtgggccgtcaggtggaggccgtgcgtgcctattatgccgaaaaagggccgctgccgccctttccccagcttggggaataaggagggagcatgcctgcggaagaggtgcgatacatgcgtttgctggtctttttcgatctgccggtcaaaacaaaggatgaccagcgggaggccaaccgcttccgcaactttttgctgcgggacggctatgaccgggtgcagctctcggtctatgcccgcgtttgccggggcccggaaaatgtggagacccatatccggcggctgcaaaaaaacctgccgccgcacggctgcgtgcgcctgctgcaggtgacggaaaaacagtacggccgcatgagattgctggtgggggacatgccggtcatggaaaaggaggcggccacgcaattgctgcttttctaaaaagtgctgcccatacagcaccccatacggaaaaaccttgtgctcttaccggggaaaatcactgttttctccagtaaaaacacaaggttttccattttccagattagcagagggaaattgggagggcaaccacggcgtaaactagactgcaatcacaagtgctcagagattagcagagggaaattgggagggcaaccacggcaggggggcgcgggttcaatccccgccgctcagattagcagagggaaattgggagggcaaccacggctggccactgatcgttaccacgcccgcttgaagattagcagagggaaattgggagggcaaccacggcgccgttggccgtggccataagctcccctgcagattagcagagggaaattgggagggcaaccacggcaggcgctccagcgcttaaaagcacgcgcccagattagcagagggaaattgggagggcaaccacggcgtaaactagactgcaat

SEQ ID NO: 3294 - DNA, 4713 bp, synthetic construct
  misc_feature 1..4713: note = Synthetic
  source 1..4713: mol_type = other DNA
gtgcgcctgtccatgcccgccccgcgctcctgtcgcctgacccgggcctgggccacgctggccgcctgcaccggccaggccgtgcgcatcgctcccgccctgatgaacgatcccgtcgtggattgcgtcaagctgctcaaccagctgggcgcccatgccaaccgtgacgacggtgccgtgcatgtggccgccggcacgcccctgggcaccccggacaaggtgctgcatgtgggcgacagctcctggaacttctatctggccctgggccattacctgggccgtccttcgcgtaccaagttcaccggcggcgcggccctcaagctggccgacctcagcgccacccgccgcttcctgcccctcatgggcgcgcgtctggtgcatgtggtgcccaagtccgacggcttcccggtgcgcatcgaatgctccggcgtgctgcccggcaaggtggtcttccccgccgatgccccggtggaactggccgaaggcatcatgctggccgcgccttcctatgagcgcgccatcactctggacctttccgccatgcccgagcgtgcgctggcctttgcccgcatcctgcccgtgctgaacgctgccggtgccgacgtgcgccgcgaaggcgacgtgctccacttccagccctgcgccctgagcatcccctccgagcccaccctgcccgtggaaccggaactggccgtgttcctgatgggccttgccccggctctgggcggtgaagtgcgcctggaaggccagtggcccacctggcccggcacctgatgcagaccgccagccattcccgcctgctggacatccagtacctgctgctttccctgcccggcgccgtgctggccctgctgccgctggccgcgccccggatcgcggccctgtcacaggccgccggggaagggaagctgggcatctttcagggcacggcacgtctgagcctgcgggccatggaagccatcctgccgcatatgctggcttgcggcgaatatgccgccgcctgcgagctggccgggttcgacccgcgcgcggcccaaaagaccgacgtgacggacatccgcaatccggtggtcctgcgcgtcttccgcgaggtgcgccgccagttctccgccatctgccgcgagttcggctttctgcccggccgggtgcatgtggagctgctgcgcgaggtaggcaagagcggtgaggaacgcaaccgcatctcgcggggcctggaacggcgcaccaaagaaaaggaagccgcccgcaaagccgtggcccaattactgggcaagagcccggaaacggtcagcgccggggaagtgcagcgctatgaactgtggaggcagcaggacgggaagtgcgcctattacatgctgtggcgccatgcgggcggcgaacgtgcctacggcgatgccatgccgcaaggcagcatccccccggcatggctggccgacggcgtcaatgccgtgcaggtggaccacatcctgccgcgcagccgtaccttcgacaacagttttcacaacctctgcctgtgctgccacgcggccaaccaggccaagggcggcaggacgccgtgggaatggctgggggccgcacagccgcaggcctggcacgactttgagcaatgggtccagagcctgccgctcaagggcctgaaaaagcgtaactacctgctgcgcgacctgaacgccgaggtacaggggcgcttccatgcccgcaacctgacggattccggttatgtggcccgcctgaccctgcgctggctggaggaggagtacgcccgccatgacgtgcccatgcaggacgcggacggcaggacgcggcggcgtttcttcgcacggccggggcaggtgacggactttttacgccgccactggggcgtgcaggccctgaaaaagatcgacggccagcgctccggcgaccggcatcacgccctggacgccctgctggtggccgcgtgcagcgaagggatgctgcaacgcatggtgcgggctttccagcgggaggagaacggccccgaacgcctgcacatcccctgcccgtggcaggatttcagcgccacggtggggcgggccctgggctcggtcttcgtctcgcgcgtggaacgcggccgcaccaagggccccctgcacgaggagaccctgcgcgccatacgcgaggaacggcagcccgacggggagacgcggcgcgtgctgtacgagcgcaaggccgtggccaggctgacggcggccgacctggacaagatcaaggacgccgcccgctgcccggacgtggtggcggccctgcgccgctggctggatgcgggcaagcccggggatgccctgccccgctcggcacatggcgacatcatccggcatgtgcgcgtctgcgccggagagttcagcagcggcgtggtgctgcaacggggatcgggacaggcccaggccagcaacggcggcatggtgcgcacggacatctacagccgtgacggcaagttctacatggtgcccgtctacgccaaggacgtggcggacaagcgcctgcccctgcgggcctgtgtggccgccaaagcggaaaaagactggcgcgagatgacggcggattaccgtttcctcttttccctgacgccggactgctatgtactgacggaaaaccgcaagggagaggtcaaggaggggtattttgcgggtgccaacagaaatacgagcgccatcagcttgagtctggctcatgacaagcaaaacgttattcagggcatcggcatcaccacgttaaagcgttttgaaaaataccgggtggaccgtttcggccgcctgtccctagtccgccgcgaggccgatccccggggccggtcatgagctggcggggcctgtgcatcagcagcccggcccgtctggatctgcgggccgggcgcctgctgctgcgccgggaaggagaagaggacgtggccctgccgctggaagacctaggcttcgtggttatcgacacgccccaggcccgcctgagcgcggccctgctctcggcctgcgcggaacaaggttgcctgctgctgaccgtggatgcccggcacatgccctgcgccgccgtgctgccgctggcgccctattaccggcagctgtccaccctgcaagcccaggcggggctgggagaagtacgcaaaaaacggctgtggcaggcctgcgtacgggccaagatcggcaatcaggcggcctgcctgcgcctgctgggccgtgacggcgcggaacgggtggcggccctgcgggccaaagtgggcagcggcgacccggacaatgtggaagccgcggccgcccgcctgtactggggccgcctgttccgccacttccggcgtgacccggacgccgaggacaggcgcaacagcctgctgaactatgcctatgccctgctgcgggcctgtgtggcacgggaactggcggcacggggctttgccccggcgctgggcatccatcaccggggcccgtaatctggccgacgacatgatggaagcctggcgacctttcgcggacctgctggtggcgcgccatctggaggcgggcccggccggggacgacgcggaactggctccggcggacaaggccgcgttgctgggcctgctgcacgggcaggtggactgggaagggggccgctgcctgctgccccaggccgtgggccgtcaggtggaagccgtgcgtgcctattatgccgaaaaagggcctctaccgccctttccccagcttggggaataaggggggagcatgcctgcggaagaggtgcgatacatgcgtttgctggtctttttcgatctgccggtcaaaacaaaggatgaccagcgggaggccaaccgcttccgcaactttttgctgcgggacggctatgaccgggtgcagctctcggtctatgcccgcgtttgccggggcccggaaaatgtggagacccatatccggcggctgcaaaagaacctgccgccgcacggctgtgtgcgcctgctgcaggtgacggaaaaacagtacggccgcatgagattgctggtgggggacatgccggtcatggaaaaggaggcggccacgcaattgctgcttttctaaaaagtgctgcccatacagcgccccatacggaaaaaccttgtgctcttaccggaaaaaacactgttttctccagtaaaaacacaaggttttccattttccagattagcagagggaaattgggagggcaaccacggcgtgcttccgatgggctctagctgtcagttcagattagcagagggaaattgggagggcaaccacggcgttcggccacgccacacgcaaacagcgttgagattagcagagggaaattgggagggcaaccacggccgagacttcaaggatgccaaggttgttggtagattagcagagggaaattgggagggcaaccacggccaacgtagatcagctcgacggctaccacgcagattagcagagggaaattgggagggcaaccacggcaacaaggtggacagtccgggcaccgtgggcagattagcagagggaaattgggagggcaaccacggcggaagtccggcccgtcagttccaccaggtcagattagcagagggaaattgggagggcaaccacggcttctccttcgcttgcttcgttgagggcatcagattagcagagggaaattgggagggcaaccacggccagccagacgcctgacagccgcgcacagacccgtatgagcggtttttggcggggaggatgggggtacggggga

SEQ ID NO: 3295 - DNA, 4691 bp, synthetic construct
  misc_feature 1..4691: note = Synthetic
  source 1..4691: mol_type = other DNA
tttccgaggcggtggaggccatcgaggtctcgccggtggaaggcgtccgctctaccggggccagctttctggaagagatcatcttcggggtcatcccgcaggtgttccccctctggatatcctactcgctgtaccgcttcgaggccaatgtgcgctctgccacggtggtgggcatggtcggtgccggcggtataggcatggtgctgtgggaactgttccgcagcttcaacttccagcagacgtgcgcggtcatggccatcatcgtgctggtggtgaccctgttcgacctgctttcccagcgtctgcgcaaaatggtgctgtaagatggccgcccgttacgctctctactacgcccccccacaaggacgagcccctgtaccgtctgatggctcctctgttcggccgggactgccgggacggcagccgcctgccgggcggccccgtggctcctgcgggggtggaacatggtctttggacatccctagaagtcatttcataattccagaaaaagtcataaaaatcgtgtaatcgaatttcatgagcaaataccaaagattaacagatgaccaatgggcaattttggaacctctccttgcaaatgaggcttcttccgtgcggggaaggcctcctgtccatgatgaccgctctgtactgaacggcatcttatgggtattgcgcactggtgccgcctgggctgacttgccggagagattcccgtcttcatcaacctgctatcgccgattcagcaagtgggtcaaaacgggcgtattccgaaaaatccttgaggctctcgcccgtgaccttgaagagcgtggggccataaacctctcggaatgcttcattgacggcacgttcgtggtggcaaaaaaaggggcgcaaaagtgggaaagaccaagcgggggaaaggtacgaagctcatggttattgcagacgcttctggtcttccactcgccctgcacacggattctgctggtcctcatgaagtcacccttgtccaagctaccctcgatgaaattgtcacagtgggacagcccagaagaattattggggatcgtgcctatgacagtgatccgctcgataacgcccttgctgcccaagggattgagatgatcgcaccacatcggcgcaatcgaaagcgtaaagcaacgcaggatggtcgccccttgcggcgttatcgtcgccgttggaaaatcgaacgactttttgcttggctcaatacgttcaagcggacaatggcacgctgggacaggttccaccaacactttaccgcctttgttcatttggcattttccatgattttactcagaagagtcatcaaggaattatgaaatgacttctagtcaactgcaaaacagagcataatacagcatgatatttaaaaaagactcttagaaaagatgtatggggacagatcttaaaatccatccccatacaggagctcttttccacagaaaagattaccgtggttgcgctcccaactgccctctgctaaagagcaaataaaaagtatcctcttattctatatactgtcaaggatattcctatgcaggtacgtgacgacgttatcctcggactggacataggcgtgggctctctgggctgggccctgctggaagaagaccttcaaacaggcgaacagcgcctgctgcaacggcagaccccgcagggagagacaacctatgccctgggggtgcggctgttccatgttcccgaaaacgccaagaccaaggagctgctgaacgtaaagcggcgcacggcccgcatgcagcgccggacgacggcgcggcgggcccaaaggatgcggcgtgtccgtgccctgctggacagcctgggagtgcccggcgtccgggatgccgatgcgttccatctgggcaaagggcggggcgcgcaatgcgatccctggcaattgcgccgcgaggggctggagcgacggctggaggcccgggaatgggccgtggtgctgttgcatatcgccaagcatcgcggtttccgttccaacagcaagactgaccgcagcggcagtgacaaggagatgggccaggtattgcaggctgtctcgaatctgcagcaggaagtggaggccagcggcctgaccgtcggtgccctgctggcctcgcgggagcgacgtcgcaaccgggccgaccataccggcgcaccgcgttatgacctgtgcatgctgcgcagcttgcaggaaaacgaggtggatatcctgttcacacgccagcgggagcttggcaaccctctggccggagaggaggtccggtgccgttatgcggagttggccttcgcgcagcggccgctggctcccgtcagccatatggtggggccgtgcgcctttctggaaggggagcgccgggccccgcgcttcgcccccacggccgaactgttccgttatgtccaggcgctgtgcaatatgcgcctgcgacaggaaacaggggaagagacgcccctgagcgaggaacagcggcaggcggcgtgcgccgttttcggcagcgtgcagtccgtcacctacaaaaaattgcggcaggtactgcgcctgcctgccggttgccgttttgcgggcctttcctacggtgtgacggaaaagggcaacgtccaggatcccgaaaaagcggacgtggtcatgcgtaccggcaagtgttgccagggcacggcctgcctgaggggcatccttggcgatgcatatgaagccctgcatgaacagcgtctggacgaggccgacgccgcccggctggccgccacgggcgccctgtccgccccggcggcggccctgctggcgcggggcatggcggggctgcgcctgactgatgcggtggcccgcatcgtgtccgaactcaatgatctggaccagatccgcgccgtgctggccctgctgccgctggccgcgccccggatcgcggccctgtcacaggccgccggggaagggaagctgggcatctttcagggcacggcacgtctgagcctgcgggccatggaagccatcctgccgcatatgctggcttgcggcgaatatgccgccgcctgcgagctggccgggttcgacccgcgcgcggcccaaaagaccgacgtgacggacatccgcaatccggtggtcctgcgcgtcttccgcgaggtgcgccgccagttctccgccatctgccgcgagttcggctttctgcccggccgggtgcatgtggagctgctgcgcgaggtaggcaagagcggtgaggaacgcaaccgcatctcgcggggcctggaacggcgtaccaaagaaaaggaagccgcccgcaaagccgtggcccaattactgggcaagagcccggaaacggtcagcgccggggaagtgcagcgctatgaactgtggaggcagcaggacgggaagtgcgcctattacatgctgtggcgccatgcgggcggcgaacgtgcctacggcgatgccatgccgcaaggcagcatccccccggcatggctggccgacggcgtcaatgccgtgcaggtggaccacatcctgccgcgcagccgtaccttcgacaacagttttcacaacctctgcctgtgctgccacgcggccaaccaggccaagggcggcaggacgccgtgggaatggctgggggccgcacagccgcaggcctggcacgactttgagcaatgggtccagagcctgccgctcaagggcctgaaaaagcgtaactacctgctgcgcgacctgaacgccgaggtacaggggcgcttccatgcccgcaacctgacggattccggttatgtggcccgcctgaccctgcgctggctggaggaggagtacgcccgccatgacgtgcccatgcaggacgcggacggcaggacgcggcggcgtttcttcgcacggccggggcaggtgacggactttttacgccgccactggggcgtgcaggccctgaaaaagatcgacggccagcgctccggcgaccggcatcacgccctggatgccctgctggtggccgcgtgcagcgaatggatgctgcaacgcatggtgcgggctttccagcgggaagagaacggccccgaacgcctgcacatcccctgcccgtggcaggatttcagcgccacggtggggcgggccctgggctcggtcttcgtctcgcgcgtggaacgcggccgcaccaagggccccctgcacgaggagaccctgcgcgccatacgcgaggaacggcagcccgacggggagacgcggcgcgtgctgtacgagcgcaaggccgtggccaggctgacggcggccgacctggacaagatcaaggacgccgcccgctgcccggacgtggtggcggccctgcgccgctggcgggcgtgccagaaatgtacattcaaccctaaccaaaaggataagcactatggttgctgaacgccttgagcgcctgttgaacagtcttgttttggccctgcgtgacgattccaaggggaccggcatggaagttggtcagattatcaacaatatgcgcaacgaaatcaaagtattgtcctcagccgaagaagcggctttccatctgtggctctcgcaccagtacgctaagaaatacacaaaggttcattgggaagaactccccaacatgtaaggagaaaaacaatgcttaacgaatcccaactccctgacggttatatggaaaacgcgcaagggtgtctcgtgccgattgccaacatccgcccgatcgacattgagcgtgacgcgctggtcaagg

SEQ ID NO: 3296 - DNA, 23216 bp, synthetic construct
  misc_feature 1..23216: note = Synthetic
  source 1..23216: mol_type = other DNA
ccaagatacaatgataaaagattcttttgaggcaacagtaaataaacctgaacagaaaatgagatatgtaattatgaatcctccatttggacaaccatggggaggaaaagatgctgcagaaggtgttgaagaagcagtgggtgaagaatataaaaagggatttaaaggaagatttggtgcaggattaccaggaacaggggatatgcaacttttattcatgcaacatgcaatttcaaaattagatgataatggtaaagctgcaattataacaaatggttctccactattttctggtggaacttcatcaggagaaagtcaaataagaagatacatgatagaacaagatttaatagaagcaattatagctcttcctacagatttattttataacactaatattggaatttatgtatttatactatcaaaagaaggtacaaaaagaaaagatagaagaggtaagatacaactaataaatgcaacatctgaagatttttggacacaacttagaaaatcacttggtaaaaagagaaaagaattaagtcctaaacagatagaaaaaattgttaagatttatgctaactttaaagataataagtattgtaagatatttgataaggaggaatttttatatagagaatatgcagtatatcaaccattacaaaggaattatgctatcacagctgaaagaattgaaaatatgttaaattctggttgtttgtctaatttatatgatcctgaaaaagtggaggaattacaattattagatcctatccctgcaaaggataaaaaacaattagataaatatttagaaggtaaaccaatatatgatgaaattgttaatttactaaaaaataatgtatcagaaaatatttataagaaggaaagtgaatttttaccttttattaaaaatatattaaaaaatgttgataaaaagatattagataaaattattgatggattatcagaaatggataaaacagcagaaatacataaagacaaaaaaggtgagattatattagacaagactacgaaggatacagaaatagttaaatataataaagatataaaagagtatatggaggaagaagtgttgccacatgtaccagatgctatatatcagtttgaagaagatttaaatgcaaagaaaccagtaataaaaacaggtgctgaaattccatttacaagatatttttatgaatataaagaaccaaacaaagctgaaaatttgttaaaagaattcatgattattgaaaacggattaaacgaccaaataaaagaattgcttggggaggtataaatatgtcaaatatgagaaatagcggtgttgaatggattggagatattcctgtagaatgggatgtaaaaaaaggaaaatatgattttgattttattaatggatttgcttttgattcacaagatatgaatgtagaaggaaatttcccagttattagaataggtgatatacaagaaggaatagtttcatttgataattgtttatatgttcaagataataaaggattagaacgatataaaatcaataaaggagatttactattagcaatgagtggggcaactgttggaaaagttggtataatgaatacggatattttggcatatattaatcagcgtgtgggcattattagaagtgatgttataaaatatatttattatgttttatcaaccaaaagctttttagaatatattgatttagaatctgttggatcggctcaaccaaatatttcagctgatggcataaaaaaattcttaatacctaatccaaaagcaagagaacaaaaaattatagctgattttttagacgaaaaagttgggaaaatagatattattgtagaatggttaaataaacaaatagaaataataaataattataagaattctttaattactgaagtgataattaatggattagatcaaaatacagaaatgatagatagtaaaattgactggattggtaaaatatctaaaaacgcaaaattaataaaattaaaatatttttcatatatgaaaggtagaatcggatggcaaggattgaattcagaagattttatagatgaaggtccatattgcgttactggaacagattttgttaatggaaaaataaattgggaaacatgttatcatgttagtgatgagagatataatatggatagtaatattcagttaaagataggagatctactggttactaaagatgggacaataggaaaattagcagttgttgatgaattgcctaataaagcatgtttaaatagtcatttactaataatccgacctttaatgaataaatttattaataaatatttatattatgttctgaagagtaagattttttacaaatattacaatctagtttctagtggatcaactatggattcattatcacaagaaaaaacaggaaattttatctttcctatttatgaaatagaaaagcaaaaacaaatagcagattatttagataaaaaatgtgaacaaatagattgcatagtaaaaaacaaacaagaacaaattgaaaaaattgaacaatataagaaatcgttaatatatgaatatgtaacaggaaaaaaaagagtgaaaggagctgaagaactatatggataatttttttaaggaaagatcggactatcagagatatattatagattatttagttaaaaagaataaattcatggaaagagatagcaaaaaatattataatccaatttatgcaatggatacagaattactattacagttcttggaagatactcaacctgacaaaataaagaacataagagaaatatatggtgatgatgcagataatctgataataaaaagaattaataatgagattactaaaaagaatagtagtctaataggcagattaaagaatggaatatattttgataacaatattagtttagatttaatgtatgataaaccagctactacatttaatgaagagttaaatgaattatataagaaaaatatattctcagttatggaagaggtatatcataaagaaaatgaaagaatagatttagtaattttcttaaatggtatagcagttattacaattgaattaaagagtaatcaatcaggtcaaaactttgaaaatgcaattgaacaatataagaatgaaagagattgtaacactagattattatcatttaaaagcggtgcattagttaacttcgcaatggatacaaaagaagtgtatatgtgtacgaaattaaatggaaaatcgtcatatttcttaccatttaataaaggtaaagaagatggaggaaaaggaaatcctcatgtagaaaataaattgaatgtatgctatatgtgggaagatatattaacaaaagatactatcttatacttaattaaaaatttcatattcgttgaagttgaaaagaaagaagatccagttacaggaatattaaagtcaaaagaaagtgttatatttccgcgatatcaccaattagatgctatcagaaaaatagttgatgatataagaataaataaaactgcaaaaaattatttaatagaacatagtgcgggaagtggaaaaacgaaaactatagcatggcttgcacatagattacaatctcttcatgatttaaaagaaaagaatatatttgattctgttttaataattacagataggattgtagtggatcaacaattacaaaatgctattactgctatagatcataagcagggattaattaaggtaatggatgaaaagtgcacatcagcagatttagcagaagcattaaaaagtaatacaaaaatcattgtttctacaatacaaaaatttagatatattttagatgaaactaaaaatatactagataagagtttcgctataataatagatgaagcacattcatcgacatctggtaaaaatatggctgctgtaacagaagtgctatctgacgaggatgaagaaaacgattctgtggaagacttgatattagatgaaatagcaaaacaaggcaagcaaaaaaatattacaatgattgcatttactgctacaccaaagaaacaaacattacaattatttggtaatatgaatgcagatggaaagccagcaccatttcatatttatggaatgaaacaagctattcaagaagaatttatactagatgtactaactaattatacaacatataaaacatattatgaattaacaaaaaagatggaagaaaatccagatgtgtttgcaagtgttgtaaagaaaaaaataaatagatttgttgatatacatccaactaatattggtcaaaaagttgaaattataatagaacactttagaaattgcattatgagagaacttggtggaaaagcaaaagctatggttataacatcatctagagaagcagctgttagatatagaaatgaatttgaaagatatataaatgttcatcattatggagatataaaagcattggttgctttttctggaaaagtaacagtagatggaaaagagtatagtgaagtaggaatgaacaaaataccagaaaatgcattaagagaagaattcgacaaagatgattaccaagttttattggttgcaaataaatatcaaacaggatttgatcaacctaagttagttgcaatgtatgtggataagaaattaagtggtatagcagccgttcaaactttatcgagattaaacagaatatgtccaccgtttaataaacagacatttatattggatttcaagaatagttatgaagacattaagagagcgtttgagccttattatgacggaactatattagcagaaagtgtaaatccagaaatggtatatgatttaataggaaaagttgacacatataattttatggattatgcagatgtattagcatttaatgattatgcatacaaagagaaaaaaagaattactgacaaagtaaagatggaaagcttaatagataaagctctaagtaagataaaatctagagaactaaaagaacaagtagaaataaaaaagaatattggtagttttaataaattttatagatttttaatacaagctacagcgtttgaagatgttgatttgcataaaaaatataattatttaactgtactatataaagaacttgatgtaaaaggaattaaggtcgattttaatgtggtaaaagctgttgatatatcaggattagaacagaaaaaaacaggtgagtatattattccaaagggaacacagactgttgatgcaaaaccagaaattaaatacataaacccaagacctgtaactgtagaaatggaacaaatgaaaaagttagcagaaataatagaagaaattaatcttgaaaaaggaattaatattgatcctaaattagcacattcatcattagtacaaattaaagatatattaatgcataatcaagagttaaaaaacagtgcaatggttaacgaatataaagattttaatttcgcatattatagaagtgttgataaggcacttgaagaaggctatgatcataatagagaattatacaaattattattggatgatagtgatgcaaagcaaagaatactaggaatttatatggaagaaatatataaatctttgaataaagttacagaagatattttaaaagtagcagaagatagtgaaccatataatttagacaacgaagtatttgcaagaaatgtaggcagatttaaaacaataagtggaagaaatatctattattatggagaagagtatggagatgacattaaagtaattaataatgaatatgaaaaaataaaaacattaaatgatttatttgaagtattgcttaaagcctgggagaaaaatacagcatatccaagttcacaagaggattatgagaaggataatgatccaacatatgggcaatgtgcaattactgcaacattagtttatgacttgtttggtggaacaatccacaaaataagagtcaatggtggaggaacacattattttaataaaataaatggacattatattgacttgactagagatcaatttgatttatataatattgatattaaatatgaaccaaatgaagaagtagatagaatgtactgtaacaagaacgaagatacactaaagagatatacaaagttagttgaaaatttgaaaaaaatagtataggaaagtgttagtgtatgaaagattggaatgtattaaaaaatagaaaaataatcgatttgataattggcgattcaataataaaagatgattttgtttttcaatataaaatgccatatatgagtggaaataatattttagaattttcaaaaaagcttgggaaagaagatttttcaggtgaaaaactatcacgatggatttatatgtcagaactattagaatatacaatagaaaaaaacattatgaatttattttttaaggaattatttaacttaagaagatttagaaacataaatctaccaaatgatagtttttataatgctaatatggtatattgggaaattttgcatggattttttaataaagtaaatgaagaattgttttatgatgagtgtcgtatagaatatgatacaaaaacatgggatatttcattaatagatgaagaaaatgaaataatattaagtacagaaaaaattacaaatatagataaaaactatattagagatttaaatgatcaaattaataaagtaataaaaaatcaagattatgaaagtgcgataactaaatctagaacattaattgaagaagtaattatatatggcattgaaaagaaaaaagaaaagccatctgaaaagggaaatataaataatttatacagtcagtttaaagatttatataacatgcataatgactcaaatatggataaaagaataaatatgcttttatcagggtttgaaaaaattataacatctatatctcaaatgagagacaaaaacagtgatgcacatggtgttggagatagaagaataaatcttgaagaacatcatgttgtgttatatgcaaattcagcagtaacattagctaatttctttttagctgtaatagaaaaaaataaaggagaataaattgaaagaaaaaatagatgagcaatttgttgtaaataaagttattgattttatgataaataaagaaaatggtaattggcatgaagaaaaagtagaaaaaagtgaactacataagcatggtgttgatataaaattagtaggtggaaaaagaaatagtgaatatttttatattgaatgtaagggaaagtcttatgctaaatcagcaaaatcaataaatagagaaggatggcttaatgcattagggcaaatagtaacaaggatggatgtaaaaagatattctatatcgaaagaagatggcagaatatcaggtataaaccatgcatataaatatggtttgggtttatattgggaatcagctcaagttgctttaaggcgaataccgaaagaagttgcagaagtattatgtttgcatattttttcagtgaatgatgaaggtaaagtaaagtattttacaccaagtatgtttggaaaagaatatactaaagaagttttttaaggtgcaattttaaaatcctaaagtgcaatttttgcactttaggattttatcattattcaaagcaacccattactaactgagaaccatctacaaaaccattcctataatatttctcattccagtagcaaagataatccataaagtttttatcaagttgatctagttgtttctgaacatatttcttattttgctttggcacattattcaaaatcttttcagctaattcatcaaaatatatacaatattttttatcttgaggagtcatattgcaaaatgcagtttcttctctaaattctaaccattccttaataatatcatcattaacttctctaaaattattcataaaaaacctccaaattatataaaattcaaaatgtccccaatttgcaaatgtatatttgaacatcttgtgcgacaagactttcaaaaacttggggacagaaaggggacaaaatccctcaaaaatgtccaaaaatcgcacaagagttcagtaaaagaaaagtgctataaacacttatatttcaataaaaactaaacatttcagtaaacttcaaaaatggctaattgaattctcataacccgaaggtcgtgagtttaaggcttacgatgcaaccaattaagctcatagtgctagatgttttatttttttgagagaaggtgctataatatccacagaaagaacaacaaatatgcagaaaaatttaaaatgtcaaaagaaattagaatttttagcacaaataaaaaataataagcaactaaattttttctagtagataatgaaaaaaggtataggagaaaaaatatgcaaataaaatatattgaaaaaactccaatagctactgaatttaatatgctaacagaatcagtaggttggggaacgagagaaaataatattatagaagaagctttaagaaatacgttatactcactttgtgtttacgatggcaataacctaattgggtatggaagaattattggagataaaacaatatttttatacatacaagacataatggtaattccagaatatcaaggtaaaaaaataggaacaggtataatgaacaaattattagaacaaattgatgaatacaaaaaagtaaatccggatataagaacatatttaggcgcatcaaagggtaaagaaagtttttatgagaaatttggatttatatcaagacctaatgaagagctaggcgcaggaatgattttgtacaatgattaaaaatataaatgaaatacaaaaaatcttattttgtttgaagttgatataaaagaggataaaaatgaatgaattaaaaaatatattaaatagtggaattaaattctataaagagttaaaagaagataaaaatggtagatatagatcatgggaatattgttataaaattttcaatgaagctcacaaagcgaataatgttgatgataaatttatagattatctttgcttaaatttagctttttatttagcgagttggggaatgtatagaggatcatcatttctattacaaagagattataaagtgcataaacctattgttgaggaattattaaaagaaaaatataattgtttatgggaaattaagactagtgactatatcaaaaaagaaactcaaaaaactttaatacaattagttgaaaaaatgaaaaaaatgtatagcgaaattagattaagtgttaaaaaagaagtaccgaaaaataaaatatcagatacacttattacaaaagtattaatgggaactatggggtgtattccagcttatgataggtatttcatagaaggaataaagaaatataaagtggcttcaggtaattttaatataaaatctattttacaattggtacattattataatgataattatgatatatttgaagaaacaagaagtcagatgaatatttctggaatggaatatccacaaatgaaagtcatagacatgtgtttttggcaagtgggatttgatttagataagaataagtgcacttaaggaggcaaacacaaatgaaaaagaatttagatattataaaaattagatgtttaatttatggagatataatcgaatcaaaaagtgtccatgatttagtatcttgtaaatgtgaaagttgccatattgatggtggtaatgaatatttacgtaaagatagaatagaggcttaatataaactataaagaggcctgttaataagttaaataacaacaattttgagggtataaaatttttaaataaatttacccgaaaaaattgacactatcccaaataaaatagtatttgacaaaagttaaattagatgctaaaataaaaatgcactaaaaattatatcatatcaaaatttaaaaggttactataataaaccttgagtgcgaagttcgccccatatcttttagatatggggtatcttcttgcttaaaataaaaatttacaaattttgacaattacatacaattatgatacaatatttatgttaaattaaatttggaggtataaaatgagatacacaatgggtttagatattgggattgcatcagttggatgggcagtaataaacgaagataaaagtagaattgaagatttaggagttagagtatttaaaaaggcagaagagccagatggtaagtctttgaatttagccagaagagaagcaagaggaagtagaagaagaatcagaagaagagcaacaagaatgcaaaaagttaaggaactattaattaaatataatttagtttcagaaaaagaattagaaacattatatgtaattacagaaacaacaccggatgtatatgaactaagagcaaaaggcctagataagctattgagtagacaagagtttgcaagagtattaacaaatattgcaaaacgcagaggatataagtcaaatagaaagattgatgaagaggaaaaagaagtaggaaaattaagcaaaggaacaattgaaaataaaaaaattttacaggaaaaatgctatagaacaataggtgaaatgttctacaaagacgaaaaatttgaatacaataaaagaaacaaagggggagaatacaataatactgtacttagaagtatgctaatagatgaagtgcatatcttgtttgatattcagaggaacttaaaaagtgagtatgcagatgaaaagtttgaaaaagagtatgtagaagttataacatatcaaaaaccatatatcacgccagaattactagaaaaaatgcttggaaaatgtacttttgaaaaaggtgagccaagagctcctaaaaatagttatacatttgaaagatttatgctactacaaaaagtaaacaacttaaacatttatataaatggtgaaaaaatagaaatacctcaaaaaaagaaaaaagaaataatacaattagcatataaccaaacagaaataaaatatacacaattaagaaaaaaattagaattaccaatagaagcgagatttgcagacttaaattatcaaattaaaagaactgaagaagattcagaagaagaacttgtaaagaagattgagaataaaaagttcgtaaagttagaaggttggcataaaattagattagcattaaaagaaaataaagacaagtttgaaaaaattgaaaaaaacccagaattgcaaaatattattgcagatgcattagttagaaataaaactgatgagacaataaaaagttatttagaaaaaagtaatgtagatgtggaaataataaatgctgtattaaatattaactttacaaaatttgggcatctatcatacaaagcaataaataaaataattccagaactagaaaaaggcttaacatatgataaagcatgcgaaagtgttggatatgagtttaaaggaagaagaaatgaattacaatataaattgccaccagtaacagagctagaagatgaaatactaaattctgtagtgttaaggtctgtttcgcaaactagaaaggttgtaaatgcaattatagacaagtacggttcgccaacagcagtttacatagaaacagcaagggaactttcaaaaccttacgatgaaagaatgaagatagaaaaaaggcaaaaagaaaatgaggccaataatgacaagataaaagagtatataaaagaaacatttggatttgatccaaagccatttgatattgtaaaaatgaaactttggagggagcaaagcggaaaatgtgcatattcaagtaaaccaattccagctgaaagattatatgaagaaaattttgtacaagttgaccatataattcctttttctagatgctttgatgatagttatcaaaacaaagtattagtattaacagatgaaaatcagaagaaaaaagaaagaacaccatttgaatattttggagaagacaaagaaaaatggcacaaatttgaagaatttgttaatttaacatataaatttaatactagaaaaaaagaaaatttattgattaaaaatttcaatgaagataaatcaaaagaatggatacaaagaaatataaatgatacaaagtacatttctaaatttatgtataactatattacaaataatttaaaatttgcagaaagtgaattaaagaaaaaagtatataatattaacggacaagcaacatcaattttaagacactattggggattaaaaaaggatagagaaaaatcagataaacatcatgcacaagatgctgttataatagcatgtgcaacaaataaaaatataaagaaagtatctgaatatagcagaaggaagctattatacaaaaataatgaaattattgataaagaaacaggagaaattattgattcaaaatataatattgatatttcaataaaagagccttggcctaaatttagagaagaagtagaagcgagaatggaagacgtagacaataatggacaattatatgcattagttaatggaaaatttacaaattatgatgatatagatgtaactcaagttagaccaatttttacatcaagaatgccggaaagaaaaatcacaggaagagcacataaagatactatgcgttctcaaaaatttatacaacaaggtcaaaactttacagtagtaaaaaagccattaaaagctatatcaaaacaggaaattgaaggaattataaataatcctgattttaaaaatttatatttaagtgataaaaaattatatgatgacatctatcaaaagatgaaagaaacgaattttaaagcagaaaaagcatttataaatgaatatagaaagtatagtaaaaaaggaaatagccctattgtaagaagtataaaagttccatcagctggagctaccggagtacaactaaaaaacggatcaattgctgaaaatgctaatatggttagagtagatgtatttgaaaaagataataaaaactatttagttcctatatatgtatcagactttgtaaaagatgaattaccgaataaagcaatatttgcaaacaaagatgaaaagaaatggatagaaatgactgaagaatataagttcaaatttagcttatacccaaacgatttggtaaaaataaaaagaaaaaatgaaaaagaattttatgcatattattgttctacacataggggaactggtgcaattaacttattagccgtaaatggagaaagaaaaatagaaggaataggagctaaaagtttagaaatttttgaaaaatatcaagttgatgttttaggcaacattagtaaaattaataaagaaaaaagagaaggagtaaaataaaatgagttggcgaagtgtagtaattacacaaccgacaaaactgtctataaaaaatagacagctacaaataactcaagatgaagactttagtatgccattagaggatatatcaacaatagtattagaaacaccacaaattaacttgtcatcaaaagccatgagcatgatggccgataacaaaatcgttatgtatagttgcgatgataaacatttaccgaatggaatctttatcccatttgcatgtcacagtaggcaattaaaagttataaatcaacaattaaattgctcggaaagttttaacaaaaggtgttggcagaggattattatatctaaaataactaatcaggccaaagtgttaagtttatgcaataaaagtttaatgtcagaacatttacaaaacttagcacaaaatgttaattcgggagacacaaaaaacaaagaagcaatagcagcaaaaggatatttcccatcattatttggaagaagcttcaataggaattttgatgatatttgcaatacatgcttaaattatggctattcaataataagaggtgcgattgcaagaagtatagtatcctatggatatttaccatcaataggtattcatcacaagattgaattaaataattacaatttagcagatgattttatagaaccatttaggcctatagtagatctatgggtaaaaactaatgtaaatgaaaatacagaatttaataaatttgtgagagcggaattagtaaaccttttaaatgtagatgtgtatatacaaggaaggttacaatcagtaaacaatgcaataaacattatgatagcatcttatactacagcaataaatcaaaatgactataaaaaattagaattaccagaaattttaccaataaaaatgcatagttatgagtaataaatttatgagaatattagtattttttgatttaccagtagtaaagaaaaaagaaagaaaaatatactcacaatttagaagatttttattaaatgatggatatgacatggtgcaatattctgtatattctagactatgtaacggaactgatatgaccaataagcatttgaaaagattaaatacaatattacccgaaaaaggttcggtgcgttgtttgactataactgaaaaacaatatgaagaaatgaaatttttagttggaaaaccatctgtaaaagaaaaaagagtaaattgcaatcaattaagtttattctaaaaaagaaaaaatgacctaatttttattcagttagatcatttttttcttgcataacaacacgagaaaaccagtattattatgcgttatagcctcacctattatatcatatcaaaatttaaaagagaactataacgtaaactagcttatctgtcatatctgtcatattatatcatatcaaaatttaaaagagaactataacgttggtggataacctaccggaatattaacaattatatcatatcaaaatttaaaagagaactataactgtatttcttttcttaaagcagctgaaagtattatatcatatcaaaatttaaaagagaactataactaccgaagcagtcgcaataccactttctgattatatcatatcaaaatttaaaagagaactataactaatgtggtttggcgttagaaaacttatttattatatcatatcaaaatttaaaagagaactataacattgctgttattattgtttgtgttttaaaaattatatcatatcaaaatttaaaagagaactataacatgatgtattccatcacttgctagataactattatatcatatcaaaatttaaaagagaactataactactggtactgctttataagttttacctttattatatcatatcaaaatttaaaagagagctataactataataattatacttaataattaataataagttgtagtcctgcctattgtgtcgtaatatgtcggctactgtcataatacaacaccaacaagtagtactgaaacaaactatcttgaagtcaataatcaaaataagattagtgaattaaacgaaaatgcacaaaatgaattaatagagaacgtaaacactaatttacaaagtaatgttcaaggacaaaaagacgacaatgttttaaactctaatccacaagaaacaactattataaaagaaaacaaaaaaagcactaaacaatcaagcactgcacaacaatcacaagaaactatacaagaagagccaaaaaaagaaaataaaagcaattccgaacaaccaaaacaagaaacaaattcaacatcaaacacaccacagcaagagggaaaactaaaagaaggtataaacgtacaatcaaaatatcaaagtattttaaatgaatatactacaaagttaagaaataaaacaccttcattaattacagaatacaaaagtgaggcatcgtctaatacaaacggtttagaaggtttggcaactatatgtaataataaggtttcggttctagctggaatatgtagcgaaggtataagtaaaatggctaacatatattacaagtatggctcgggcagatatagcgagtatgaagaatgggtaggaaagttacaagatgtttatatgtcggaagctggcaaaatacaagatgtttatattaattttgctatgtagctacattaataaagcaaaataaataattacataccgaaactactacaccgcttatgtgttttagaattgtgctattttagatagtaatgaaacaacaggagaagcttttgcagatttttatagaaatggtaacaatgtaaatgttttgagtaaagaaatagtaaaaataatgaaaggaatggtataaataatattaaatcctagatggttagattggttatctgatgaagaagataaaaatggaaacagaacaaagctaaaagaaaatgcacctgaagatatacgaaaagaatatgaagagttgataaaagaagaggaaagcataagaaaaaataaattaaagaagactatattataacacttacaaaagatattttcaattttttatttatgtttcctcttgtttcttccattcattttcttttttataatctcttgacatattgttgctccctttttataatatttacagaagaggaaattgctgttccctctttgctatggcttacttttgtgcttgtcgttcttggcttagtttgtataagtacatttcagtttgccatttgtcgactttcttgatgaaggtcggcttttttagtattttctttattatcactttttcatcacactaaaatcatgtgtattttagaaaaaacagaacaatatagtctacgacaaaactaaaagcggatttgaagaagcaagaaaatcgttagcagatacatattcaaagatgtatgataaaaatagtgccgattttaacgagctaatagacagtgaagcagtagcagatattttaggaaacaaatatgtaaaacttgacacaaatcaagatatatttgaaggaaaggagataaatgagcaaatcaagatagctaggagatatatactagatgattttagagaaaatggtattaattttaatgaaagcaatataaaagttacttcaaaaacagcaaatgaatatactcatcctaaaaacaaattgccaaaatctacgagagagtcaaagataaaagcttctactgaattagataatcttttaaatgtatcagaatatcagtatagttctaaaaatgatggaagacatagctttgctaaagatggatgggactactataaaactgtatttgaagtaaatggggttaattttgaaggtctaataaatgttgctaaagatggaaataaaagaatattttatgacgtaacaaaaataaaaagaattagtcaaaatcgtagtacatcagctaatgctttctctacatcgttgactaattctaataatagtataccaccaattaaaaacggcgtcaatactactaactattctatgcaatgatctaaaaacaatgcgtggaaagatagctaatcaaaagattttaaaaaactagcactatcctcttgacattgctaaaaagtgatgtataatatacttgcaacagggaaaaataacattaaagtacatatgtgcaacctattttgggtatcaacacataaaaattttaaaaggaggaatgacttatgatgatggtaccaagaagaaatggatttgatatttttgatgaggttttcaatgatccatttttcacaaaaaaagaaagcaaattaatgaaaactgatgtaagagaaaaggatggaaattatgtactagatattgatcttccaggctatgacaaaaatgacattaaaatagaattaacagatggatatctaacagttacagcaagcagaacagaacataaagaagaaaaagaaaaacacaataaatatattcatcaagaaagattctttggagaatgctcaagaagctattatgcaggagaaaatgtaaaagaagaagatattaaagcaaacttcaaaaacggaacactagaaattacattccctaaagaagagagtaaaaaactagaagataaaaagtatatacaaattgaaggcgaataaaaaaggacctcatttggcaaaagctagatgaggttttatttttttacaaaaaagagaacattttttcgcaaaaactattgacattagaaaaataaagcaatagaatatatacgaacaaacatttggaggaaatgatatgatatcaacattgcatattaaaaatattggaattatagatgatttatcaatagattttaacgaaggattaaatattttaacaggagaaacgggagccggaaaaacattaataatacaatctctagaaataatttctggtggaagattttcaaaagaaataataagaaaaggtgaaaattactcattagttgaagcaagtatttatttaccagagagtgaaatttcagaagatggaaatataataatttctagagagatatattcaaatggaagaaatacatgtaaaataaatggcaagttagtaacagttagtgaattaaaaaaagttatgagtaaaataatagatattcacggacaacatgataatcaaaatttattagacaattcaaatcacatatcatatttagatgactttgcagggaaagaaatacatccaataaaagcacaatattcagagctttttgatgagtataataaaataaaaaatgaattagaaaacaactatggaaacgaaacagaaaaagaaagaaaattagatttattaaaatatcagttaaacgaaatagaaatagctaatttaaaagaaacagaagaaatagaattaaatgaaaaacatacagcaatggtaaatagcgaaaaacttaaagaaaacttgcaaattatagatgacaatttaaataataatgcaatagaaggaatttctaatgcaataagatgtttcgaaaaaatagaaaactgtggagagatatacaaagaaaaactagcagaattaaaaaacatatattatgaaattcaagaaactagcagagatatctactcattaaaagaagatgcagaatatgatccataccaaatgcaagaagtagaaagaagattagatacaatattcacaatgaaaagaaaatatggaaattcaattatcgaaatattagaatacaaagagcaattaaaaaacgaaattgaattaatagaaaatgcagatgaaataaataacaaattaaaaataaaattaaaagaaatagaagcaaaaatggataaactatgtttagaaatgagtaatataaggaaaaaatatgctactattttaaatgaaaaaataaacaatgaattaaaaagcttagaaatggtaaatgctaaatttaatgttaatgtaaataaaatagaaaaccaaaaatataataaaaacggattagatgaagttatatttatgatttgtacaaatataggagaggaagaaaaagaactaacaaaaattgcttcaggtggtgaaatgtctagaataatgcttgcaataaaaacagttattgcaaatacagataaagttggaatattaatatttgacgagatagacacaggaataagtggaaaagcagcaaaagcagttgcagacaaaatgaaattgattgcaaagaaccatcaaataatttgtataacgcatttagctacaattgcggcaaaaggagactacaattattatatatttaaacaaataaataacggaaaaactacaacaaatgttgaactattaaatgaagaaaaaacaatacaagaaattgcaagaatttctaatggagaaataacaaaagttgcaattcaaaacgcagaagagttaagaaaactggcctgtgcagtataatataaaacaacaaaaccctcagaaatgaatctgagggttttaaaattataacaatattttttaaaataaaatcattttaagaaactcttaaaacagcttttttaattctttgttgtttcttatatttttcgtaagaatttaaagcaaattccaaagcatttttatatgcgttagaattttgtttatattgcatcttgcaaaatgcctgtaaaattgttgtatcaataatttcttgattatattgataaatatctggatttacagttaagactttttttgagcatttataataagaatcttttaatctttgaattttataatcatctggagcaaacttaaaaatatgtctagcaagttccaaagaatattccaaatttttaactgcaacttcatcatataatttttttattgcagaatttataatttccatattatctacatttttatattttgcaggtaaaaataaacaaaattcagagtcattttgaacaagatcaatagaagaagattttacatatttaatattaagtttgtaactactccctaacaagctaacagctagatatgacttacttttaacagttttactaaaattaattatacccataaaaacccctcccaaacaaaacaatgttcgctactgtgaaattattttacatcaactaaaaaaacatgtcaacaattttaaacaaaaaatataaaattatgatataatattttaaaacaaaaaggagatgttattatgaaaagagaaaaagcagtagaattattaaaaaaatataataaagaagaatttcatataaggcatgcattaactgtagaagcagttatgagatattttgctaaacaaaaaggatatgacgaggatttttggggaatagttcggtttattgcatgatgtagattttgaatgttatccagaagaacattgcaaaaaagctccagaattattaaaagaaatagatgcaagtgatgaattaatacatgctgtatgtagtcatggatatggaatatgttctgatgtagaaccaacacacgaaatggaaaaaatattatttgcaacagatgaacttacaggattaatatgggcagcagcaaaaatgagaccatctaatagcacaaaagatatggaagtttcaagtttaaagaaaaagtttaaagataaaaaatttgcagcaggttgttcaagagatgtaataaaagaaggggcagaaaagctaggttgggaattaaatgatttgtttgaacaaacaatacttgcaatgagagaaagtgaagatttagtaaataaagaaatggaagaaatataaaaccaaaaggtatctctataaagagataccttttcattttttaattatatactatcaccttttaacatagatctaatagtgttatacaaatatggcttaaactcatcgataggcattgggtcattatacaaaatagaattaaagcaagtagaacttgcaagttctataatcataaacaaaacaacatctggatttttaatattaattttgttttcttctattccttttataaataaagagcgaagaccatctttgttatcatctaatgtattataaattttaaatacagtattacttttaattccccaagacaaatttttagaaataaacttaagcaatgcaggaaatttagtaagttcatctataacataatttattatataaataatttgatcagaaaaattacttatatagttttttcttaaattttctagtgcatcacaaaataatttgtgagatttttttgcaacaagaatatctctcaactcatacttatctttaaaatataaataaaaagtaccttttgcaacatttgcattatctacaatatcttgtatagatgtgttttgaatacctttttcggtgaacaacttaaagccggtatctagcaatctattttttttattttccttagtttcttgaatactcaatttaatcaccacatatattattattgcataaaatgaccagcaggtcaattaaaaatgaaaaaatatttataatttctacatgcaacacccggcttctcacataaatcaaataaattttaataaaaatattgactaacggtcataatggtgttacaatataaaaatgaccggtagtcataaaacgaaaggagagataatatgctaaaatttggagagtttatatgtaagcataaaaaaataattttagtaatttcaatacttttactaattccttcaatattaggaataaaggcaacaaaaataaactatgatattttggtatatttaccaagcgacattgaaactgttcaaggagaaaatattctttcagaagactttgatatgggggcattttcaatagtagttttggaaaatatgaaatcaaaagagatagcaaaactagaaacagaagttaaaaaaatacaaggagtagaaaatgtagtaagtattgtagatgctacaggaacaagtattccagtagaaagtttaccacaagaggtaaaagacaaaatatataaggataatacaacattaatgcttgtaacatttaaagatgcaatttcatcagatgaaacaacaaatgcagtagaacaattaagaaacatgacagatgaaagatgcaaagtaagtggaatgacatcagcattaatagacacaagagacttatcagataaagaagttgcaatatatgtattaattgcagtagctctatgtattataatcctagaattagcattggattcatatttggttccaatatttttattgttaaatataggaatagcaatactttataatatgggttcaaatataatgcttggagaaatatcatatataacaaaagcaataagtgcagtattacaattaggtgtaacaacagacttttctatattcctttaccacagttataaagcagaaaaagaaaaatattcaaacaatgacgaagcaatggcaaatgcaattgcaaaaacattagtatcagttttaggaagttcacttacaacaatagcaggcttcttagcactatgtagtatgaacttaacacttggaaaagatattggtatagtaatggcaaaaggtgttctatttggagtaataacagtagtaacagttttaccagcaatgatattgcaatttaacaaagcaatagaaaaaacatcacataaagaaattttacctaaattcacagcactaaagaactttaatataaaacattacaaattaatattaatagctttcttagttatattaccatttgcagtatatggatatacacacacacaagtttattacaatctagatagttcacttccagaagagctagaaagtgtaagtggaaacaaagaattaaaagataaatttggaatagtagcaacagaaatgatattagtaaataatgatgttccagattataaagtaaatcaaatgttagatgagatagagcaaattgatggcattgattggacattaagctattcaagaatatcaaaagcagtgccagaacaagtgctttcagaagatttaacaaaaatattccaaagtgataaatacaaaatggtaataattaattctaaatacgaagttgcaacaaatgagttaaattcacaaatggaagaaatacaaaaagtaatagataaatatgatcctaa

SEQ ID NO: 3297 - DNA, 16230 bp, synthetic construct
  misc_feature 1..16230: note = Synthetic
  source 1..16230: mol_type = other DNA
atagtttagcacacacaacatgggaatgcaaatatcatatagtatttgcaccgaagtttagaagaaaagaaatatatggcgtattaaaaagagaaataggaatgatattaagggagttatgtagaagaaaagatgtagaaatattggcagcagaggcatgcccagaccacatacatatgtatgtaagtgtaccaccaaaaatgagtatatcttcttttgtaggatatttaaaaggaaagagtacattaataatatttgatagacatgcaaatctaaaatataaatatggcaacagagtattttggtgcggaggatattatgtgagtacggtaggaaataacaagtcagcagtacaaaattatgtggaaaatcaattaaaagaagacatgatgacagatcaaataacaataaaagaatataaagacccttttaagggttagtgaggaacagatactcacaagaaagtggcgaagctgtcaaattgaatcgcttgagcgattgctagcaaaaaggccttataggccgacatgaaaatctcccagttatactgggggataattattaaatgtgcctattttaaaaattataatttcatctcaaagtcactaatagaataacctaatttatttaattcagaatataatttgctaattggcattcctaaaatattgtaatagtcacctattatcttatcaacaaagattgacgttttaccagcaatagagtaaccagctctattcaataaatatttttcgttttcgacataccaagaaatatcttgttcagaaatatttttaaaataaacttcagtagtgtctgtgaaagaaatttctttatctttatataaatccttaattgttaccccagttacagcataatttacttttccacttaatttctttatgttttcaaatccttctcctttactttttggtttttcaaatatcttgttgtccatgtagatgattgaatcagctgatatgatcaatgctttatctttgatttgtgatgcaactgaattagctttatcttttgataaatcaatcacatattgttttggatcgctagcattgctacgttccgggatattacttgttaatacctcatatttccagccaatcatgtcaaaaatatcttttcttgttttagaacttgatgccaaaattaatttcattacattcactccaatcttttttcattcattatatcatttcaaaaaaaatagtcaataaaataatcaacataatacttgaaaaaacagaaatatattgtatactaatgtcgtttagaataattgtcaaaaaaagttttgttaattaaatcttttaaaaatatgaaaacgtgaaagttattagggctatgaaaggagattttttatgcaacaggggaagattgtaactctatcaggaatttccggaatcggaaagtcttatttaaaaacgtacattttaagtaatatgtccaattttcaatctttaatttccgtaacaacgcggaaacctagagaaaaagaaaaaaatgggattgacaagtttttctactcattagaagaatttgaaagagaaatgaatcaggataagtttcgcactgttaacaaagtgtttggaaattggtatgcatataaggaatcacaaataaaattatgtgattgtggagtgaatctgattacagaattgttctataaaaatgtgcacgagtttaaaacagaatttcccaacactctaagtgtgtacgtcattccaaacaatgttgaagaaaccaagaaaaagctaaagctgagaaatctgaatttggacgatttaagcaaaagagtgaaagaaattgatgatgagttagcatttttctataacaatagagaattgttcgacattgttataactaatgattatactgaaaaatcatgtcttttatttcaaaatctaatagaacaacaattgaggagtgattaagatgtttaaagacaaaatccatagcatgctaacaccagatactagacgagtaattcaggaattcaaagaagagcctttgcggaaggtggtatacacctcttttgatggagatgatatgcatcatatgttggccatttgcaatcaagtgttgaaacataatatgattgctttaaatccagaaatggcccttgggtattatatctctactgaagcattaggtggaaagaaaattaatgtgatgacagactgcttgactcttgcaattttttctgatagattatgggtatatggaaaaacagatactcttttatctgaaggaataatggctgagatttttctgtggagtcaaatcaaaaataggaaagctactttcattccaaatatttatggacaagaacaaatcgaaatgaattatttggaagtgaaagaatggttggaaaaaatgacagatgaaaaattcagaaatgatatttttgatagtctgttaattccatataaagctcagagtcattcaacggtttatattggggcaaatttcgcaaattataaacacattgattgggcgagagtacaggcgtataaagaaaaattgtgtccgatttccccacaaaacattttaagctattttttgtatcgtagttttgaagacaatgatgttaggtatctaaaagatagacttacgttactttctaagtctgatatgtattggttgtgtatcgattccactaatctagaagctgaattgaataaacttgaccaaaacactttggcagagctgtatatgctaaatactgtttatacaaataaaacagtaaaaattgttgattggggtgacattaaagttcctaaatatgataagtctaaaatgtgggcgttgactactaaggaacaggaagaaatcctcggaagcaattggccaatagaatttagaaagtagaggtacaaacaatggaaagatactacgaacaattaaacgcaacatgtcaaaaagttgctgaggaagttatcaaagataatagtatattaagtgataatattttaaaaagagaggaaaaagaatttttactttcggattggaatgcttttttggttggattaatttctgaccaatccgttaaagtagaagttgcatggagattgccttattatctttcaaaaaaattaggacatttcgacttttgtagaataataaaagaggaaacggttgagtctttagaaactctcataaaagaaaaacctgcattgcatcgttatccaagaaaaatggctgagtatattttctttgcaatcaataaaattgtaaaagaatataattcagatgctgagaatatttggagaaatgatttgaatgcagaaaaagtgatagcaaatctggaagaatttaagggaatcagtcataaaaaagcagctctgggagccttgttgcttgttcgcgactttggtgttaatctaaaaaatttgtattgcattgatattgcatttgatgtccatattagaagaatctttttaagaatgggacttactaataatgatgatatcaaagatgttacatcaacagcaagaaaaatttgcaatgagtttcccggctcgctaactcttccattttgggtaacaggaagagaatattgtagacccactaaccctaaatgtgacgagtgctatttaagtcaattttgtgcgaaaaaagtagaactcggaaaagatttgtaacgttttatttggagattagatgtattttatatctagtctcttttttatttttttaacataagtagttcttgctaattgaaaacttcaaatctttcataaaaagcacatggtcgttgagaaagctatctcttgattagtattatttcttgacataacccaaaaatggttttaaaattgatgatggagtaagtcagataatcgctggtgctcatttgaggcacgagaggaaagtccgggctccacagagcaaggtgccagctaacggctggtggaggtaactctaaggaaagtgcaacagaaataaaccgccaattttattggcaaggatggaaaggcagggtaagagcctaccagtagcatggagacatgctagctatgtaaaccccacctggagcaacgtttcgaaggattaaggctgctcgtcgacctttgattgtacggcttgaggcatatagcaatatatgtcctagataaatgattatctaatacagaacccggcttacagatttactttgtatatgaaaaaaaactagcttgtaaggctagtttttttcgtacttttaaataagtattttattcatatcatccggcattggtgctattatttcaatttcagaatttaagattggatgattaaatgtcatcttatacgcatgtaatgcttgtctatttataagattggtttctgtgccgtataatgtgtcgcctaaaatagaatgaccgatataagctaaatgtacgcgaatttgatgtgttctacctgtttctaattttaggtgtaggagagagaggtctttttcttttataaacttaacaacttcataatgagtaatagcagtttgtccctcttcatttatttctcgctccattatacttccatcttttctggcaatcggagcatttataattccttttgtatcttctaacttgccaagcactattgcgaagtattctttattgatagttttgtcttttatcatcaattcttggatatattcattttttgcaaataagacgataccagaagtatctctatctaatcgattgattgcacggattttctttttattattcaaataatatttaacgccatttgcaagtgtattattgggatgatatgaagagggatgaacaactgttccaaacggcttatttattgccaaaaagtattcatcctcatataatatctctaaatccatttgctcaggaagaatattatcttcttcttcaaagtcgatatttacttctatttcatcatttaagtggacaatatagcttgaaaaaacacttgttctatttgctagaattttgccattcatttttaatttattgagtaatctagatgaaacatttagcttatctcttagaatatttccaacctttttaccctcatcttcttttaaaacagtatatgttagtttaattgtaatcacctctaatacgggtattatatattactaatatacactagacaagtttcgtttatatattttttgaataatatattatgaaaaggaggtggattataggtatgtgtgctaattgtagtaacaacaacttaatggggacaaataattcaaatggtgtaggtctatttatagaaaacggaaatatgccagtattaggtacattcagcaatgaaaatgtattaggaaataattctacttcatgtggttgcaacaatatatgtaactgcaatggatgtgcaaataataatacatgttcatgcaattgtaatggcaacaacaattcatgtaataacaatcaaggaaacaataacacagcaacacttggagctaatgtaacctctaataatctgcaaagaaatttaagaaactttataggaagaagatgtacatgtgagtttaatatatgcggaacttgctttaaaagaacaggtgttttgtcttgcgttgggaatgactttataacattatctggtgtgaacaacagtaactgtatgctttgcaatacagatggtctttcgtttgtaactattcataattgtaatggttaaatagtataaagattggctttgtgctcttataaaaatacacatggccaatctttaatttttccttgaatgtaaagctaattcgttatataatcgaggagaattatataaaaaaggagatgcattatttatgagttttgttgatgcaataaaagaaaaagcaagaaattcaattaagactattgtacttccagaaagtacagacattagagtattagaagcagctagaaaagttacagatgagggatttgcaaaagtagttttagtaggagatagaaaagagttagaaaacgttgctggtaatatagatatatcagatatcacggttataaatcctactgaatcagaaaaatttgaagaatacgcaaatgctttttatgagcttagaaaagctaaaggaatgactttagaaaaagctcatgaaacattaaaacataatatatattttggtacaatgatggttaaacaaggcgatgctgatggtttagttgcaggtagtgtttgttcaacagcagatacattaagaccagcacttcaaatattaaaaacagcacctggtgttaaactagtttcatctttctttatcatgaatgttcctaactgtgaacttggtgaagagggaatgttcttattctcagattgcggattgaatgttaatccaaatgaagaagaactatctgaaatagctatttcttcggcaaaaagttggacaaagcttacaggaaaagagccaagaatatctatgctttcatattcaacaatgggaagtgcaccacttacagatatgacatcaaaagttataaatgctacgaagctagttaaagaaaaaatgccagatttattagtagatggagaaatgcaagctgatgcttcaattgttccatctgtaggaagcaaaaaagctccagatagcaaagttgctggcaaggcaaatgttttaatattcccagatttaaatgctggtaatattggatacaaacttgttgagagacttgctaaggcagaagcttatgggcctgttacacaaggtatagcaaaaccagttaatgatttaagcagaggatgcaaatcagatgatatcgttggtgtagttgctattacagctgtacaagcacaagaataatataataatcagtaatttaggaggaattaaaaaatgaaaatattagtagtaaactgtggaagttcatcattaaaatatcagttaatcgatacagatactgataaaatcttagcaaaaggtagatgcgatagaataggtgctagagagggcgaaatcggttcaccttttatagaatataaaggaccagatggaaagaaagtaatcgaagaattaccacttagagaccatgtagaagcattcgaaaatgtagtaagatatttaacaaatcctgagattggagcagtaaaagacttatctgaagtttcagcaatcggacatagaatagtaaatggtggaccattctttaaagaatcaacactagttacagatgaagtattaaaaacattcaaagaaaaatcaataccatatgcaccacttcataacccagctgcattacaaggaatagatgcttgtcttaaaacaatgcctggtataccagaagtacttgtatttgatacaacattccatcaaacaatgccagagaaagcatatatgtatgctatcccaagagaatattatgataaatatgggataagaagatatggtgcacacggaatgtcacatcaatatgtaacagaagaagcatcaagacttactaaaattccacaagacaaacttaatatgatatcttgtcacttaggaaatggttcaagcataacagctgtaaaaaacggaaaatgtgtagatacatcaatgggattcacaccacttgaaggtttagcaatgggaacaagaagtggcgatttagacccagcaatacttgaatttgtaatggaaagagaaaatatcacaataaatgaaatgttgcaaatattaaataaaaaatcaggtttgcttgcagtttctggtcaaacaggtgatgtaagagacctaagaaaattaagagacgaaagaaacgaaagagcaaaactagcacttgatattttatgctatagagttagaaaatacataggtgcatacatggcagttttaggacatgtagattgtatcacatttgaaggtggaataggagagcacaatccagatgtagtaagagcatgtgtagaaggattagaagaatacggtatagtacttgatccatcatacaaagatgatgaacaatacgaaggtatcataagtgctccagagtcaagaataaagatgtatgtaatagcaacaaacgaagaggaaataatagctaaagaagcaatgagattggtgaaataattatttttgattagtcctaaaaattggagtttagaacacgattgtcgaattttgtcgaattgttttactgtgttttctctaggtagtatggtataattagtaaaagaaagggatttttttcttgactttttatacagatgattataaaatgaaaatacaaattatatcatatcagagtgtaattggttactataataaattcattgtaagtgatcaatgaaatgtgaagtttaaacagccccttactttttaagtaaggggcatcttcttttttatgatattaggaaggagcatttatggaaataagatatgtactaggattagatataggaataaaatctatcggatgggcagttataaacgatgaaaaaaatagaattgaagatttaggagttagaattttcccagcggcagaaagaccaaaagatggtggagcaataaacgaaaacagaagaatcgcaagaggacttagaagaagactaaaaagaagaagagtaagaatggacaagataaaagacttgtttattaaatataatttagtttctaaaaatgaaatttctgatttatataaattaaaaagtgatgatatagatacatggaaattaagagcatgtggattagatagaaaactaaatgcaaaagaatgggctagagttttgacaactatagcaaaaagaagaggatataagtcgaatagaaagatagaagatgagaatgaaaaatctgaaagtggaaaacttacaaaagcaattaaggcaaacaaaatttatatggagttaaaaggatatagaacagttggtgaaatgtttgctaaagataagaagtatcaaaacaataaaagaaacaaaagaggagattataataactgtgtagatagaagtgagcttcgtgaagaaattaaaatcctatttgataagcaaagaagctttggaagcgaatttgcaagtgaaaatttcgaatctgaatttttagaagtatttgattggcaaaaaccttttatgacatcagagcttatgcaaaagatgattggaaaatgtacacttgaaaaggatgagccaagagcatctaaaaatagttatacatttgaaaggttcatgttattacaaaaaataaataatctttcatatatggtaggcgatgataaaaggtacttaactatggaagaaagagaaaaacttataaagcttgcttatgagacgaaatctggtgttaagtacggtaagattagaaaagaattaaagttaccagatgaagctgtatttacgggattatactactatataaaaccagttaaaaaagcagatggtacatatgagaaattatcatatgaagaaatagttaagaaaactgaagatgctgtattcgttaaactagttggatatcatgaattaaaatctgcattaaatggacatgaggatatattaaataatcatgatttattagatgaaattgcagaagttttaacattaaacaaaacagatgtgactataaaagaagaattgcaaaaacttggactttcagatgatataatcgaaggtctattaaaagttaatttcagcaagtttggacacctatcatataaagcaatgaaaaatatattgccttattttgaagagggaagaaagtacgatgaagcatgtaaagaagctggttataattttaaagcagatgatgaaaatcctaaatataagcttcctgtcattccaaaagatgatattagaaatcctgtagtgtatagagctatagcacaaactagaaaggtaataaatgcagtaatagataaatatggttctccatatgaaatacatatagaagtggcaagagatttaacaaaaaactttagtgaaagaaaaaagattgaagacaaacaaaaagaaaatagaactataaatgataatctaaaaaaggatatagaagaacatttcaatataaaagctaaaccagtagatatgctaaaaaagagattatatcatgaacaagatggaaagagtgcatattcactacttcctatagaatactcaagactattcgaagatggatatgttcaaatagatcatgctataccttttagcaggtcatttgatgattcatataataacaaagtattagttctatcaaaagaaaaccaagaaaaaagaaatcaaacaccatatgaatatcttggaggaactccaaactgggaaacattcgaggcatgggtaaaaagtacatatagaaataatatcaagaagagggaaaatctattagttaaaaactttaacgaagacaaagaaaatgattggatagctagaaacttagttgatacaaaatatattgctaggtatatgacaaactttataaagaaaaatctaaaatttaataactatagcgaaaaagaaaaccgaataaaagtaaaaacaatagttggtgctgctacaacagctttaagacattattggggcatttctgctaaaaatcgtgaagaaaacgatttacaccacgcagaagatgctgtaataatagcttgtgctagcgaaaaatttcaaaagaaaattagagaatatagtaaagaaaaagaactttattatcctaataaaaatggagattattatgaccctacaactggcgaaatcgtagatgtaaaatacaaaacacatgaaatggcagagccttgggataattttaaagaagaactagaaatgagaattcctagaattccagatgaatggaaagataagactgtaactatcgaaatggtacaaaaattgattttagagcattttaaacgcggaagctttacaaattatgatgatgtagacataaacgatataaaacctatttttgtatcaagaatgccaaatagaaaaataagtggtgaagcacatggagaaacaatttattcattaaaacaagacgctggaatcgtaaccgtgaaaaagcctcttagtagcatttcaaaagatgaaatagaaacattgctacacaatgaaaagtgcaaaaaattatacgaaagcgacaaggatttatacgaccgtatttatgcgagactagctgaatataacttcaaagcagaaaaagcattttcatcagattatacagtaagaaaacattcaaaaaatggggaaggaccaatcgtaaaaagtattaaggttccaaaagtcatgagtagtggagcaggtgtaaaaatcaacaacgaaacaggtattgcagcaaatggtaacatggtaagagttgatgtatttacaaaaaacaataaatattacttggtaccgatatatgttgcggatatggtaaaagatagactgcctaataaggcaataaaagcaaataagccagaaagtgaatggctagaaatggatgaaaattatatatttaagttttcgttatattcaaatgatatgattgcagtaaaaaagaaaaatgaagaaacaatatatggctattacacatctactcataggggaactggtgctataaatatgatatcacatgatggaagtcgaaaactagaagggattggtcctcaaaatttagaagtattcgataaatatgaagtagacatccttggtaattaccataaaataaataaagaacaaaggaaaggaggtgaaaaacaatctaaataggaggtgataaaaatgagctggaggagtattattatatctcatccctcaaagttatctttaaaaaacaaccaattatgcatacaacaagaagatgtttggaatgtgcctctagaagatgtatctgccatagtattagaatctcagcaaatactaataacagaaggtttactcagcaaattctgtgaaaataatattatagtgtatatatgtgattcaaagcacattccaaatggatatgtattaccatactatcagcatagtagaagcttaaaaatattaaaagaacaaattatcttatccgaaccatttaaaaagagatgttggcaaaaaataatcaaacaaaaaataactaatcaagcatatgttctaagatgtattggaaaatatgatatcgaagaaaaaatgatgaaaatggtgcagaatgttgattctggagatcctaaaaatattgaaggacaagttgcaaaactttattttgaaagtttatttacaagagggtttaatagaaatcacgataacatctttaacgcatgtttagattatggttacacaatcataagaggtgcaatagcaaggagtatagcacaatacggatatattccatgtcttcggaatacatcataagagtgaattaaacaattttaatttagcagatgactttattgagccatttagaccaatcgtagatttgtggactgtacaaaatatcaatctaaaaaacgaagagttcgacagtaaaataaagcaatcacttgtagatttattaaactacgatgtaataatagaaggaaaaaggcagtgtgtattaaatgcaataaatgttatgataagttcgtttactactagcatacaagaaaaaaattacgaaaaacttttggtaccaataatagtgccactcgaaaggcacacatatgggtaaatatatgaggttaattgtattttttgatttgccagtagtaatgaaaaaggatagaaaaatatacgcacaatttagaaaatttttaataaaagatggatatgatatgttgcaattttcagtgtattcacgaatttgcaatggagatgatggagtctataagcactatgcaagattaaaagaaaatttgccacgaaaaggttcgataagatgtatgaaagttacagagaaacaatatgcaagtatggaaatactaataggaaaaaagacaataagggagagaaaaatcaatgcagaacaattatcaatattctaaaaaacaataaaaaagcaactatttacacaaaaaatagctgcttttttattataaataatccttaaaagtactctgctgtatgcattatagaaccacacattatatcatatcagaatgtaacaaggaactataactattacttattatgatgaaaaaggaaagaaattatatcatatcagaatgtaacaaggaactataaccatcttttgttatttctccttttaaaaaaattatatcatatcagaatgtaacaaggaactataactgaaatatttagtctaagtcgttttaatgtattatatcatatcagaatgtaacaaggaactataacgtcggttcgttttgcaagtttacacaatggattatatcatatcagaatgtaacaaggaactataacagtttgcgttttttagttcttagcttccagattatatcatatcagaatgtaacaaggaactataactgaaactgaacaattattttcacataaaagattatatcatatcagaatgtaacaaggaactataacaatcgtccataccagcagaagcttttttaaattatatcatatcagaatgtaacaaggaactataacttaaaaacttattacttgacgaagtaacaaattatatcatatcagaatgtaacaaggaactataacagagacaatgggagaaaggtaaccaaagtataaaaatttatttgcatgaggtgccatataacaaagaaaagcatgataaaataacaaaatgtaatacttagtcctgcaagaactaaaaagaaatgaatatctaaaatagcaacaacaagccttcaaacgtggtatagagtaaatttttgattgttacatacaaaaatacttgctaaattatgtaatctgttttataattgtattgtgagtacgtggagtagaggaggtacatatgaaaacgtttataacaaatcattggaaaaatatattaattactattggtggcatatttattttcattaatgcgtttgaaaagattatggcacctaaggtgttaatatcagattatataaaatatggaaaagatcttgaaaaaataccttcaaacattgcagggcaagttgaggactcaattaatttaggaacaatgccctttgacgcgggaatggtgaagttaatagttacattgatggtcctaatattaggagtattattgctaacaagcctagccgaagggaaatctggtgcaaagaagaaataagagatatgatataaagtactgagaagaatattcttagtactttatacgttagaaatactaatgaaaaggaaatcgataaaacatgtcaattaaagattatattaaagaaactaagaaaaaagaaattggattctatataaatggagagaaaagtattaatgaatacataagaaaactgaaacattttttaaaaacatacgaaaaagcaagcataatttctattagtggaaaagttgacgttacatttgtagaagaggatatattagatgatagaacagactttgtgcattgaatatattgttgcacaaaataaaagttttgcgtaattctagtatgaagaaacaagctcctaaaatcgtttttaaggcattttcttactttatgcatatagttttactatttgatttataatttttataaagaattcatttcagacgttctgcaataatataatttgctttcaagttttagttttgtatctatatcgatttgttttttatttgttgtatctttataatttgtttttcagctcttaattttttcttgaacttattttcatattcttatttattttcttatttttatttattattcgttaaatttttagattattttcacttttttcgatttttcttataattcctccctatttggtcgatttttagacataaaactatattacccccattaaaaaaacggcttaaaaacgattctcgtgcgtcgtatttttgccatgtttttcctttttttaataaaatgtattattttctgctttttagcgattttttacgattatactagaaaacatctcaattattaggaatgtttcatataaaataattataatagttttatttttttcaaactaagcactaaatatttggactttgatatataaacatcgacatgtatctttgctatgatatctattggaatttaacaagtggtttagacttagatatattagcatatattgtgtgatttgcttcaggagtcaatggtaagtattaaatcttacatatggttggtttaattacatatgagttttaatcaatcatataccaacaaaaccggtcttgattataaaatcatacctaatttaggcatcatctagaattatagaaattaattaatcattgcacaaaatattgataaactgatttttttgtatcagtaactaaattctttaaacttacttttatcagcaaatttataccatttgattttataatgctgtattcactcatatatttcatctatctgttcgttgcaatcctttagttgagttctttattcaattataattaaaaattttacaattgataattaggcagtttatattctatgcctcctctactccattttgtcatggttatacgaatgtaaataatttacaaatatttatatttatgctaattttgcttagctttgctattattttataatcttttttattagcattacaatttagtctatgctagacatcactttatatatgaaacccgctcatatcatttttctctaattttagcaattcaattttattttctattccgccaccataacctgttaagtttccgtttgctcctacaactctatggcagggaatgattatgcaaataggattccatccaacggctccgccaactgcttgtgctgacattttatttatgccatgatttttagctacaatttttgcaatatcgttataggttattgttgtaccatattttatattattcattatatcaattatttcttttctaaatggcgttaagttttctattttatattctggcgtaaagctaggctcttttccgctgaagtatatatctagccatttagtggtttctttaaatatttttaattctttttcttcacaagtgatgttatgctttgaagagtcttttgagccctcaaaccataaacctgttaaatgttcaccatcactattcattatcatatttgagaattcttttggtgtttcatatatgtatttatatgtcatcaattttcctcctattatgttgtttaataagtatggtaatacaaatatttttagatgtcaataatgacaaaccctatccttgttggatgtataattcatttgtgataatgtc

SEQ ID NO: 3298 - DNA, 13537 bp, synthetic construct
  source 1..13537: mol_type = other DNA
  misc_feature 1..13537: note = Synthetic
catgccaatttgcatcttataggggagggctcatatgctttggtgtattactataaagatgatttttatgataaaaaaatagccttaaaaagagctaaaaaagatttaacgagtaaagaattggaaagatttaaaagagaatttgatgaactaaaatcttttaaatctccctatataattgatgtatattcatataatgctgaaaatagagaatatacaatggaatatatggattctaatctttatgattttataaggacaaataatgataagttaacaacaactgaacgaaaaaactatgtttatcaagtattaaaagcttttaaatatatacattcaaaaggtagattgcatagagatattaatccaaaaaatatattaataaaaatatatgatgatgtaccagttgttaaaatatctgactttggtttaataaagcaagaagaaagtactttaacaacagtgaatacagattttaaaggatggtttaatgatccgaatttgagaataataggttttgataaatatagtatgtgccatgaaatatatgctctaactatgacaatttattatctaatgactggaaaaactaatacaacaaatatacataatactaaattattagatttagtaaataaaggaatgaatgcaaatcccacagaaagatataaagatgtagaagaactacttaatgattttaagaaaatatgaataaaatgcaataacaaaggtagtaaagtcttaaattaaaaagaaattttgattatttttagtttaatattttcaaaaaattcaataatatgaggctatggtaagaataatgaaaaggttttatgaaactacgaaaaggtttagaatattctttataacaaatagattataaattttgtttcaaaaattataaaagatgaaattaagatattctatttttacttgttttagaaatctatagatgtttactgctaaaattagaaaagaatgatacaatggtataaaagataataatgaaggattgataatatgaaccaagaatatttagaatttatggctagctatttagataaaatatatgaggcccaaaacatagatattgaaaaaattggatatgatagatatgctgaaaatttattcgatataataatagaaataagtaatgtttttgaaaaagaacttccagaaatcaaaacatcggtattattgcgtcatgattcattgaaccgtgacatagatataacaactggaattataagaaagtttttaattaaaaatggatataaaaaggctagaaatttagatagtcaaattaataagttttggacaagttttaaagtttattttgaaaaagaattaccatacaagggttatttaaaatcagaatttgttggatatgataattggaatggtggagtttattatttagatatcagctatgattatcaatataaattacattatggaatagagtataaagagtgttctacaataaatgatattaaaatgtttatagaacttgctttcagtagttggatagaaaatgagaaaaggtatgacttcacgaaagatgtaaatgcgatatttcagaaatttagaatgccatttaaattgcaaaaaggaaaagttattaaatctggatatagaacaactaatttaaatgagaaaataattaattacacgatgttggagaggaaaatacaatatgcagaggaaatgatattaagttctgaaaatctggataaaaaatgtgcattagattacataatagattcgttacaatacataatatcaatacaagatggcacaggaataacagataagtattcaaatgcttctaaaaaaatatcaagtaatgtggagggaaaagtgtatgctgttattaaaaatgaaattaatgaattaatgaaaatatcgaatgaatattttgatataaggcataatgagtatttgaataaggcaaaagaaaagcgtgaagcaattacagattcaatatttatagaatacttatataatagagcatatgcattactatatatattgaaaatgaaacaataaaatgatattaatcaactcaagttgctattttatttttattagaaatactatttaaaactttttcataaaattgaaaaaagtatataaaaatccaaagttttttcaaaattttgaaaaaactttggaaaatatatttaattaattatcaaaactaccaccaattagctgtactccatcacaaaaaccattcctataatacttctcattccaatagcaaatataatccataaaattctcatcaagcagatcaagttgtttcttaacatactttttattttgctcaggaacattcttcaaaatcctttcggaaatctcatcaaaataaacaaaatgctttttatcctcagcacttaaagtgcaacataaagtctcctctctaaattctaaccaatctttcaaaatatcatcattaacttctcttaaattattcataatctaaatcctcctaaaaattaaaatttttcattttctaaaagtatccacaagagccaaagttctaagaacaaacgtaccatacccattgggtaaaaattgggtaaaatctactccaaaaatgccctaaaaaaacacaaatgttctataaatcaaaactcttgtaaatactgaaataccaacaaaaactctaattttcacaaaactacaaaaaccggtcaaacctcgctcataacccgaaggccataacttcaagccttaccatgaaaacgaaaagaaaagcagatctaaatctacttccaataagagctgcacgaagacttctgtcgtcatcctcatatatattatatatttttattgtatacggtttttatttttactaaggattttaagaaatttaaataaattttacaatataataacaaaatatgatataatatgttaaacaaagaaaggaaaattatggaaaataaattatttagagaaaaaattgtaaaagaatatgtgaaatataaaaagccagaaaagaaattaactgatgtagttttagtattgtgttattttagatagtaatagaactggaagttcaaacttgccatattcttacacgttttggtattgtgttattctagttcatcaacaattttaaatactagaaaatatttttggtatttttttattaaataaaaaatatattaacattgttacgtaacgataataaaaatagaaaggcgaaaaaattaaatattatatattagagcttgatgaaaaaaagcatatgttactaaaaatgtaatacaatattaaataagcaaatggttacttttattaccggatgaaaatggcgaaataggctatatagtaacaaaaacttatacaacccacaaattataaggctagaaaaaaggttggtaaagaaataactttaccaaccttttgtactaatttttgttagcacgcacaatttcggccaaaacctcatcaaaacagtttttgaaaatgtagtgttttacatgagagtagccaaggtgcccagctttacaaccgccctgacacagaggcaagaacttgcaagagtagcactcctgagaagagagctctgtggagcaccacttcaaatatgcattgctcaggcgatagggagaagagatgtcaccaatgaaatctttttcttccattgccatagaacactttgcaaggttgccatcaggggtgataagaaaagagtgacgaagacatgcatagcactttgtctgaataaaatgcaaattgaatacattttttccacggcaaaggtcattttgcacaatcttgcgattaatgtcaatgagcttaagtgcattttcgcggacgtcgggtgcagaattaggatcgtcactgaacaagggataaccatagcagagaactttcgatttattggtaattgctgtgccaagataatcaataagttccataatatctgcaatgttattattatcatagttcaggcgaattgcaacccgaattccagcatttgccagtgcattaatgtttgtaattactttttcaaatgcattgggcaaattgacatatgcttttcttttttcatacgtagacttgggaccatccaaagtgatttgcaccttagaaatgtgccatacatccttgaagagtttgaccatttcatcagtcacaagagagccatttgtggtcatctggtaattaacccgaatgcctttagatgcaagctcagcatccaaagtctgagtaatgtaggtaattaccttaggattcaacaaaggttctccaccaaaccactgaatcaaaattctctgagtatgcttgttctgctcgattatgaatttgcagacctgcttagctgtttccatagacatggaatgaaattttactccttcttcaaagcagtaaaaacatcttgcattacaggcggtggtgggcagaatctcatacacagtttgacgttcttggcagatcatatcactgcgatagaaattgagaatttccagttcatctacatccgctttgacgatgaaaccattagccacagcagaagtatagaaggaatccatatttccatcataactgtcaaagtttagtagccgttctttgccacctttttctaattcggacaaaccgccggaaaaggtattataaacatagtcgacaccatctacttcaaagaagtagttatactttgagagtttatagccttttttcatttgcaatacctccataatatagaagtgcggggaggaagaaagtcttcctccccgcgagtgactgaatgagacagcaacttagccgtcccaaacgcagccctggcacgtacaatcaaaacagtccgtgctagggtttccaatggccgtggccatagggttgatgcgctccgcctggatgatgttcttcatgataacgtacctccgaaatttatttgcattgtagaaatgcataaacatattataacagttattataaaaaatgtcaacattatgtaaatctgaaatataaatttagaaactaatctcttataataacatgctcaaaatattgctcctgaaattcggttaaagcttcaatagcggaattatcataatttttaccatcaggtacaattataagtttatcgtcattatcatttgtcctgtgaattattgcaatacacttgccttcgaagttttcaaaaggttcgaaaacaccaagtaaatagcaatctaattcttcgccatctccactaattgtatttggaacataaccataattaactgggtatataaatccatgtttaggatgtttgcttcctaaaggcctgtcaatttcaatttttaaaacttttcctaaataatcattagctttcatattacactcctaaaatcatttgtaaaaattatatcatattaaataaaataatgatataatatgaataaaggagaaaactatggggataatattgtatgtaatatttctaatattttgtatatttgcaggatttaatgggcttccaataatgtttatttttccagttattacaatagtaataattgtagctattgctttaaataaagatagttataaaaatgttgaaaaaacgagcgatgaggcaaatgatgatgacattcaagatttaatattttgggatataattaacaaaaagtaatgtgaaacttttgtgaattttagcactctgctattgacattgctaaaaatagatatataatataatcgaaattgataaagaagatttatcaaaaagtacatatgtgccactctcatcaagtgtcaacacataaatataattttaaggagttgatttttatgatgatgataccaagaagacgtgactttgatctattagacgacatgttcggagatgtatttttcaacgagggagaaagcaaattaatgaagacagacatcaaggagaaaaaggatgaatatattatagacattgatttgccaggttatgaaaaagaaggtattaaattaaatattcaagacggatatttaacagtacatgcaacagttaataaagaagaaaaggatgaagaaaaaggtaaatttgtacgtaaagaaagatattcgggagagtgttcaagaagcttttatgttggagaaaacgtaacagagaatgaaattaaagctaaattcaaaaacggaacacttacaatagaaattcctaaaaaagaagaaaagaaagaattgcctgagaaaaaatatattccaatagaataatcaaaaaaacctcatattaaatatatgaggcttttactttatatgatataatgtaaaaatattaaaggaggggaaattgatggatattacaattgatgttggtggttacaaattaaatgtaagagcaggtgtagttataatgcacaataataaaatcttattacacagaaatgtaaactcagatcattatgcaatgattggcggaagagttgaaatcggtgaaaattcagagcacacaataaaaagagaagtacaagaagaactaggaaaagaaattgaaataacaggatatgtatcaacagtagaaaacttttttgaaatgaaaggtgcaaaatatcatgaaataatgttcatatacaaagcagaatttgtaaatgatgaagacaaaaaattagaaagtacattacaaaatatagagggaaaaaattatttacaatatgagtgggttgacttagataaaatagatgaatatccattgagaccagatgtactaaaagaagtattaaaagaaagcaaatttccagtacacaaaataaatattgataaataacaagaaaaatagcaatgatagaaaaaagtaaaatcattgctatttttatgaaaaaaatataaaggtaagttataaagaatataacttaaaataaaagctaaaacgttctagttaacataagtataacatagagtgcgtgtcgaaaaaaatagaaacttgtcgaatagactaaaaaacttcaaaaaattaaagaaaatagcaaaagtacttgaaaaaaatggaaatttacaatataatttcagcatattaaattcaaataataattaattcaaaaatttttattctaaaggagatttcaaaaaaatgttatcaattacaaaaagtatggccttgcacggactagaaggctttttaattgacgtgcaagttgatatttcaagtggtatgccttcatgggatgttgttggacttccagatgttagtgtaaaagaatcaaaagaaagagtaagaacagcaataaaaaattcaggctatgagttatttagtagaaaaatagttgtaaatttagcaccagctaatataaaaaaagaaggatcaatatttgacttaccaattgccgtgggaattttaaaaagtttagaagttataacacaaaaccagaatgacgatattttaatgataggagaattatcattaaatggtagtttaaatccaataaatggagcgttaccaatatgtattgaagctaaaaaacaaggaataaagaaaataattttaccaaagcaaaatgaaaaagaagcctctataattgctggaatggaaatatttggtgcaagtgacttgaatgaagtagttaagtatttaaatggaaatataaaaatagaaagcttatcaacaaaatgggaagactgtttgaaattgggtaaagaaaaaatattagattttgcagatgtaaaaggacaagaaagtgtaaaaagagcagttgaaatagcagctgctggacggacataattgccttttaattcggttcaccaggatcacggcaagacgatgatagcaagaagaataccatcaatattaccagatttaacttttgaagaggcactagaaatcacaaaaattcatagtatagcaggaactttaaaacaagatacaccaataattacaacaagaccatttcgttcaccacatcatacaatatctggagtgtctttagttggaggaggtagaataccaaaacctggagaaataagcttagctcattatggagtgctatttttagatgaattaccagagttcaatcaacactcattagaagtgttaagaggaccgttagaagatggaattgtaacaataagccgagtaaatggaagttttacatatccatgtgagtttatgtttgtatcatcaatgaatccatgtccatgcggattttatggttcagtagacaaagaatgtacatgtacaccacaagcaatatcaaaatatatgggaaaaattagtggaccattattagacagaattgacatacaaatagaagtaagccccgtaaaatatgagaaattaggcaatgatgaaacgccagaaagttcagaaacaataaagaaaagagtaaacagtgcaagaaaaattcaaatagagagatataaacaagaaaatatttattcaaactctagtctaacgccaaaactaatttcaaaatattgcaaattagacaatgaaggaaagaaaatattacaaacagcatttgaaaaaatgggactaagtgccagagcctatggcagaattctaaaagtagcaagaacaattgcggatttagataattgtgaaaacattcaaaaaacacacattgcagaagcaatacaatatagaagcctagacaaaaagtattggaagaattagaggaaagaagcatgaaaattttatctaaaacaaataaattttatccaaaacgtttgctaaacatccagaatccaccatcaaaactttatgtagaaggtaattacaagttattaaactcaaactcaatagcaatagtaggaacaagaaaatgcacagaatatggcaaaaaatattcggcaaaatttgcaaaagaattatcacaaaaaggaatgtgtattgtaagtggattagcaattggaatagatactatagcacatataaattccatggaagaattaggcaaaacaatagcagtaataggaagtggatttaagaacatatatcctgaggaaaatgagtggctattccacaaaataatagaaaatggtggatgtgttgtatctgaatatcatccagatgaggaaaaagatatggcaaattttccgaaaagaaatcgtataataagtgggctagctctaggcgtattagtagttgaagcgccatatagaggtggaagtacaattacagcaaaacatgcaagacttcagggaaaagaggtattttgtataccaaatagattagatgagtcagcagggtatagtacaaattggctaatacaaaatggtgcaaacttagtaatggaaccagacgacatattgcaatattatgatttacaaccgaaaattacaataccaaaagaatatgaagaaatatataacttaataaacacgcaaccgatttcagcaaatgaaatatgcaaaatgacaggtaaaaaaatatctgaaataatgcaaatattatttatgctcgaattagatggatatataaaatgtgtagcaggaaataaatatataaaaaaggaatgatattatgataaatcaaaggcaagaattaggaaaagaaggggaagattttgcaacaaattatttaaaaaagctaggttatgaaattatagacagaaactttgaatgtaaacaaggagaaatagacattattgcaaaagacaagaatgaatatgtatttattgaagtaaaaacaaggcaaaactttcactatggaatgccatgtgaagcagtggacgaaagaaaacaaaagcatatctggaatgcaacaagatattatatatattcacataagttagaagaccaatatataaggatagatgtaatagaaatttacaaaagaaagaatagattttacttgcatcatattaaacaaattaaataatatttgacaaaagttaaattaaatgctaaaataaaaatgcactaaaaaattatatcatatcaaaacttagaaggttactataataaaccgagagtgcgaagttcgccctatatcttttagatatagggtatcttcttgtctgaataaaaatgacaaattttgacaattttatataattatgatacaatattcatgtcaaatttaatttggaggtatagtatgagatatacaattggtctagatattggaattgcatcagttggttgggcagtaataaacgaagataaaagtagaattgaagacttaggagttagagtatttaaaaaagcagaagaaccagatggaaagtcgctaaatttagcgagaagagaagcaagaggaagtagaagaagaattagaagaagagcaacaagaatgcaaaaggtaaaagagttgctagttaagtataatttagtttcagaaaaagaattagaaacattatatataattacagaaacaacaccagatgtatatgaattaagagcaaaaggtttagaacgattgttaagtagacaagagtttgcaagggtgttaacaaatattgcaaaacgaagaggatataagtcaaacagaaagattgatgaagaagacaaggaagttggaaaattaagtaaaggaacaattgagaataaaagaattttacaagaaaaaggttatagaacaataggtgaaatgttctataaagatgaaaaattcgagtacaataaaagaaacaaggccggagagtataataatactgtgcttagaagtatgttaatagacgaagtgcatactttatttgaaatgcaaagaaaatttaaaagtgagtttgcaaataaagaatttgaaaaagagtatgtagaagttatgacatatcaaaaaccgtatattacgccagaattattagaaaaaatgcttggcaaatgtacttttgaaaaaggtgagccaagagcacctaaaaatagttatacatttgaaagatttatgctattacaaaaagtaaataacttaaacatttatataaatggtgaaaaggtagaaatacctcaggaaaagaaaaaagaaataatagaattagcatataaacaagcagaaataaaatatacacaactaagaaaaaaattggaattaccaatagaagcaagatttgcagacttaaattatcaaattaaaagaaccgaggaagagtcagaagaagcccttgtaaaaaagattgaagataaaaagtttgtaaagttagaaggttggcataaaatcagattggcactaaaagaaaacaaagacaagtttgaaaagattgaaaaaaatccagaattgcaaaatattattgcagatgcactagttagaaataaaactgatgaaacaataaagaactatttagaaaaaagcgatatagatgaagaaataataaatgctatattaaacataaactttacaaaatttggtcatttatcatataaggcaatgaataaaataattccagaattagaaaaaggcttaacatatgataaagcatgtgaaaatgtaggctatgagtttaaaggaagaaaaaatgaattgcaatataaacttccaccagtaacagaattggaagatgaaatactaaattcagtggtattaagagcagtttcacaaactagaaaggttataaatgcaattatagacaagtatggttcgccaacagctatttatattgaaacagcaagagagctttcaaaaccttatgatgaaagaatgaaaatagaaaaaagacaaaaggaaaatgcagctaataatgaccaaataaaagaatatataaaagaaacatttggatttgatcctaagccatttgatattgtaaaaatgaaactttggagagaacaaaatggaaaatgtgcatattcaagcaaaccaattcctgctgagagattatatgaagaaaattttgtacaagtagatcatattattcctttttctagatgttttgacgatagctatcaaaataaagtattagtattaacagatgaaaatcaaaagaaaaaagaaagaacaccatttgagtattttggagaagacaaagaaagatggcatcaatttgagaaatttgttaatttaacctacaaatttaacactagaaaaaaagaaaatttattgattaaaaactttaatgaagaaaaatcaaaagaatggatacaaagaaatataaatgatacaaagtacatttcaaaatttatgtataattatatagcaaacaacttgaaatttgcagatagcgagtcaaagagaaaagtatataacataaatggacaagctacatcaattttaaggcactattggggattaaaaaaggatagggaagaatctgacaaacaccatgcgcaagatgctgttataatagcatgtgcaacaaataaaaatataaagaaagtatctgattacagtagaagaaaactattatacaaaaataatgaaattattgatgaagaaacaggagaaattatcgataaaaaatacaatattgatatttcaataaaagagccttggcctaaatttagagaagaagtagaagcaagaatggaagatgcagataataatggacaattatatgcattagttaatggaaagtttacaaactatgacgatgttgatataactcatattagaccaatttttacatcaagaatgccagagagaaaaattacaggaagggcacacaaggatactatgcgttctcaaaaatttatacaacaaggtcaaaacttcacagtagtaaaaaagccattaaaagctatatcaaaacaggaaattgaaggaattataaataatcctgatttcaaaaatttatatttaagtgataaaaagttgtatgatgatatttatcaaaaaatgaaagaagcggattttaaagcagaaaaagcatttgcagatgaatatagaaaatatagtaaaactggaaatagtcctattgtaagaagtataaaagttccatcggcagggggaacagggggacaaataaaaaaaagaggatagaacaattcaaggaacagggtttgatttcccaagaagaagccgagcaaatggtaaatgagttgggagaacgtcataataaggtttttacttcttaccagttcctaaaatagcgacaagaaaaatatgtcatcctcaatagataataactcatctaaatcaccattcataatgtatggtaaacactggcgaatcttgtctataggccaatcccactatttgaggatcttgtataatggtatttagatatacggtttgtttatttcccgtacgtggatatattttagtcatcatctttcttcgttttttagtaatgtttctttttcaaataaaaaatagattgtgtagccaacagaattacaaagacgtattccgctgttaaatagattgcgagaggagcttgcgtgtagcgacataaccaataaagataaaccaaatatatggctgttgtcgtaacttgaaaaaggaaagtcatttgtgtctttcctgttcctccgacagcattcaaatatacataacccggtaaagcgaaagtgtaattcaacaacattacaacaaaaggggcaaaagctaattgtatcaatagttcattactcgtataaaaaccaataatccatcgattacacaataaagcaatcgcaaccaagggaaatcctatggtataacctaatttcagaattttactacagattgaaaatagtgtct

SEQ ID NO: 3299 - DNA, 11237 bp, synthetic construct
  misc_feature 1..11237: note = Synthetic
  source 1..11237: mol_type = other DNA
ctgtattaatttatttttttgcaataatactattatttataattagtggaattattttcataatagaagcatcaaaaaagatagaattcaaatttaattataaaaaaatatatagtattaaacatttaaaatcattttttcaagcagttcacgaatatcaaaaaaagtggattactaactattgtaatagaaataaattgaatagcattaataagcttaatattatattgcaagaaataaaagctgaaaaagatagaactacgatcaagtacataaatcctattattataggaactttgtctttgtcaatatggggaattgctattcaaaaaatagttgataacactggattttggggtatgttacctatagcatttgctttaattctaataatatctataagtttaggttggataaaaaagtcatttttagaggataaagaaaatttcaatttttttgaaactttttcaagtaaaactagactagaagaattaattttgtataagattttaaaatgtaaaaaataaaacattttattttaaggagaataatatggaacatttttttcttgatggatatgaattaacaagttataattaccttattttatgtcataacacaatgctgagtttagtaaaaagagcaaacagaagagattggcataatattaaattggaactaaaacaaggtgacgaagaattattgaataatcatgatatagaatatttgagattacacggatataaagaagaaataagtagtttatattataggcatatgtttttttctgtatgggctgattatttagactatacatatgaagcaaatattgcagcttcaaaaatgaaagcaagtatagcatattctttgttgagaaagccgttaaaagataatttgtattttttagaaattttagaaaacaagggagtagaatttatatatgaatttctagataaatcaattgatgaattctcgattgataaaatagatgaagaaacaaaaaagaatacaatatatgaagtttcaaaagatgtttttagtaaatcatatgctgaaaccctatataacataaggtattcaaagaaagaagatatacgggttagaaaaaatatggaataaaacacaacatataattactacttgccatcattataaaacagaagatggaaatctaaatatggtatttaatgatgaagataatataaaagaatttataacatatttttatcatgttatgccaacagttcaaacttatgtagttaaattaacattaaaaatattacaaaaaattggacttataaatgaaatagaatatacagttaataattccataattacaaatagatttttaatgtttaataattcaaaaaataataaagaaataaaaaaaatattagataatacgtctttattatgtccaagatgttttaaaaaaattgataataaaaataatcattttttggagcaatggtatattagttgtccattttgtaataaagaaattaatttagatagatttttattttacaattgccataaagaaggtaatgaatataaaaagggaagatataataaaaataggaagtaataagatttggaaatcttatacttcctgttttattgtgtataaaaatagtattaaagtttttatttttcaaaacatcccataacaagttgagagccatctacaaaaccgtttctataatatttctcattcatataaattaaataattcataaaatcatcatagattaaatcgagttgcttttctacatatttcttattttgtttagaaacattctttaatattttttctctaaaaggatcatacttaaattcatgttttctatcttgttcatttgtataacataagtaggtactctccatacaatcataccattcttttaatatatcatcttcatttacttctctaaaattaatcataataattctcctaacatttaatattttataaaagggattgggacttgtcccattgcatagaatttgaaaatacgaaaatctcgtgtgaacaaattcagtgcttgctaggacaagaattaaccctttttcaaattttatttaacaataaattaactctttaagtacaatttcttcagctctatttttaatattattcatacatctaacccactctaattgattattttgtttcaagttttcatcaactttttcttccttagcaagttcattaataatcatttttgttctctcatttgcagttttatctatctcaattaggtactctggtaatgtaccatttaatattaaatcgctatataaacctaggctatgtttcttcatatactctaattttaaacgtccatataatccaatatggtaatcagattctgttccttttattgctaaattaggaattaaataatctccttctttacgatatgttatttctttcataatcaaaacctccaaaattaatttttaggtttcccatttttattgcgaacatacgtgtaaaatccatggggaaaagatggggaaaaaatattcaaaaaagttcaaaaaattacacaaatgttcgaaaaattattccccaagttttccttgataaatcaagcaaaaccgttgaaatcactaaagttcataaacctgtcggctagccctcataacccgaaggtaaagctaccttcctacacaaaacattaatcctaattatgatatcatgacatattacaaaaaaacgtacagattatgtaaaatgcgatattattacgttaagttgtcaaaatatgtacttaaatatataaagaaatattaaataaatagaaaacacgcttttaataatatagaagtaaggagaaaaagtaaaatgaaagaaattttggaagaatataagaaagagtgtgctttaaaaagtaaattagcaagttttacgtggaaattatagacgattacaagtttaattacatatttttatttatcttttcatggatataatacttggctgatagcagcaggaattcttttactgacaattttgatatttatgatagaacaaattatattcttaagatatgtgtctaaaaaactagaaattaattatagtattagagatggttttgatgttaagaaaatgaaaaaaatttgtagtaaaatagaatcatttcaaaaaattggattaccaattttggcaaaaagaagaagattgatacttttaataaattgaatttaatattaacagaattaaaaatttggaaagaaaaggcgactacaaaatatatggagtgggggcttgtaagctctattgtattatcactgcttcagaattgaatcaatgatgcaagtaatgaaatgaatttgattaacaaacttgttatggggttgataatagctgttataattttttttttattagctttttaaaaaacaacacaaataaatttaaaaatttttttgaaaaccagatttatattcaaatatagaaagacttgaagagttgatattttatgaaataatgaaaagcaagaaatgaaatacaacatataaataatgatttgaaaattttaatctgattattttctatacatatacaaaatctacaaaaatatgttattatcaattatatacagacttttaagaaagtctggtgaagtagaaaatgttgtatgcaaatactagatgtagtgtttgttgagaacaaatataatatatggagatgaaaaatatcgtgaaaaaattttgtggattttcagtaggaataatagctgtgttaacattaataataatttgtttttataaatttatctcaatgccagacattttaattgaaaatgtaattctagaaagctcatacataaattacgcatgtggctttcaatataacggaaaagttatttgcgacagtggaaatatttattctttttcaaagtcagatagggcagcatatgtaagtgcttctacagacttagaaactttaaataattatatattaagtggtgatacgaaatttgttggtagagttaatgataaagatttaaaaactatgaaagagtatgctaagacaatagataacaattatactgaagctgtatctggtggaaatgacatgggagctaatgtaatttctatatggaattatgataaaaatgaaaagacacttttgaaagaaactggcgattggaataaagaaaatactagtgaaaatgccaaaaagttaaatgagctgatagagaaatatatgaaatagtaatgtgactgttacagatataattagcaaataaagtaataattggaggaaaataaattatggacaaatcatattttattcaaagattaaattcacttgagctacctgttggagaatattatattttgtcaagtggctcacttcttttatatgggctccgagaagaagcaaacgatatagatttatgtgtttctaaagaattgtttgaaagcacattaaaagaaaaatatcaatttgatgatacagacaaaaacgagtatggcttttataagattgcagaagatgttgaagttgttgtaaatgataagagtgattcgaaatacaaatttgaatacgatattgtcgatggttatcctgtgcaaaaattaggaatcattcttagagataagaaaaagagaaatttacaaaaagatcaaaaagatataaaaaacattaacaatttcttactcaaaaattttgaaatttgcgacatcaaaaatcgtccagaatttcttgaagaagttgcgattctcacacaaaaagaatggggaaaaggtgaattaacagccaaagaatttcaagataaggttagtaaaaaagtagaaaagattaagcagaatttgccattgagagattattgcaaattgttacttatatttaaaaatgaattgattggatttatatcgatttttccacatgattgtccggaaatgccagaattaacacctttgtatgcgactatgtttgtgaaagaagaatattgtcaaatggggtattctaaaatattaaacgatacgatattaagtgaagctaaaaatagaggatttaagagactgtatttaaaaacaaccttaaataattactatgagaagtttggtgcaaaatatataaaaactttagaaaatggcgaaaaattaatgtgttttgatattttataatacttatatttttcaataataaaaccgaaaacttttatttaaaaaaattaaagggaggaactagatgaaagtattaacaattaggcaaccttgggcgactcttataatgttaggctacaaaagatttgaatttagaggatggccaacaaaatatagaggcgaacttttgatacacgctggaaagactgtagacaaagaagctagtgagagactagaaaaatatcttccatcagaattgccactcggaaaaattttaggcaaagttaatttagtagattgcataaaatgtgacgaaaaattaaagagtgagtgcctaaaagagaatccagatgtttatgcaaagagttcttttgaagaaaggtatgcatggcaattaacagatgtacaagttttcgaagaaccgatagaggttaatggaaaacttggattgtggaactatgaattgtaaacaaaaaaacacatcccaataaagtatcaaaaaaaattatgtcgaaacttgtcgaacgaaaaagaaaatagtcgcgtgaaaatatgatataatataaaaaaggaaaaactattgacacattagcaaaagtagtgtactatgatggtacaagttatatcatatcagagtgtagttggttactataataaatcagttgagtaatcaatgagatgagaagtttaaatagtcccttaccttttaggtaagggacatcttcgttttatgggtttagaaggaggtttatatgaagtattctttgggattggatattggaatttcatctataggttgggctgttgtaaatttagaaaaaaatcgtattgaaaatttgggtgttaggctatttacgtctgcagaaagacctaaagatggaggagctattaatgaaaagagaagacttgcaagaggtcttaggagaagattaaaaagaagaagagtaagaatgaataaaattaaagaattatttgtaaagtatgaaatcatctctaaagacgaaacagaaaggttatatgttttatctaatgaagatatagatacttggcagttaagagcagaaggtttggatagaaaattgacacctagagagtgggcaagagttttgacatcaatagcaaaaagaagaggatataagtcaaatagaaaaacagaagcaaatagtgatgagggtggaaaaataataaaatcaattgcattgaatagggcatatatggaagcgaaaggttatagaactgttggagaaatgttcgctaaagatgaaaaatatatagatgcaaaaagaaataaaaacggtcagtataataattgtatagataggagcgaattagaggatgaaacgaaaatacttttctctaaacaaagagaattaggcaacacgtatactagtgcagattttgaaaacgagtatttgcaagtattcaattatcaaaaaccatttatgactcctgaattaatggataaaatggttggaaaatgtacgtttgaaaaagacgaacctagagctgctaaaaatagctggacttttgaaagagctatgttacttcaaaaagtgaataatttagcctatcaagtagatagtaaaaaaatatttttaagtgaagaacaaagagaaaaagttatagatttggcatataaacttaaaagtggagtcaaatataaaaaaataagaagtgaattagatattccagaggaagccgtttttgttggactaaattattatataaaacctacgaaaaataagaagactggggaatatgaaaaattatctgcagaggaaataagaaataaagttgaagatgcgtcgacatttgtaaaattaaatggatatcatgaaattaagactgcttttgaaaaggctgatgctctaaatatttttgatgaactttgtaaaaatgaacatgaaaaaatcgataagattgctgaagtgttaacacgaaataaaactgatgttgagattattaaagcattatctgaattgggaatagacgataaagtaatagatgaactaacaaatgttacttttgcaaagtttggacatttatcatataaagcattaaataaaatattgccttttttagaagaaggaaaacagtacgataaagcttgccagtcagctgaatataattttaaaaatgatgatggtgagcttaagtacaagttaccagtaatttcgaaagatgaaataagaaatccagttgtgtatcgttctgttacacaaacaagaaaagtaatcaatgcaataatagacaagtatggatcacctttcgaaatacatatagagcttgcaagagagcttactaaaaattttaaagagagaaaagatatagagagtaaacaaaaggaaaatagaacgcaaaacgaaatattgaaaaatgatataaaacagcattttggaataacagctaaacctgttgatatgttaaaagtaaggttataccgtgagcaaaatggaaaaagtgcatactcaatgcagcctatagaatatgctagactgtttgaaaatggttatgtagaaatagatcatgcgataccatttagtagatcatttgatgattcatataataacaaagttttagttttgtctcgagaaaatcaagaaaagaaaaataagacaccttttgaatatttggggtcaacatctaattgggatgagtttgaagcttttgtaaaaacaacttatcgtaacaatatgaaaaaacgtgagaatttattagtgaagaattttaatgctgataaagaaagagattggctagagaaaaatttgaatgatacaaaatatattgctagatttttattgaattatataaaaaagaatttggcttttgaaaactttggtgaacctgaaaatagaataaaggtaaaagcaattgtaggaagctgtactacggcacttagacattattggggaataccaacaaaagatcgtgaaaagaacgatttacatcatgctgaagatgctgtgataatagcatgtgctactgaaaaatttcaaaaaagaattcgtgaatatagcaagcaaaaagaattatattatcaaaataaaaatggagaatattttgatgaagagactggcgaaatcgtagatgtaaaatataagacacatgaaatggaaagaccttggccagaatttaaagaagaattagaagcaaggatgagtgaaaatccaagtcatgatttagctagcgatatgtttaaaaattataatgatgttgatgtgacgaaaattaagccaatatttgtttctagaatgccaaacagaaaagtgacaggtcaagcacatgaagagacgatatattctgcaaagctgacggataaaggaattgtaatgcgtaaaaagtttctaaatcaaataacgaaatctgaaatagaaatgattttaacaaatgagaattatcgagagatatatcaaagcgataaggaactttatgattcgatatattctcgaatggaggaatttaattttagggcagataaggcatttaatagtgaatatgtattaagaaaaagggcaaaaaagggtgatggacctgttgtaaagagtataaaggttcctagtagtatgaattcaggattggaactgcaaaagggtagtggaaaaggaatcgcagcaaatggtggaatggttagagttgatgtttttactaagaatggaaagtattatttggttccattgtatgttgctgatatgataaagaatgttttacctaataaggcaataaaggctggaaaatctcaagatgaatggattgagatggatgagacttataaatttatttttagtttatattacaacgatttggttggtgtgaaaaagaaaggcgagaaaataaagattatgtattttcatggtgctgatgttagtactggaactttgacattaataaatcatgataaaagtttaatagatggtaaggaaactgcgagacctggagcacaaaacttagaagttttcgaaaaatatgaagtagacgttcttggcaattattataaagttaagaatgagaaaaggaaaggaggtataaaaagtaaaaaataggaggtggtaaaaatgagttggaggagtttgattatttctcatccctcaaaattgtcattaaaaaataatcaaatacaaatacaacaagaggaaatttggagtgtgccgatagaggatgtgtcagctattgtattagagtcgcagcaagttttactgaccgaaggcttgttaagtaaaatttgtgaaaacaatataatagtatacatttgcgataacaagcatactccaaatggttacatacttccatactttcagcatagtaggcagactaaaataataaaaatgcaaattgcattaacagagccttttaagaaacgttgttggcaaagaataattaagcagaaaatatttaatcagtcatacgtgttaagatgcattggaaaatatgatacagaaaagaaacttttgaaaatgttagaagatgtcgattctggtgatacgcagaatatagagggacaaagtgcaaaaatatattttgaaacgttatttagaaaaggctttaatagaaatttagaaaatgtatataatgcatgtttggattatggatattctatattacgtggtgcaattgctagaacgataagtcagtacggatatattcattgtctaggaatacatcataaaagcgagttaaataactacaatcttgctgatgattttatagaaccatttagagctcttgtagatttgtggacaattcaaaacgttaaagagactgaagaatttaatgctaacattcgaagaaatctggtggatttacttaattatgaagttataatatctggaaaaagagtgtgtgtaagtaatgcaatagaaatttttgttagttcgtttactacaagtgtgcaaagcaaagactatactaagttgcaagtaccgattataatacctttagaaagacatatatatgggtaagtatatgcgattaatagtattttttgatttgccagtagtaacgaaaagagatagaaaaatttacgcacaatttagaaaatttctaataaaagatggatatgatatgctacaattttcggtttattctagaatatgtaatggtgacgatggggtaaacaagcattatgcaagattaaaagataatctgccaaagaaaggttcaataagatgtatgaaagtaacagaaaaacagtatgtaagtatggaaattttaataggaaaaaagacagtaagggagagaaaaattaatgcagatcaattatcattattttaaaaatcataaaaaagtaactattttagatgaaaaatagttactttttttatgataatttgtcgctaaagccagtcttagcaatggttataggatcatacattatatcatatcagaatgtagtaggaaactataactaaatttgaaaactatataaatcaaaaaaaattatatcatatcagaatgtagtaggaaactataactagttgcgcgcctacatacagtatatttaaattatatcatatcagaatgtagtaggaaactataacagcattatctaaatatgttagtaatgcaatattatatcatatcagaatgtagtaggaaactataactaaagccctaatgaataaattgataaattcattatatcatatcagaatgtagtaggaaactataactcaagatatagtaactgtattcgctactggattatatcatatcagaatgtagtaggaaactataacagcccattagcaaatccattaagtatattcattatatcatatcagaatgtagtaggaaactataacaaatccagacataaataataagaacttattattatatcatatcagaatgtagtaggaaactataactcagcaagctgttgatttatttgttgatttattatatcatatcagaatgtagtaggaaactataactatcggttttaggaggatataatatggaagattatatcatatcagaatgtagtaggaaactataactatcatcttcatattttgttccttttaaaaattatatcatatcagaatgtagtaggaaactataacctcgatttgctgcaagcatgaatatgcttgattatatcatatcagaatgta

SEQ ID NO: 3300 - DNA, 23744 bp, synthetic construct
  misc_feature 1..23744: note = Synthetic
  source 1..23744: mol_type = other DNA
ccgagacctcacccgaggtaactcactggctcgacttcggcaaggatcactatgcactggtcaccttccacaatacgcagacacgcaccattggcatcccttgggtaagcaactggcagtacgccaatgtcaccccgttcaagcagacgcgtgggatgaacggtctaccacgtgagctcttcctcttcactcaagagggcatcagctacgtgggagcacgcccagctcgcgaagtcaaagccctacgccaagcctcgatcgacctcgttcttcctaagaatatcggcgaagaagtatgcctaaccaatgccctcgcagggctggaggacagcttcgaattagaggtcgagctgacgccctccccacagacgaagcgcatcacccttatgctcagcaaccgactcggggaacagctgcccatcatcctcgacctcaataagaagcgcatcacgatggatcgcaccaagagcggtcgcattgacttcggagtacaagccatcccccacgagcgtgagaacaatgcttggcgtgagggtgatggggtgaattaccacaatgacttcgctatcgccacgtgggctcccctcagcctatgcagtgggaagacctacaagctccgtctcttcttagaccgaagtatggccgagctcttcgtacaagatgggcgtatcgctatgaccaaccttatcttccctcgcgagccttacacgagcctccatctaagcagtgaaggtgggaggacacaggttcattccgcccacctctaccgactcgggctatagttttcgtacttttgtgccacataaatacggcagcgtagactgaccgtatcgactcttatgaacaaagaacccatcatattaggaatagagagctcttgcgacgacacttcggcagccgtcttagtcggacataagctcctcagcaacgtcatcgcctcccaagcggtacatacagcttacggcggagtcgtccccgagctggcgtcacgcgcccacgagcaaaacatcgtccccgtagtcagcgaagccatccgccgcgctggcatcactgcccaagatatcgatgccatagccttcacacgtggcccaggactcttaggctctctcctcgtcgggacgaactttgccaagggactcgccctctcccttggtatccctatggtcgaggtcaatcacctgcacgcccacgtacttgcccacttcatcgaggaggatggtgaggaacatcagagccctgagttccccttcctctgcctcctcgtctcgggaggcaactcgcagattatcctcgtgcgctctgcctccgatatgaccatcatcgggcaaaccatcgatgatgcagctggcgaagcctttgacaagtgcgccaaggtgatggggctgggataccctggtggcccagtcgtcaaccgcttggccaacgaaggaaaccctaaagccttcgcctttagcaaacccaatgtcccaggctacgactacagcttcagcggactcaaaacctccttcctctacaccctgagggatgagctggagaagaacccgaacttcatcgaggagcggaaagccgacctctgcgcctctctgcaagcaacggtcatcgacattctgatgaagaagctccgtcaagcagccaaggatttaggtatccgtcaagttgctgtcgcaggtggggtatcggctaacacggggctgcgcgaggccttccacgaccacgcacgccgctacggctggcaggtcttcatccctaagttcgcctacactacggacaatgctgctatggtagcgatgaatggttacttcagcttcatcgaagggaagcgcaccgagctcgatgccgtacccttcgcccgtgtcactatgtaagttcacacccaatgcatcagacacacctcactccgctcatcgaagagctccaacgtcgcaatctgcacatcgctacggcagagagctgcaccctcggacgagtcgccgctatcctgggcagctcttcaggagcttcgggctacctccaaggaggaatcatcgcttatcagaccgagcttaagacctcgctcctcggtgtcccccccgagctcatcgacacctatcacgtcgtcagcgaagaggtcgcctgtgctatggcactcggagcgatggagcaactgcaagcggaagtagccatcgccacgactggagtagcaggacccacgggcggtgatgccacccatcccgtaggtacaatttgcctggcagtcgtcatcgaagggccaagaggtccagtcgtcaattcgacgaccctacacctgtcgggcagccgtgaggagaacattgaccaagccatccacgaagccctgcacctcacgctacagctcctcgaagctcatcccgaacaatagaattcgcctctacactgctcctatgatgcgtacgtcttcttccatcctccgcgtgctggcgacagcctgcaccctcctcctgctccctacgctcgtctcgacttctttgcacgcccagtccagcgaagaggtatgtcgcatcgggctgcattataaggtcctgggtgaaggaaatagcaatagcacccccgtcctcaccgccgtgcaacccttcgctccggcagccatcggagggtttcagcctggtgaccttctcgtacagatagatggagtctccacagtcgggctctcccagcagcaagtgcgcgagctactgatccagccagtgcgcgaacatctattgacaattgtgcgcgtaggctctggtgctacctcccatctcctacgccccagttgcaaagctccctatgccctgactgagcgtgagctggccatagccttctctggatatagccccattgaccaagccaagcacgagcacacacttccgctctccaacggagggagtacgcccttcgattggtctcaagccaagacctttgcctttgcgcccgccagcgaagaggacaaagcgctctatgactccctctacggacagatcgctgctctcctcgagcagcgagggatgaggcagcaagccaatgaccctgatctcatactccagtgcatacgtaaccgagcaggcgaagcggaacagctctctcttcagatcttgtctgcatccaagtcgaatcagcttctttggaatagtacgaccagcctcccctcggagaagaatgaagcacatagctacgcccagcacatcatccccgtgatgctacagagcttccccttcgccacctcatctacaccgtcgacctacaccgaggagacgcaccaatatctctatacgggcatcctctatgacagccgtgacctgagtcgcatcgtggatgtcgaggaaggctcaccggccttcagtgctggtctacgagtgggagacaaggttcttcgtatcaacggcaagcctcttacccccacaagtgtcgcagagctctcggctcgttaccgagacttcctcgatgacacctaccgctatcgcacggcagaggcagttcgccccgagcaagcaccttggcaggagaacagctattcaagcatccgcaaggctttgaataaggagaagtatgccagtgtcttcagctacctcttcttcttccgtccctacatcaatgataccaagcatacggagctcatcttcgatatcgagcgtaatggcgagacctatacgctgagcctcacacctgtcctccgtgacgaatcggtatccattccccactaatccctctatgcagcctgaaccactctcgacctatcagctcggtcgcctccagtcactccccatccttcgcctcgtatcgataggcgcttaccttgacggtggcatccaagacatcctacttcccttgcgctaccttcccgagagagccaaagagggagatagcgtctcggtcttcgtctaccacgacaacgaagggcgactaatcgctactacgctcactcccttagcccaagtcggcgaagtagcgtacctacgatgcacctccgtcaccgaagctggagcattccttgagtggggcattcacaaggatctcttcgttcccttccgtgagcagtcctctaagatgcaggagggatacagctacatcgtgtacgtatatattgatgcgctgagcgggaaaatcgtcggatcagcacgcctctccaagcacctcgacactacccctgccgattatgctccagggagcaaggtagcctgcatcgtcaccgagcagcacgagcgtggctaccgctgcatcatcgagcacaagcactggggactactctacaacgataccgcaccgcgtatgctccagcgtggcgagcgaatagaggcttacgtcatccgcctgcgcgaagaggacaacaaagtcgatctctccttcgtccctgtaggctatcagaaggtcgatggagagcaagctcgcttactcagcctactcgagcagcaccaaggacggctaccgattggagataagagccctgccgaggatgtgatgcgtctaaccgggatgagcaagaagaccttcaagatggtgctcggctctctgtataaggcaggacttgttaccctcgcaccgaccgaagtgcacaagaagtagcatcctctccctaagccaatgcactctccattccaacccagccaacaagtcagggctaccctcgaggcgatgaacaaagcatcgcacagagggcagcccttcttctttatcttagacttcgagctacaggagagcatcttccttcctgatccattagagcaacacgacggcagggtcttcttcagctttcccacggcaaagacccccgatccaatagggacgaagcaaaggatcgccctccactccacccccgaatcactcgagagctatacctcacgcttcaatatcatacatcgtggactaatgcgcggagatagcttcctcacgaacctcaccctccgcacaccgatcgagtgtacagcctctctcgaggacatctacctctcctccgaagctacttaccgcatcctcctcccgagtcgctttgtcgccttctctcccgaatgctttgtcaagctccaaggggatgaactggcgacacaccccatgaagggtacaatcgatgtccaccttcccaatgcggctgagacactacgtgctgattacaaggagggatgcgagcaccataccatcgtcgacttaatgcgtaatgacctcagtcgcatcgccaacggggtgcatgtccgccgcttcaaatacctcaccgagctacacacatcttcgggagaactgcttcagatgagttcggaagtcgtcggctccatcgatcgtaatcgtggactacacttaggcgacctcctcctacaactcctacccgcggggtcaattagtggtgcgcccaaggagcgtacagtagagcttatccaagaggccgagggtcagtcgcgaggcttctacacaggggtatgtggctactttgacgggaaggatcttgattccgccgtcctcatccgcttcatcgagcaagacgcagacgggaagctcttctatcactcgggaggcggtatcaccatcaacagctcctcggaagacgagtaccacgaatgcctgcaaaagatctacatccctcagtaatgctccgctctttgcccgccttcattgagacctttatggtacgggatggtaagctccaggctggggatctccatcaaaagcggatgcttcgtacgctgagcgactgggggagcgagccctcccaaccgcttttccaaagcctactcagtgacacgccttggctggaagttgaggcttatctgacgaagcagccacttcttcccgccacgacttaccgcctcaccctcgagtatgacctcacgaagattcgtgctatccgggtcgtaccttaccaacgacgaagcatacgcaagctccgaccgatatgccttcccgaggacttcaactacaactataagtatgccgaccgcagcttctttgagcgagtgaaagcgactcttcccgatgacgaagagcctctcttcgtccgcgaagatggcaccatcacagataccagcttcacgaacgtccttatagagaccgaagaggggtatttcacgcctgcacatcctttacttaagggaacccaaagggagtatcttctacgctgtggtctgatcaccgagcacgatcacctgacgctcactcaccttatgcacgcccgctcgctcctcctcatcaatgccctccttcccctcgaggatgctctccgcctgccgcctacggcagttattgagactatgacctctctatgacgagcattccatgccgtttgctttatcgcacaagacttgctaactttaccgcaaagccaggacacacacagtgctggtcgtactattcgtctcactactaacctacttcaaacgcacatgatcgaacgtattggtatcaatgcaggactcgtctggaacgccctcgataagctgggcaaaatggatgtcaaggctctgcgcaaagcaacgaaactccgctccgacaaagaactcttcgccgctatcggctggcttgctaaggaaggcaaactcctctttgacgaatctggcgaagaactactcattgagcttatctactaaatatagtcaggtaggtactcccctacccgctcgtacagcatcaggctatccctccgcagcgacgaagggatagccttacttttctcccttagctctgcttcatctcgtgggtacacgcacctccagctcctctcgcgcctccaatttcgagctgcttcgtatcttggcgatgctcttcatcctcgtcctgcatgccaacttcctcacatttcgcttcccctcacaggtagcgattcacacccgtccactccttgctttgggacaggtatggagcgaagcactggctattgtcggggtaaatgtcttcattctcatctccggatacttctcgataaaagctcgagttaaaggaatagtaaacctcctgttccaagccttattctataccttcggagtatattgcgcgcttgtcctactcggggtggagccgttaggcaagagtgaactgataggaagcctgatgcccctcaacaggaaagctgagtggtttcttcccacctacctcggcctgatgctcttctctcccctcctcaatgccttcgcacagcataccgatgagagggggctaaggcacttccttctgcttttcttcttgattgaatttctcttaggctttgtgaatgaccagctggaggtcaaggacggctattcgctcttctccttcgctggcatctatctggtggggcgttacttgagactctatcccgagcgactaaagaggtggcatgggcgtagcttcctcttcgcgtatatcggcatcaccttagcgcaatcccttgcactcatcctctacgcttatataagcaaggagtccattatggcgagcccactgacctataagtttctccggtatgtctcgccgatcaatatcttcgcctctattctgctcttcctctccttctctcgcctgcagctgcagagtaaggtgattaactggatcagctcttctacgctcgcagtctacctcatccactgcaatccgcgcctgataggaaggtatacgggcttcataaagggactgaacgagcagcaccccacaggtacattcatcatattagctttaggctttattctcgccgtcttcgtagggagcatcgtgatcgacaagctccgtttacttctgtggcagcgagtcatttccccactctatgatgctggctcccgcctatggagtaaggtcggtcttccgatgattgacttccccgaagattgggattaaggcttttccttcgtcacagcttccacctgaccatcggcaaagcgcaccacgatgtctgcgccagcagggagctgactgcttcgggtgacgatgcggccattcacagagacaagactaaatcctcggcgaaggatttgatcaggatgggccaagcgtatcgcttgctcctgacgtagcagatctgcctcccaccgctctcggagatgtgcgatacgtagtgggaggtgggtaagttgctcacgaagtctctgctgatgtagacgcaatgcataggtagaagccgaaggcagacgacgcaagaccaagtccaggcgatgctccgactgctgtaggtagtgccgtgccgcaagcgttatctgcgatcgctgtgtcagtagtttacgctcggcctgctcgaagcgacttcgcaccaagagtggaaggcgtgatacctgtgcgtgaagccagttgcttcgtcccatcgaaagagcttggagcaaggcgggcagacggcgaagttgttcgcgaagtgtagccagttcgtacgccaattcatccactaaaaaggcagctaccgccgtaggagtcttcagcgaagtatgtgcgactaagtccagcaccgaaacatctcgctcgtgtcctatcccagagattatcgggagggggaattgggcagcagcttcgcaaagcgcataatcatcgaaagctcttagctcgctcacagcaccaccaccacgaatgatgaccacagcatcgaagtgctcctctacggcagcgatgcgtcctaaggcggctatgaccgaggccgttgtatcgctcccctgcatctgagctgtgaagagtgctgtatagagcactactccatagacgttcgtatgcaactgaagcataaagtccccatagccagcagccgtcggcgaagaaataatcgcaatgcgctgcagcggacggggtagctccagctccttattcatctcgtaaagcccattacgcttgagacgaaggatcgtctcttgacgtagacgcgctatctcaccgagggaataattcgggtcaatatcaataatattcagactcaacccgtactgaggatgaaacgcaatccctacaagagccaagatactcatccccgaagtgagcttgcctactccactacgctcgcatctctgctctatttgtgtataggtggaagaccaaatcgttgcacgcaccttagcgacgacatcaccttgttctcccttctctaagagctctaaatagccgtgcccctgcgcgccagcacggcgcaagtcgctcacctccgcccgtacccaatagcggtcggggaaggaatgctccaaacagcgtctgaccgaactcaagagctcggtcaggctaaaggaacgcacggtcggggcttcgggcacggcgacgacctactgaggaaggtggtcggggatatggatgcttcgctcgaagctcacatccagagaaatcagtgtctcggtagcgatgacccctgggatactctgaataataccattcaggatacgcatcaggtcattgttatcgatagcgtagagcttgatgagcatcgtataaggtcccgtcgtgaagtgacattcgacgatctcaggaatatccctcatacgctcggctacctccttgtagagggagccacgctccaggcgcaccccgacgtaggtacaagtattgtagcctattttcttggggttgacgtggtatttaagggaggtcagcaccccactctcgagcatacgggtgaggcgctgattgaccgatgagcgcgaactattctcaccctccgcgacatcacgtagcggcacgcgagcattgttcgtcagtcgtctcaggatcttcagatccaaatcattcagtttcttcatacaacttgggcaaaagtatcactattcggagaccttattatacaaatgtaataaagtttcgaggattagtcgctatctgctcgacaaggcgagggcaacgatgacgaagcgaagtcactggtagcgaggcaatagcttgacttctcgcgaggaagtcgctaaatttgctccagtgctaccagccacagtagtcaacgagtagaccagctgacatcataaagaaagggcgagcactcttgcgagccccgccctggatgttctcacaacggaaaaaatccttattgtgattagctttcaaattcagtactgcaaaggtagtattttttaattatactccaaataatcagcttatgaacaagcgtgtattaggtctggacctcggtgtcggatctatagggtggtgccttatcaccctggacgagcaggacaatcctgccgaaatcgtagccatggggagccgtgtcgttcccttggacgaccccactaaggatgctaataattttaggattggggaggcgttcacagccaaccaaaatcgcacggctcgtcgcgctatgcgccgtggctttgaccgctatcagctccgccgtcatcgactacatcgggagctctccaaggtagggatgcttcctgatgcgcagctcatccagctgcccctccttgagctctgggagctacgcgagcgtgcagctcagtttggagagcagctgaccctccccgaattagggcgcgttctatgccacatcaaccagaagcgtggctaccgacacgtcaagggggacaggtcttcgagcgtagtcgaagaggacaagaagaagaaggagaccaatagcgactacgtcacagcgatcaaccagcgctatgcccatctccaagaagctcacttgaccgtagggcagtacttcgccaagcagctccgctccagcaagactgagagcggcgccatcgtctaccgtgtcaaggatcaggtctatcctcgtcaggcatacatcgacgagtacaatcagatcatgcaggtgcagtcggcttactatcccgaggtactcaccccgcacttcatcaagatgctccgtgacgaagtcatcttcatgcaacgtcccctcaagtcgtgcaagcacttagtatcgctgtgcgaatttgaaaagcaggagaagatgatgcgcgtccagcaggatgatggcaagggtggaaaggaagtcgtagagcgcaagatcaagttcggtccgaaggtcgcgcctaagtcctctcccctcttccagctctgtcgcctctacgaagcggtcaacaacatccgcctaacctacccagataattcgcctcgccccctcacgaacgaagagcgcgctaagctcgtggcctatctacaaggctgcgaaacactccaagagaagaagcccaccaagcgtcccagcaaaaagcccaagaaagagacttgtcctgaggtcaatctcgactcactgaagcaagtcttacagatcgaggaagagctacgtgcagacaagctcctcgagagcgggatcacgggggacactacgcgcatagccctggccaccatcctccagccctatgagcagtatcaccacctcctcaccatggagctggagacacgaccaatgaaggtgcagaccaccgatgaggctacaggcgagatcacggagcacgaggtcgccgtcctcaccgacagctatacacgacagcccctctatcgtctgtggcacatcctctactccatcgaagagcgcgacgccatgcgcaaggcgctcatcacccagctcggcatgtcggaggaagaattagatggcggactccttgaccagctctatcgtctggacttcgtcaagcctggctacggcaataagtcggcgaagttcatgtgcaagctcctcccccagctccatcaaggcttgggctatagcgaagcctgcgccgccgtaggctaccgtcattcggggagcctcacccgtgaagagatcgccgagcgcatcctcctccctcaaattcccctactccagcgcaacgagctccgccagcctatggtcgagaagatcctcaatcagatgatcaacctcgtcaacaccctccaggcggaatatggtatcgacgaagtacgcatcgagctggcacgcgagctaaagatgtcacgagaagagcgcgagcgcatatctcgtagcaatggcacaagaaagactaaaaacgatgctgtagcaaagtacatccaggaatatggcttataccccaccaagacactcatccgcaagtacttgctgtgggaggaggcggatcgccgctgtatgtattgcggtaaagagatctcactcagccaatgcttgaacggcgatgagatggaggtcgagcacatcatccctaagtctatcctctatgatgactccttcggtaacaagacctgcgcctgccgccaatgcaacaaggagaaaggtaatatgacagcgcttgagtatatcctaacaaaaggctgggaaaaggaatacagggatcgactcgacaagctgagggaagaggcaaagaggcaggagaaggcaactcagaagaagaagaaagaggtgcaaaagcagacgatttcctactccaagtgccagcgtcttctgtggctgaagaaggacatccctacggacttccttgagcgacagcttcgcctgacgcagtacatctcccgacaagcgatgagcatcctccagcaaagcatccgccgtgtcacggccagcgaaggcggtgtgacggctcgtctgcgtagtctctggggctatgacgacatcctccacagcctcaacctcgaccgctacgagtcgatgggtgagaccgagctggtgccgaagcatcccaacagcgaagaggatgactcgatgaagtgccgcatcaccgactggagcaagcgcaaagaccaccgccaccacgccatcgatgcccttgtcgtggcctgcactcggcagggctacatccagcgactcaaccgcctcagctcggagactgaccgcgaagagatgcgccgtgagaccgagctacgcaaagagtccacagccgacaagctctccctcttagagcgctggctctcgcagcgaccacacttctccgtgcaggacgtcagcgacaaggtcgccgagatactcatctcctatcccaagcccaagagaacccacacctggggacgtaatcgctacaagaagaagacagccgatgggaaggaaaagacttgtatccagacgagggtactggtacctcgtggtgaactgatggaggcttcactctatggtaagattatatccgatggcaaggagcgtatcgtgaagcgctacccattacacgccctgaaaggcacggtggtagatcctcgcttaagagaacttatcacccagcgcaagcaagggagcgccactgaagcaaagggagcgcctctctatctggacgcagagaagaagcaagaagtacgctctgtccgatgctatgccgccaaactatcaacagacaaagccatccctctctgcttcgatgagcagggcaaagccatcaccttcgcaaaaagtggtagcaaccaccacgtggtccattacttagatgcagctggcaaaacacatcctattatcctatctatctgggatgtcatagagcgagttcgctatggtctacctaccatcattaccgattatgctcaggtaccacaagatctcgagctaccagcatcagtaagagataagctaccacaagctgaatggaagtgcatagatgtcttactacgcaatgagatgttcctattgggattatccgatgaagagattacccaagccatcactcgagcagactacacactactaagcaagcatctgtatcagctccgaacaatctccatctcatctgataaaaagattgattacaccttctactaccacttagatgctcctgacccaaatcaaaagaagaaagagcaaggagacaagaagaaagagaaggaacaatccaagccagctaagggtacaagcctcacactccacaaatatagagtgcaagggctctcaaccttccttgagctcaatattcacaaggtacgcatcgacttgcttggtcggattaccctactctaatcacttcctctaccatgatcaaacgcactatctacatcggcaatccagcctacctctccctccgccttcgacagatggtagtacggctggagccaaaggatggtgagtcgcaggcacggacgatcccgatcgaagatatcggggtcgtcctcctcgaccaccctcagatcaccgtcacccacgccctcttaggcgcattgctcgagcagaactgcgctgtagtgacctgcacggcagcccatatgccttcggggctcctcctccccctcactggacacaccctacagacggagcgcttccgtgcccagatcgaggcctccctcccactcaagaagcagctctggcaacagaccatacaagctaaaatcctcaatcaagccgccgccctgcagtcggtcttaggcgaacccgtcaagaacatgctcgcctggagtcgccaagtcaagagcggcgatacagagaatatcgaggcacgtgctgctgccttctactggcgcaacctcttcatcaccctcccgggcttcgtgcgggagcgggaggaagctgcacccaactccctactcaactatggctatgccatcctgcgcgccctcgttgctcgcgccctcgtcggctgtggcttactccctaccctcggcatacaccatcacaacaagtacaatgcttactgcttagcggatgatattatggagccctaccgcccctatgtcgacctcttagtcgtagagatctgcgaagaagagggcttccctacgaccctaactaaggaagtcaaggctcgcctactcaccttgcccacccttgacgtcgagattgatgggcaatgccgtcctctgatgcttgccgtcgcccaaacggcgagctccctcctacgatgctttacaggcgaagtacgccggctctcttatcccctcctacgatgcgatgtaaacgactaagtgaatataggattatgtgggtctttgtcttcttcgacctccctacctatacggcactggagcgcaaggctgcttctggctttcgccaaggattattgaaggatggcttcacgatgtttcaatactccatctatatacgccactgcgcgagtatggagcaggctcagacgcacacacgtcacgtcaagcagatgctccccgaggagggcgaagtcgtgattatgaccattaccgacaagcagttcggtatgatggagcatttctcttcacacctccctgccaccctacctccatcatccgaaccagtggagatactgtaaccgtagcatcaaaaaaagttacctaacaaagaaaaagcccgtggttacccacgggcttttctctttctatttctctcggtaagcaactaacacttagactcatacactggatctgctgtgttagctactgcgaaagtaccgaatttgaaagctaatcacaacaacagaagcaagacacatctaaacagaactgctgtgttagctactgcgaaagtaccgaatttgaaagctaatcacaactacaaaggcggctgtattcagaggctgagtgctgtgttagctactgcgaaagtaccgaatttgaaagctaatcacaactgcaggggtaacagatccctgagcgttaccgctgtgttagctactgcgaaagtaccgaatttgaaagctaatcacaacgagagcgcacgcatggtgtttgccttgtcggctgtgttagctactgcgaaagtaccgaatttgaaagctaatcacaaccaatgaagcgctcagcgtcgatgttgtactgctgtgttagctactgcgaaagtaccgaatttgaaagctaatcacaacgcgcaatcatgacgattatccaatctccgggctgtgttagctactgcgaaagtaccgaatttgaaagctaatcacaacgtaatcaataggctgattaactgcatcaaggctgtgttagctactgcgaaagtaccgaatttgaaagctaatcacaacagtgtctttgcgccgtacttcgtggggtcggctgtgttagctactacgaaagtaccgaatttaaaagctaattaccaagaccattctccgatatatcagagaggcgacgcccttgccttcggaagagaggagtaagaagctatataggtcgtccagcaaagctatattggtcgcaacgacgacctatataggtcacgtcacgaagcaatataggtcagcccgtgaagcaatataggtcggcagagagacaccacggcaggggtacgccatcatacattccctcaagctactacgcatcggattcccccattccgccccctcagcatcggggctgtgcttctcatacgcgcgcgtacataacattatgggagaggacgggacgagcaaagaaggactgcgccaagcagtaaacccttccttagataaaaaggcggagctttatgccgataatgtctatctttgcgtgcaaattgtccgtggtgtacccagacgagaaggatacaccacccgctcaacaacagcatacatacctacaagatatatgggcgcgcctaaagcaaaacagtcatcgaccctgcgctatgcacggcttctgagcttcatcagcatcaccttcaccctctttatgctcggggctttaggcctcatctacgtcctcgagcaagggatgagtcaggaggtaagcgagcgcatctccttctctgtcgagctctccgaagagcctggagccacaacagagacgacccttagggagctccgtgcgcttccttacgttcgctccgtcgagctcatcacggccgacagtgccgccaaaagcctgaccgacatcctcggcgaagacccgacgaaggtattaggctacaaccccctccagccgatggctaaggtctacctcaagagtgagtacaccgagcccgatagcctcaagaaaatcatctcctctaatccgctcctcaagacggccgaaggggttgaggagcaggaaggacaatgggcttcagcttcccacaacctccagactatccgcctcattctctgggccttcctcggcatcaacctgctggtgagcttcctccaaattaataccgccacagggctggtcatctattcgcagcgtatgcgcatccgcacgctctcgctcatcggcgctacggcgagcttcatcggccgccccttcatacgccgagccgtcctcgagggcttcatcggctctctcttagctctcggtctcttagccggcctactctatggagcggagcaagccttcggctatcccatcctgagcctctgccccagtacgctcctgctggctctcatcatcgccatccccagcgtaggggtatgcgtcagcttcatctcctcgtggcaggcgacacgtcgctacatccatatggaggagggcaagatccacttgatctaagtcccgacctcgctcctatcaccccatacgatataagtatatagtatgctctacagcaagaagaattatctcctgatggcgctctccgcgctcctgatcctcgtgggcttcgtcctgatgtcaggaggacaaagtgaagaccccacggccttcagtgccgagatcttcagtgaccgccgtatcgtcgtcgcccccatcgtctgcctcatcggcttctgcctaatggtctacgccatcttagtcaagcctacagcgcgtcccgtagagaagaaggaagaggagggcgctgaatgagcattctccaaagcatcatcttagcgctggtcgaagggctcacggagttcctccccgtctcctccacagggcatatgatcctcaccgaaggtatcctcgggatggagaactccgactacctgaaggccttcacagtgatgatccagtttggcgcgattctctcggtcgtcgtctactacttccgccgcttccttcccttccccatcttgggtctgaagcccgatcctacgaccagcctcggcggctggcgtctctacctcctgatgatcgtgggctgtatccctgccgccatcctcggtgcactcttcaacgataagatcgacctcctcttaggcagcacctggatcgtgctcacgatgctcttcctcgggggaatcttgatgatctaccttgaccgcatcttcacccaccagcgtgagcggacgatgacgctacagaatgccttcgtcgtcgggctcttccagtgcctggcgatggtacctggcgtctctcgctcgatggctacgatcttcggggggatgcagcaggggctgacgcgccgacaggctgccgagtactcgttcttcctcgctgtccccacgatgttcggcgctacgctcctcaaggcgtacaagctctacaaagacccagcgatgagtggggtcttcgaggcgaactggcacacgctgctcatcggcaatgtggtcgccttcgtcgtcgccctcttggccatcaagttcttcatcgacttcgtcaccaagtacggcttccgcgccttcggctactaccgtatcatcctctccgtagctctggctatcgccctgctctgcggcgccaatatctccctgcagtaaatggagcagctcgacctcatcgcgggggcaaccatagccctcgacaagcccctgacgtggagttccttcagcttagtcaataagttccgctgcgaagcctgccgctacctcggcatcaagaagctcaaggtagggcacgcgggtacgctcgaccccttggccacgggcgtgatgatcctctgcaccggcaagcataccaagcgcatcgacgagctacaagctgggcgcaaggagtacatcgccgatatccgcctggggcagaccacgcctaccttcgatatggagacggagcccgatgccttcttccccaccgagcacatcactcgcgaaagtgtcgaagccgccctcaagggcttcatcggcaccatcgagcaggtgcccccagccttctccgccgtcaaggtcgacggacgccgtgcctacgacttagcacgcaagggacgcaacttcgagctcaaggctaagacgctcgtcatcgacgaaatagagctcctcgactacgccctaccacagatacagatacgcgtggtctgtagcaaaggcacctacatccgcgccttagcgcgcgacatcggcaccgccctcggctccggcggtcacctcaccgacctgcgccgtacgcgcgtcggcgactaccatatagacgactgctaccgcgtcgaggatatccaagccttcctccgtgagtacgttgccctccccacagaagaaatagaacccaccaacccatagtcctacgacatagacaatgaaggatactaagctaagtcacttcgaaatagagatccccgaaacgctcatcgccaagaagcccgccaccttccgtgacgagtctcgcctgatggtgctgcaccgctccacgggcgagatcgagcaccgccacttcaaggatatcttggactacttcgccaaggatgacgtcttcgtcttcaacgacacgaaggtcttccccgcacgtatgtatggcaacaaggagaagaccggcgcacagatcgaagtcttcctcctgcgcgaactcaatgccgccttcaagctctgggacgtcgtcgtcgacccagcacgtaagatccgtatcggcaataagctctacttcggcaagaacgatgagctcgtggccgaagtcatcgacaataccacctcacgtggccgtaccctgcgcttcctcttcgatggctcgcaggaagagttccgcgaactcctccacgctatgggcgaaacgcccctgcccaagtatatgaaccgcagccccaacagcgacgatgcacagcgctatcagtccctcttcgccaaacacgaaggggctgtcgtagggcctgccgccagcttccatttcagccgtgagctcctgctgcgtatggagatcagggatatccgcaaggccttcattaccgtgcacaatggtcaggggaactaccgcgacatcgacgtcgaagatctcaccaagtacaagatggagagcgagcagatgatcatccccgaagaagcctgcaccatcgtcaacgctgccagcgaagccgggcgcaacatctgcgccgtaggtacctcggtgctccgtgctatggagaccgcctcagggacgcagcgtcacctcaaggcctttgacggctggacgagcaagttcatcttccccccctacgacttcaacgtccccaatgccctggtgaccaacttccatatgtcgaagtccatcctgctgatgatggcagcggccttcgggggatatgaggagacgatgcgcgcttactccatcgccatcaaggagaagtaccgcttcggtgcctacggcgatgcgatgctcatcatcgactaatccatagcagtgcctgatgcctcagctgtatctctccctcggcagcaacgaggggaatcgcgaagcactcctacaccaagctatagatgccatcggccgcctcatcgggcaggtcggtggcatcgctacattcatcgagacggagccctggggcttcgatagtccccatcccttcctcaatacggcgctctcggtcaccacgtcactcccaccactggaggtacttgagcacacccaagccatcgaacgtcagctcggccgccagcacaagagcgtggacggatgctaccacgaccgccccatagatattgacctgctcttctatgaccagctcatcctgacgagcgagcgtctaaccctaccccatccgctactcaccgagcgactcttcgtcttagagccacttcgagaaatagcaccagaatttattcatcccctcgcaggtcgcaccatcacagagctatataccgtgctccgtagtcgcctgagctaactactttatccaagcttaacttatgatcctaatcttcggcggtactaccgaggggcgcatcgtcagctccatcctcgatgagtcgggcaaagaatacttctactctactaagggcgccttccaagagatagacttggtgcacggcgagcgcgtctcaggggctatgacccatagcgtgatgcgcgacttcatccgcgagaaggagattcgcctcgtcattgatgccgcccatcccttcgcagccgtccttcacaagactatcggcgaggtgactgccgagctctccatccccgtcatccgctacgagcgcaagtacagcgaacgcacagggcaggtcatcgagtgcgcgagctacgaagagatgatccagaagctcgaagcccagccttgtcgccgtctacttgccctcacgggggtgaataccatcgctgcgctcaagcccttctggagcaagcacgagagctacttccgcatacttgaccgagaagattcgaaggagaaggctgaggcggcaggcttccccttcagccatattctttacttccgccctggcgaagatcaagccatcttcgaccaagtgcgccccgatgccgtcataacgaaggagagtggagagagtggtttcttcgaggagaagatagccccagcactcgaagctggtatcccggtctatatgatcactcgcccggcactccctccccactacgaatatgtctacggtcccgtaggcttgcgtaaagctgtcgagcgactttgccccgatttctttccgctgaagacgggcttcacaactgggagcacggcgacagctgccaccgctgctgcactccacgccctactccacgagggtgaggtgctgaccgaggcaactattattctcccttcgggcgaggaggtgcacctccctgtggagcaagtcatcaagaccgagcgaggataccaagccaccgcacgcaagtattcgggcgatgaccccgacgtcacacatctggcagagatttgctccgaagtctccttcactacggagcacgaaggcatccgcttcctccaaggtcagggcgtgggcatcgtcaccctccccgggcttgggctggagataggaggccccgccatcaacaagacaccgcgtgcgatgatggagacgattgtgcgccgtcactaccccacaggcggtgtcgacatcaccatcagcatccccaagggaagagagctggccagcaaaaccttcaaccctcggctcggcatcatcgatggcatctccgtcgtcggcacttcgggcgtcgtcaagcccttctccctcgaggccttcgtcgcctccatcgttcgccaagctgatgtagcggtggctctgggagcagacaccatcgtcatcaattcgggagccaagagcgagaagtacctcaagaacgccttccccgaactccccttccagtcctttgtccagtacggcaacttcatcggcgagacgctcgacaagctcgcccagcttgctatcccgaagatctatatggggattatgctcggcaaggcggtgaagctcgctgagggcaacctcgacacccacagccgcaaggtcgtgatgaacaaggactttatgcaccgcatggctcgtgagtcgggctgcagcgaagccacccacaccctcatcgacagccttaccttagcgcgtgagctgtggacggggctcactcccgacgaccttgagcgctttatgctccgtatcctcgatgcctgctacgaagcagcggctaagcttgtccctcagagcgaactctccatcctgctcatcgatgacgacggcaatatccgctatacttacccgcacaacttcttagccaaacgataagcaacgcccctcatggaactacttctcaagcgtgcctacgagccagccgaagcgaccgatggctatcgcgtacttgtcgaccgactttggccaaggggactcagtaaggagcgtgcccaaatagatgaatgggcgaaggagttagctccctcgaccgaacttcgtcagtggttcggacacgcaccgagtcgctgggatgagtttactcgtgactaccgcgctgaattagagggttcgacagcagggagagagttcgtcactcgcctccaggatgaggagcgcattaccctcgtctacgcagctcacgatgaggcgcactgccatcccctcatcttacgcgactaccttgagcacctgatctccccaccgtaatttcacctatgctttaccctatcctcctctttacccttccactgctgataggctttgtgctggatcgttcgctgggagacccgatgctcttcgggcatcccatcgtcctcttcggacgactcatacacttcggagagaagcgactgaacaagggggaagcacggagtctgaaaggcttcctctacaacgggagcttagtcctcctcaccttcctcctccccctgctcagcttcgccgtgctcatcataggcgctggtagctgctacatcggtggagcgcacgccgtaggtgacgggctactcctcacctacagcctcctctcagccatcatcatcttctatatgctctcgggcaagaccttggtcaaggaggtgaaggatgtcttcgctgcgcttagcgtctccttagaggccgggcgcaagcaagtagggcggatcgtcggacgtgatacggagacactctctgcccacgaggtgcgtaccgcagcactggagacgctggcggagaacctcagtgatggagtcgtagcacctatgctctcgtgggcggtcttcgacctctcggggatactgacctataagatgatcaacacgcaggactcgatggtcggctacctcaatgagcggtatcgcgcttatgggtacttctcggccaagctcgacgacttggtcaatctcctcccctctcgcatcacggcgatactgatgctcctctcagcgggaaggcttgacctgctcttcaagaccttccgccacggaaagcgtcacctcagccccaactctggttatcccgaggcggctatggcgctcctcctcggctgtcgctttggtgggccgcacgactactttggtgaggtcgtcgacaagccttatatcggcgaggtcgagcgtgagctcagtgatgctgacctccagaaggctgtacgcatcgctcagcgtaccgaggggctggcactcggactatcac

SEQ ID NO: 3301 - DNA, 23666 bp, synthetic construct
  source 1..23666: mol_type = other DNA
  misc_feature 1..23666: note = Synthetic
agtcccagcgcagtgcgagcccagcctcccgctgctgagggatatcagtcacggctctgagggacgtccatcagcgccgtgaggggtatcagtcagcgccgtgagggatatccctcagagcgacgcgacaaagcgatgtgtgcggcggggcttagccgagcctaccgcaggactaagtgcggggtgcttcgaggggctgctgggctccttcagacaaataggcttagcccgcccaaggtcgcaaggggcgcagggcgtacacaaagcgaggagcgctgcaggccttgccccgagggacagtgacctgcagcgctcctcgagcgtgcgtaagggggtgctaggctagcgacgcgggtggcgctggcgccagctcttgatgatcgggtagaagacgaagacggccgagagcagcagcgtgagcagcgtagggccgtccagccgcccgccgcgcatccacagcgtatagcccacaaggctcagccacagcagcgcgaagagcagcatctgccgcgtggtcagcggtcgtcggtaggccatagcgcgctagtacttagcctcacgcagcagcagggctgcctcgcgagcgaagtaagtgaggatgaggtcggcgcccgcacgcttgatcgacagcaggctctccatcatgatgcgctcgcgatcgatccagccgttcatccccgcagcctggatcatggcgtactcaccgctcacctgataggctgccagcggtaggtcgtagcgatcgcgcgcccagcggatgacgtccagatacggcatggcgggcttgaccatgacgatatcggcaccctcggcgatgtcgctctcgatctcgcgcatggcctcacggatgttcgcggggtccatctggtagctgcgtcggtcgccgaaggcgggggcggagtcggcagcgtcacggaaggggccgtagaaggcggagctgaacttcgccgcgtaggacatgatgggtagctgctcgtagccctcgcggtcgagggcctcacgcatagcggcgatacgcccgtccatcatatccgagggggcgaccatgtccaccccagcgcgggcgaaggagagggcctgacggcagaggtagggcagcgtggcgtcgttgtccaccgtgtagtgctcgtggaggatgccgcagtgtccgtggtcggtgtactcgcacatgcagatatcggcgatgacgatgagctcgggcagtgccgccttcagcgcgcggatgccctgctggacgatgccgtggtcgctgtaggcttcgctacccgtctcgtccttgtgctcggggatgccgaagagcatgacggagaggacgccgaggcggtagagctccgtgcactccttcaccagttcgtccaccgagaggcggtactgcccaggcatggtggagatctcctcacggatgcccgtgccatgaacgacgaagaggggcgcgatgaagtcggaggggctgagcgtcgtctcacggacgaggctgcgcagctgaggggtcatacgcatacggcgtagacgtgtcgtagggtacataagctagcttataggatgtgatcaatgtactgagggaaggctgtcggggaagtaaggcgctaggcggatactatcctcgcgactgaaggcagggctctggcgcaggtggcgccagctgaggtggcgtccctgacgcagcactccgaggcgcagcccctgcagctgcgcgcggttgaggtagggatgccagggcagggagtcggcacgcagtgcggagagtggatgctggcgcgggggcgtgcggacgacgaaccatggccgcagctggacgaagcggtcggtatccatcccgtagacctcctgcagctgcagcaccgtatagtagcccccgaggcgactacgcagcgagaggatacggtgggcaaaggcagggcctatgcccgggacgcgcagcagcgtcagcgagtccacggcgttgaggtccagcgagacgtagtgctgatacttagctacggcgcgctccgtccccgagggcgggcccacatagtcggggctcgtcaccaggcgctgggcggagtccctccgctcgggcgccgagtgtacccctttccgcagcacaggagtgggcgcgggggctgtagtgctatcgcttgagggggagggggcgagcgctgcgaccgcccctgggctagggctgcggtactgcgtccaggcgtagagcgcgagggccgagcttaggacgatgaccagcagcatgaggacgatgcgctctgccttacctatgggatggtcgccctgtcgcatgtcggtctctggctataggctatcgcggcgcagctcctgctcgatgcgtccgtccttgagaacgatcatgcggtcggcacgagcggcgaactcggagtcgtgggtgacgatgacgaaggtctgccccagctgggcacgcaggtcgaagaagagctggtgtaggctctccttattggccgtgtcgaggctgcccgagggctcgtcggcgaagatgacggcgggctcattgaccagcgcacgcgctacggcgatacgctggctctcgccgcccgagagttcgctgggcttatgccccgcccgctcggcgaggccgagacggctgagcagctcgagggcacgcgccttcgcctcagagcgcgagcgccccagcagtagcgcggggatcatgacattctccagggcggtgaactcgggcagcagctgatgcgactggaagatgaagccgaggcgacgacagcggagctccgccagtcggcgctcgctgagctgggcgacctcctcgccctcgatacgcagcgaggccccaggctcggcctgctccagcgtcccgaggatctgcagcagggtcgtcttgcccgcgccactagcgccaacgatggagatgatctcgcccgcctcgacgctgaggtcgacgcccttgagcacctcgagcgagccgaagtgcttgtgtatgttagttgcctgtaggagcatgctgcggggggatagcggatgaggcgtggatatgctgcagcacataggccgccagctggcagccgaaaagagccggcatataggagatggtgcccgcggtggagcgcttgcagcgctcaccctcgatctccagcacggccgactcatcgggcagctcactggagaagacgacgggtacgccgcggctgatgcccagcttacggaggcgcttgcggagggcgcgggccagcgtgcagttgtagctgtgcgctaggtccgcctgatggatcttggagggatcgctcttcgcccccgcccccatggaggagacgatgggcagcccgcgctcccgcgccagggcgatgaggtagaccttgggcgagagggagtcgatggcatcgacgacgaagtcatagcgatggcggtcgaggagctcgaccatgttctcatccttgaggaagtcctcgatgacctccagctcgacctctgggttgatgtcccggaggcgctcggcgagcacgcgggccttaggctcgccgatgcggctatgcgtggcgatgagctggcggttgatattggagggctgtatcgtgtcggcatcgacgatggtgaggcgaccgatgccgccccgcacgaggagctcgctggcgtagccgccgacgccccccagccccacgacgaggacatggcaggcagcgagctcgtccacacgctcatccccgagcagcagccgcgtgcgctccgtccaggctttggcttgactcatcgagggacttagttgatgccgcgcttattgagctcctgctggtagagcttggcgttgaccagatgctcgctgaagcgtgcggcgaagcggtggtagcccgagaagtcctcgcgggcacacatatataggtagtcatgcgtctcggccgccagcacactgtcgatggtcgccgtgtggggcagcacgatgggcgcaggcgggaggcctacgacgcggtaggtgttgtagggagactcggtggctaggtgctcacccttaatgcgcttgagggcgaagttgcccgtggcatacttcaccgtcgggtcggactgtaactttatgccctgacggaggcgattgaggtagaggcctgcgatgcggctatactcgtcgcgcttagccgactcgctctccacgatggaggccagcgtcgtcacctgcagcggagtgagccccaggcgctgggcagcctcactgcgcgcaccgcgccagaagcgctggtagccgctgtggatgctatccagcagctccttgcccgtagccgtccagcgcagcgtaagcggctgacgtatcagctgggcacgcagcgtctcgcgggtcataccatagcgggagaggagcgcagggtcactgaaggcagcctccagactgtcgcgcttgacccagagctgggcagcgaagaaatcgagaatctcggcgttcgtacgcagcgcccccggctggagcacgaggggcacatccgcaccgtgctgcagctcgtcgatgaccccagccatattcatatcgcgcgtgatggcatagcgtccagggcgcagcggctcggagctcaggcctcggtagtccgccagccagccgaagaggcgggggtagcgcagccagagcttagactgcagctgctgtctaagctcggggtacttcgcccctggagctacgaggatgtaggtcgtatcggcctcggggcgtcctgcaggtgccgtatagaggtagccccctgcacccagccctaggaggacgaagagcaggacaaggagcaagaggtagcgtccccagggacggcgacgacgcccgtagctggagcgatgcccgcggtacttggagggcaggaggcgacgcccattgatgcgctgatagtgcgcgacagagttctttgacatgagagggagggctcggggaggtgagtattagcggtagaaggcactcggcgaactgaggcgctgcaggtccccgccgcggatggcgtagaaggagggcaggcgctgcacattgtacaggccgaggctgcgcccctcggcatcatggacggtcgtccaggggagggtgcgcgtggcgttcttccagaagtagctatcggcatccaccgagacctcgtagatgcgcagctcggggtgcgcctgctggagctggcgcagctctgccacgagctcgggtgaccaaggctcagcgtaggaagtaaagctgacgagcgtagggccctgagccgcgagctccttgagcgagaccttgcgccccgtgcggtcgggatagctgagctcagggtaggcgacgacctcaggctgctggggcagctcgtagccaggttcgtcgatcacgcagctaccgcgcttgatggctcgcgcctgaagcgcggccttcttgaggagcaccgcgtagggcgcctcggggtagaaggtatcgtaggcggtggctacggcggcgaaggctgcggcatcgtctggattgagtggggagaagtagctgcccgagccgatggtctgcagcagcgcaaagcacgctgcggggctcttggggtcggcgtagatgaagcgctcggtgagctgcttcttgagcgccgcgatgagctctgagctacgtgcacgcgccgagtcggcattgatcctattcgcccaggcctcctgcacgatgggctcaagctgacggctggtagccgtactgaggcggcagacctcctggatctgcttattgtagtccttgggcgaggtgatacggtagctgtcgaagaggcgcgctccctcggctgtgatgctgaagcgacgtgccgagtccgccgcgaaggggatatgctgctccccgaggcgcaggcggtagagcatcgggtagctgtgcccctcactgcggaaggagaaatgcccctgcttatcaaggcgcaccgagtcgatgaggcgaggctcctcagagatcgtctcctcgaggtagagcatctggtcggcagcaccgctgatggtgccctcagcgataaagtcgctcgacttgcggcccgagcagctggctataaggcagagggctagcgtcagccccagtagtcgtcctattcgcttggtcatgtgtctatgatcgtgtgtgtccttattctgtccagtagtccccagtggcgagcagcagctcctcggcacgtgcgatctcgccaaagagcgtctcgcgggtcgtggcctgcagcatggcgatgcgtacggggcggaagtggtctatgcccttgaagatggggctggcggcgatgtggcggcggctgtggaggatgccgcggcgctcgtcgagcttagcgatattattgtccaccagctggcgcagcacctcgacgtagtagctcttggctcgcatcggcagctgctcgcccgtcgtgaggtagtggcgcatctgctcgaagatccaaggctgcccgatggtcgcacggcctaccatgacggcatccacgccgtaggtgtcgaaggcgcgacgagcctcttcgcccgtggtgatatcgccgttgccgatgatggggatgtgcatgcggggattgttcttcaccgccccgatgagcgtccagtcagcctgccccgtgtacatctgggcacgggtacggccatggatggtaagcgcctggatgccgcagtcctgcagtgcctccgccagctcgacgatgatccgactatcgtggtcccagccgaggcgcgtcttgaccgtcacggggatcttcaccgccttgacgatctcacgtacgatctccagcatcagggcggggcaacgaagcatcccgctgccagcgcccttacctgccacccgcttgacggggcagccgaagttaaggtccaagaggtcaggtcccgcggcctcggcgatgcgtgccgcctccaccataggggcaacctcgcgcccgtagatctggatggctacggggcgctcctcggggtcgatggctagcttgcgcgtcgtgcccgccacctgacggatgagggcatcggcgctgaggaactcggtatagacaaggtcagcgccgaagcggcgacacatcagccgaaaggcggcatccgtcacgtcctccatcggagccagcagtagcggctcccgtcctagctctaggctctgtcctatcttcatcccttctttccttctactatatatactgaggccacctcgagtgcccgatggatatccggacaaatataagtatctccgatgagatctgccagcccggtggcacgcagcgtactatggacgcgctcgttgacccccgagaggatgaggcgcgtgctgctacgcttcgaggtcgcgacgaggatgccgaggttgcgcaccgccgtcgagtccatgaagggcaccgagcgcatacgcaggatacgtacgggcggagcggcctgcgtcaccgaggtcacctcctcgaagcgattggcaatgccgaagaagaagggcccctcgatctcgtagacctctaccccctcgggcagcgtgaggcgctcgctctggccctgatgcccgtcatcccccgaggcatgcagctcgagctcgccgcgcgagacgaggatacgcgtgctctcgaccatgcgctgcatgaagagcagcatcgccagcagcagccccagctcgatggcgatcgtcaggtcgaagatcaccgtcagcaggaaggtcaccaccagcaccgccacatcgctcttgggcccgcgcagggaggcgcgtaccgagcgccagccactcatattataggagatgaccaccagcacccccgccagcaccgccatagggatataggccatcagcggcatgaggaagaggaaggtcacgagcagtacgacggcgtgcgtcatccccgcgatggggctgcgcccgccgttgttgatgttggtcatcgtgcgggcaatagctcccgtgacggggatcccgccgacgaagggcacgatgatattagccaccccttgcgccacgagctcagtattggagcggtggcgctccccgatgaccccgtcggcgacgctggccgagaggagcgactcgatagctccaagcagcgcgatggtgaaggcgggcgagatgaggcgctccaccagctcccagctcagctcaggggcgacgagcggaggtagactcgtggagatctgatagcggtcgcctatggtcaccagctcggtgatgccgcagtaggtcttcagcacatagccgaggatcgtcatcacgacaatcgccacgagcgaacccgggatgaccttcgtcagccgtggcgtcagctggatgatgacgatgctccccaggcctacggcgagcgtcagccaatgggtctgccccaggctcgagagcaggacgccccacttgggaacgaactccttaggcaggctcgtgaggccgaggccgaagaggtcattgatctgcgtggtgaagatcgtcactgcgatccctgccgtgaagcctaggatgatgggataggggatgaacttaatcagcgtccccagcctaagcagtcccatcagcacaaggaggatccccgccatcagggtcgccacgagcagcccgctcatgccgtactcggtgatgatcccgagcacgatgacgatgaaggcgcccgtcggccccccgatctgcaccgagctaccgcctagcgcggagaccacgaagcccccgattacagccgtgatcagccccacctctggggagacgccactggcgatggcgaaggcgatagccataggtagggcgacaatccctacgatgagtcctgctaggaggtcgcgcgtcagcatcccccgattgtagcccttgaggctatccagcagcataggtcgtacagagaatcctagcttcatctacttccgtctatatatgatcatgaggactacaaagatacgaagagcagggcgcatcacccagccttagcctccgcccggcaccaggactccctccccgagcgcaagcgcgaaggcaaggaggctaccgcaccccacacggagtctcttccttacacactccctccaaggctcacacgtatcagggggcatcgcctataccacgctcaagctacggcaggcggaagatcaacggacttcggcaaagacccgacggtatcctgcataccctgctgcatccaagctaggctatagctatcctccccgtctccccccagaacagcccttgggcgcaaaaaatgagcccatacacgaaaaagccagtggttacccactggctttttctttcttcgcatacctcaataagtagctgaccctaatcgacttactgaggtcgcgttggattgctactacgaaggtacataaacgggaggccaatcacaacccaatgtaacactaatgtaacgcatttgtaagttggattgctactacgaaggtacataaacgggaggccaatcacaacacgctaacgccgtggcaaaaggcttttacggttggattgctactacgaaggtacataaacgggaggccaatcacaactgagcctggtggaggccatacgccgagctcagttggattgctactgcgaaggtacataaacgggaagccaatcacaacgaacttgcttatccacctgccgctgcagctgttggattgctactgcgaaggtacataaacgggaagccaatcacaactaggcagcatctacaagcgcgtggacgagtgttggatcgctactgcgaaggtacataaattagcttcttggcatcttgctcctagttaatgtaggggaggaggcgaagacgctccagcggcccttgccctcaagggagagggctcctgagggatatcagtcaggaggctgagtgtcgtcagtggcacgcgtgagggatatcacttaggaagctgagggatagctctcacgccagccgaggctaggccggcacttcgccccctcatggagtcgggctgggcttggtcgatcggaggctgaagataagagagggaggagagctgctcctcgtttacatcaaccccccgtcctaggcaagggctagcgacctccttcctccgcgggagctgcagcctcagggatttggcctatttccccgttttagctacgtttgtatcaggccttcaataaagtgggtcttaatcaaggtatagcatgaaaaaagtcttaggtctcgacctcggggtcggatccatagggtggtcactcatcgccctcgacgaagaccagcgccccgccgagattcttggcatgggctgccgcatcgtcccccttactaaagaggaaaataagtttgccagcggtggagggactagcgagaatgcaaagcgcacgcagatgcgcaccatgcgcaagatgctcgaccgctaccagcagcgccgcaccaagctcgccaacatccttcgcgagcaccagatgtaccccgacgaggcactcatgcagctgccgctcatgcagctctggcagctgcgtgccgatgctgcgacccctggtcgacagctgagcctctccgagctggggcgcgtcctctaccatctgagccagaagcgcggctaccggcacagcaagagcgacgagagcggagaggataaggaaaccaagtacgtcgccgaggtcaagagccgctaccagcagatccaggaggagggcctcaccgtggggcagcactttgccaagctcctcaaggataacgagcagcacagcgagcgcggcggcgtgtactacaactaccgcacgaaggatcaggtcttcccccgtgaggcctatgccgaggagttcgatcgcatcatggcggtgcagcgtggcttccatcctagcctgacggatcgccttatcgcgaagctaagggactgcatcttctaccagcgtccgctcaagtcctgtaagcatttggtctcttactgcgagttcgagcgcaagcaggtcgagctccccgtcaagcaagtggagcgcgacggcacgatcacctacaaaaagcagctcgtagacgtcgggcccaaggtggcgcccaagtcctcgccgctggccgaagtatgtcgcatctgggagaccctcaataacctccgcctctacttccccgacggcagcgagcgcaccatcacgcaagaggagcgccagcggctcttcgactacctgcaggagaacgatgcactgaacctcgcccagacgaaaaagatcctgaagtgtaaggacgaagacctcttctccaacatcctcattgaaaagaagaaaaaggagaagccgacggaaaagaagaagaagaaaggagggaacgaggaagccctctccctcagtgcccttcctgaagaggagcaggcaaagaagcagaaagaaaccagcaaggataaagaagacacagggaatcccgaagtaaagatcaagggaaacacgactacggcgacactgcgtaaggctcttaagggctataaacagtacctggagctgctgtccttcgagctctccgaggaggagaaagctgagcccgagacgggcgagctacgtcctgtcatcagcgagcgctatcagcaggagcctctctacaagctatggcatatcctctattccatcgaggacaaggaggctatgagacgagcgctgaccaagcagctcggtatctccgaagctgatctcgaagcaggactcctagatcgactcttcaagatcgacttcgtcaagcagggctacgccaataagtccatcaagttcatcagcaagctcctcccacacctcatgcagggatatatgtatagtgaggcggcagagcgtgcgggcaagcgccattccgagagcctcacctcggaggatctccagcagcgcccgctcctggacaagatccccgtgctgcagcgcaactcgctccgtcagcccgtcgtggagaagatcctcaaccagatgatcaacctcgtgaaccagctcaaggcggactacggggagattgacgaggtacgcgtagagctagctcgcgagctcaagatgagccgcgaggagcgcaagcgtactgcgtcgaatcaaaataagaacgagaatgtgaacgcgcgtatcgcagccttgatcactaaggactacgggctccatcccactaagaccaggatacagaagcacaagctgtggaaggagactgagggcaactgcatgtactgcggtaagcctgtagacatcaagcaattcctcctagggagcgaggtcgaggtcgagcacatcatcccacgctccatactctatgacgactcgctgtcgaataagacctgcgcttgccacgagtgtaaccaagaaaagggaaatcgtacggccaaggagtatatcctaagtaaggatgaggagactcagaagaagtataacgctcgcgtgcaggagctcttcgagcgacacaagatcagctctgccaagcacagccgcctacacatgacgctcgctgatatccccgaggacttcctcgagcggcacatgcgcttgacccagtacatctcgcgtgaggcacatagcatcctcgccaaggggatacgctgcgtggagacctcctcggggggcatcaccgctaccctacgccgcctctggggctacgacacgatcctcaaggagctcaacttcgagatctacaagtctcgaggggagaccgagacgatactcgtcgatggggtagctacggagcgtattgcaaactggtccaagcgcaatgaccaccgtcaccatgctctggacgcactcgtcgtggcctgctccgacaggaaatacatccggcgactgaaccaccagaatagcgaagcggatagtgacagtatgcatgatgaactacaagaaacaggggggaagcatacagaccaaaagcagctgctagatcgctggctgaaggcgcagccgcactttgctccacatgtcgtgcaggccaagattgcagagatcctcatctcccttcagcccgaagaaaagacctattcacgaggacggaatatcatcaagcggaagggagaacgctttgtccaggagggcatcctggtgccacgtggcgccctctcgaaagagaccgtctatggctctatcctgcagaaggagcaacaaaagttcgtctataagcgccccttgcaaaaactagggaactcggatcttaagtccatcgtagatcaacgcctgcgtggtatcattgcccagcgtctcgccgagcacggcggtgaccgcgataaggccttcgctgagccgctgtactccgaccgagcccaaacacaacagatacgctctgtgcgctgctttcctacaaaagggcagaatacactgatcccactacgctatgatacccaaggcagagctaaggccttcatcgctcctgggaataaccatcatgttgccttctatacagactctaagggacaactacgagaatatgtgagcagcttttgccaagttatagaacgggtacgttttagcctaccgcccatcatctacgaccctcgcgctacgatggagcaagccctctccatcgctgagctccctgaatctgtaatcaaagacctcccgccctcagattgggtaatcaaggagaccttaaggcgggatgagttcttccttatgggcatgagtgatgaagagatagcatctgctctcgaggctcagaactacagcctcctcagtcggcacctctaccgtgtacagaaactctcctttataaactatgtcttccgccatcacttggagactagtgttaaggaggacaagagcactaggggagaggtccccatgtcctatcgagtgcagagtctcacaacttatagcaatcttaacccaaggaaggtgaaggtcgaccgactcgggaagatcagcctcctctaaaccatcaaaacttgtatcatgataaaacgcacgctttactttgggaatcctgcttatctgtctcttagggacagacagcttgaggtacacctaagacaggcttccctagtaaagtaccatcacggacgatcccgatagaagatgtcggggtcgtcctccttgatgatccccagatcaccattacccacggtgcgctgaatgcccctcccaaactcggactgggtcgctactgcgaaggcacataaacgggagaccaatcacaacctagacctcggcaagtgcgtagcgaggaggccgaggagaggcacaagggagaaaggcggcgggctacaaaaggactccccccgcggagcgagctgctcgaggcagcggcgcttcgcggggggagttcgtatttagggggcggggcagcggagtgtctcggccttggagggggaggcttagcctaccgcagccgtgagggcagggattagctcacctcgccttgggccttacctcacctcgtcgttggcttacttcacctcgcccttaatgcggagggtgaagccgccgtccttgccgttgctgtagacggcgatattcttgtagaaggggccggggcggcctgcggggttgtaggtcacgacgaccttgccctccttgcccggggcgatgggttcgcgggtatgctcgggcgtggtgcaggagcagggtgtggagacgcgcgtgatgatcagcggagcgtcgccgatattcttgatgataaaggtatgcgagaccttaccattagcctcgaggatcgtgccgaagtcgaactccgtcacgggcgccgagatgactgcccccttggtagcctgagctagggcaatccccacgaagagcaggagcgcgctgaggataaaagcaaatcgtttcataatctatcgttattaagtgatcacagccgtccccatcaaaggggagggctagcaaaggtaagtaaataacgcctagcgggcaagctagcgtatctctgaggcctcggcctcgggcagatcgtcccagtcgaactccagctcctcgccttcgtcccactcctcgtcccactcgtcctcttcctccagctcaggcagctcctcatcctcatcctcccagctgaggctggtgacgtcgatggtctgctggatgaggctctcgggacggtgcttggtctcacgattgagctcctgccacagcaggtccttgagctcggtgaggcccatgtgtgcggccgaggagatgaagacaatgggtagatccgcgtccagctccttgtggagctcgtccagcagccagccctggatctcctcgtcgatgaggtcgcacttggtgatggccagcaccttgcgcttctccacgagctcgcggttgtacttgaccagctccccgagcagcagacggtattcgtcggcgatgcgctcggtgtcggcggggatcatgaagagtaggagggcgttgcgctcgatgtgacggaggaagcgtagccccaggccacggccctcagcggcgccctcgatgatccctgggatgtcggccatcacgaaggagcgatcgtcacggtagcgtaccatgccgaggttgggctcgagcgtggtgaagggatagttggcgatcttgggcttggcagccgtcaggacggagagcagcgtggacttaccagcgttgggcaggcctacgagaccgacgtccgccagcatcttgagctggaggatgatggtacgctcgcgggcgggctcaccgggctgtgcgtagcggggcgcctggttggtcgccgtcttgaagaaggtattgcccttgccgccgcgaccgcccttcagcaggagctcggtctgtccgttgcgattgaggtcggtgatgaactcgcccgtctcggcatcgtagaccgccgtacccacgggcacctcgatgacctgatcctctccgtcggcacccgaggagcgcttgccgctgccaggggcaccgctggtcgcgatgacgtggcgctggtagcggaggtgcagcagcgtccaatagttctcattggcacgcaggtagatgtccccgccgcgaccaccgtcgccgccgtcgggaccgcccttagggatgtacttctcgcgtcggaagtgcgtcgagccgcgaccgcccttaccagagcggcagtagatcttgacgtagtctacgaagtttgattctgccatagtcggctatacattgataataaggaaaggcggacatccgaggcgtagcccctcgggagcgaggacgactactcttcggatgccgcgccttgtcctccaaccgtagtggtctggcccctccccgctcggggaagggccgagatgagggggcttagcctagtgcgtcgatcaccacagcgatgcgcgctgtgatgtcgctgatggcaccgctgcctgcgatggcgtggtgcacgcccttctgggcgtagtactgggcgatgggcgccgtctgtgcgtggtagacctcgaggcgcttcttgatcgtctcgaggttgtcatcgctacgaccgctctcctggccgcgcttgagcagacgctctacgagctcgtcctcagcgacctgcaggtcgaggacggcgtgcacggccgtagcgtgcttggcgagcagcgcatccagcgcctcggcctgaggaaccgtgcgggggaagccgtcgaagataaggcccttcttgggctggcgctcctggagcaccttctcgatcatgtcgatgatgaggctgtcggggacgagctgtcctgcgtcgatatagctcttggcagccttccctagttcgctctcggccttgatctcagcgcggaggatatcgcccgtggagaggtggtcgaagccatactgagcgatgagcacctcgctctgcgttcccttaccagagcctggggctccgaagatcactaaattcagcatcgtgggtatgatgtttagtctttgagttggtaaatgtccttgtacatgcggccgtactcatcgtagtcgaggccgtgcccgaggatgaacttattctcgatgtccatggctacgtagtcggtgtcgacgtcgcagctcacagcctcgggcttgcggagcatggcggcgatatgcacctcggccgcgccctgctcgaggaagagcttcttgaggcaacacaccgtatagccggtgtcgatgaggtcctcgacaatgacgacgacgcgccccttgaggtcctgagtgacgggcaacagctcctggagccgacctgtgctctgcgtgccctcgtagctcttgtagcgtgcgaaggctacctcccactcctcgtcaatggtatacatcagctcggaggcaaacatgaaggagccgttcatgatgcagacgaagagcggatcccgatccttgaagtcattctttaggcgcaaccctagctctctgacggcagcactaacctgctcgcccgtcagatagggctcgaaggtgcgaccatgaagtactacttctttcatctctatatcgttactattctatacggtctattacgaagataccttactaagaagccacaaagataatgctattccctgagacagagctccagccgctccatgcggcctccagcacagacggagcagccctccctcccctaccctagtgcagcctcttccctactccagtcaaggccaagcagcagcctagcgcggcagcagcctgaggccagctccgtgagggatatccattagccgcctgagggacgtcagtcagcgtcacgagggatagcagtcagggcgctgagggatatccatcagctgcgggcgggctaaggcgtaagggagggcggaagtacgggggtatcgatcaaggccaggggcgggcgcgaggcgaacgggtacgagctagagcccatagcagttacgcaggacgacccaacccagggtcaggagcgccagcagaaggagcgtcacgggatgacgcagcaggcgcgccagccgcggccagcgctccccgtagcgcggcagggctaggtaaagcagccccagggggagcataatgaggaggaagtagttataatggagggcttcgcccagccgccccccgaggagcgcatgcagcgcccgctgcgtcccgcagccagggcagcgcaggcccgtcgagcgatagatcagacagctggggaagtagcccagcgcggggtctacaagggcatagatgaggagcagcagccctaggcctataagccaatagtccctagcccaccgcctgaggcgtgtgagataggggctaagacgtagggcaggccggcgccgcatgatgcgtctcggagcgcccgctaggagaggatggagaagtactgtgcgatggtctcgaagttcttctggcgagccttatcctggatctggaaccagtctatgacggtccagatcccgcagccaccagcggtgatgagcttgagcgcgcccatcgggatatcccccagcaggaagcgatcgatgccgaggtagccgccgaagatcgagacgaggagcatgaccgtagggtccattagctcgaccccattgatcgagtggaactgctcatcggtcagctgcatgagacgctcacggatgtagggcaggtgttcgggggcgaaatacttctgcttcatgacaaggaagaggtccaccatttgcttgtccataatctatctaatacttatgtgaatgaatgcttggggctaaggagccctagcgcaaagatagtgctattgagcgatgatacagccccccctcagcacgctaccaccagaggtcatagacgacgatctcgctgcgggtaccgatgcggtaggtagcccccgccgaaccgatcccctgcgagatatagagctcacgctcgccctcgcggcgcaggcccgaggccataccgacgcgcgcccagaccagcagctgccctggccagatctgtccgccgtgcgtatgcccgcagagcatgaggtccatgggatagaggctgaggctgtcgatggacttcggcgtgtgctccataaggatggtggggaggctgctgggcgtaccgctgaagaaggactccagcggacggcgctcctcattgaccgcatcgtcgcgaccgatgagcctgaggctatccccccgagggctgacgatgaaggccgtactgtcacgcaggagtgtggcgcccgtctccgccacgtagcggatattagccatagtatcggcgcggtactcatgattgcccagcacgtagtaggcaccgctgggggcacctgcgttgaggcgccgcatcagcttcatcacgcgcgggtcgtaggcgtactcgctgaggtggtcgatgaagtcgccccccgagaggatgacgtcggggcgctgggcgaggatgaggtctacagcacggcctacgtagtcgggggtcatcgcctcgccgatatgtaggtcagagaagaagaccagcctcaggcgctggcgcggctcagcccccgcgggcgttagccgcgagagcaccaggcggcgatgcactacctgcgggtagcggacattgcgatggcctacgaccatgaggccgaagaagagcaggacgagccctgcgaaaaggccctgcttgagccacctctgccctcgcagccccaggcgcccatagcagccccagtagcgcgcgtcgaggcgccgcagcccattgatcaggaagaccgcagccgccacgtagagcgtggagaagaagatgtagaccatcccattcatcacggcgctcatccagtccgcctggaagaggcgatgcgtcgccagacacaggaagaagaggacgaagatcgtcgccagtaacccccagaagaggcgtcgcgcacgatccccgagggcttggcctccgcgccagcccagataggggaagaggaagaggcagcagagtaccgaatagatgtagaccataggagtaatgatgcttagcgccggacccagccagcgcgcctggggcctagcgcccttcgccgaactgacggtcgaagatgcggaactggtagtacatcagcgccatgcccagtaccccggcacagatgtccgagaagggcagcgccagccacacgcccgtactcccccagagccgagggaagaggaagagcgcggggatgaggaagagcgtctgacgcgagatactcagcaggagcgccttccccccgaagcctatgctctggaagaactgcgtggccgtcacctggaagcccacgaaggcgaagccatagaggcagaggcgcagcgcatgcaccgaggcctcgatcatctcgggcgaactggtgaagagcgaggagataagccctggcgctaccacggccgagagcgtcatcagcagccctataccgaggttggtcgtcgagcagatctggaaggtctgccgcacacgaggcagggcacgcgccccatagttgaagcctacgatgggctgcatcccctgcgcgatacccaccataaacatgaagcccaccagcgccgcgctattgatgatcccataggcacccacagcacggtcagccatcagcgggctctcggcgtagtcggccagtgtcttattgatcaggaaggccacaccgctgctgaggagctgcaggaagaagggcgacatcccgatcgagaggatggagctgatctgctgccaggagaagcgtagattgcggcggcggaagtgcacctcactatcagcgctcaggaagtggtgcatcacgaaggccatagacaccgccatggcgatgaccgtagcccaggcagccccctcaattccccagccaaagccgtagatgaagagtgcgtcgaggagggtattcagcaccgctccgatgagcatcgtcaccatggccttgtagggatagcccgaggcacgcatgatggcgttgaagctgaagctgagggtggagaagatattccccgggatgatgatcttgaggtagtcgtaggcgaaggggagggtcctatcgttcgcccccaggaggcgcaggaggtcctccagccagatcatcacggggatgatggtcgccagctgcgtgacgagcgtcagcaggaggccgttccccaggatacgctcggcctcgtcatgcttcccctcgccgagcaggatggacacgcgggaggaggcccccacgccgatgagcatgccccaggcctgcatgaagatgatgatggggaaggtcagcgcgaggcccgtgatggcgaattcgctgacgccctgaccgatgaagacgcggtctacgacgctgtagagggcgttgaccatcgtccccacgacggcggggataccatagtggaggaggaggctagggatacgctcgtgggcgaggcgctccgtgcgctcggtatgaggggtggctgtagccgacatatcgggaggggtatgggaggtgcggagggatcgaggggataggggtgatacccctaccgagggcacgcgggcgcggcactgggcaggagggctagggagctacacagaagaggctgcccgcagtatgggacagcctcttctagggtagctatacacacagcataggcctatcagggactaaggtctgtgtgggaggggaaggtcggcttaggagaagaactccttgacagcttcgttgggtaccatctcttcctggaagacgtaagcgcccgtcttaggggacttgaccatcttgattaccttagagtaggtacggccgtcagacttcttgaacgatgcgactgctttctttgccattgtcttatctccttatccttacttacttgatttccttgtgaacagtcatgcgcttgaggataggattgtacttcttcagctcgagacgctctgtcgtgttctttctgttcttggtcgtgatgtagcgggacgtaccgggtagaccgctttccttgtgttcggtgcactcgaggatgacctgcactctgttgcccttagctttctttgccatgttcgttatctccctactttactttgatttcacttagatagcccttatctgcagcctgacggatagcagcatcgagaccgatcttgttgatgatacggagcccagcggccgagaccttgagggcgacccagcatccttcttctggccagaagaacttcttggtaaacaggttgacatcaaagcggcgcttcgtcttgcggttggagtgcgagacgttgttgccgaccatggccttcttgcctgtaatctgacaaatctttgacattactctttatatttagtttgtttggttcaaacgcttgggcgactgcgggaccgatcctcacggacacaggaccctacaatcggtttgcaaagtaagtaaaaaaaacgcacttcagcaaatgaatacagctctgcccagtgtctaggcgcactctgccctcgggtggaggtgcggcagagcgaggacggacggctcttcccgtctagctttggcctaagaagaaggcttaggcgaagcgcttgatgagcctcttcgaacgcccgcgacacccctcccctagcccagcctccctcacctcgcgctcgggtaatagagctagctggagcgcggtcagcgcgccttcccaaggcctcgccccaggcccctcacgctcagctaggccaagggccgcggcgccttgtgctcaaggcaggggccgtgagggctatccgtcagaaggctgagggacggcagtgggcggcgtcatagctatccctcaaggcgctgaaggatatccctcagtgaggcaagcgcaggcgacgagcacgctggccctccccacgggcaagcgctgggagccctccgccaagccctcgactaggaggggcaaggtgcagccgaagcaagggaggagaaaaaggagcaaaggctaggatacagggaactaagggacaggatacaaagaggacgcgcccccaggcggcgtcagctcgagggctggcgtgcctgggggcgcgtcctcagtgtagggactatacgcccgtgcttacttcagcgcgtagggcttgtccgtgctcgtgggccagttgatattctggtagaagtagctggcgtcgaccttacccgtaggcgagcagagctccatcgtctgtatggtgacaggcgcgaggtagtgcgcgaggtagaaggtgtagccgtcgtacatcacgttgttgttctccttggagatgatctgatagggacggtggtacacgccgaggctgcgggccgagaggttggacttagagctaccatcggcgacgatacggctcttgtactggccgccttccttgacgaagttaccctgcttgtcgcgctcgatgaagtaagggtaggtgtacatcttcgtccagatgttgacaccctcgatctgatagttcttcacctggtccatagcacaccagcggacgaggtcctcattgcgcatgccttcgccagcgaactcacagcggcgctcgcggcggatgctgtagagcgtcttgtccacgggctgccctgcggagaaggcaccccagtcgtaggaggcgcggttgacgttggcctccttgctcatatccgtagccgcgatcgtctggtcgatcgtaccggtgatgccggcacgcttacgcagggcatcccagtacttgcgcgcgtcggcgtcgagcgtcttggtcagctcgtagctcgcctcgatgtagttgaggtaagcctcggaggcgcgcaggatgggcacacccgagacgtcgttcatctcagagccagcacgcatggcggggtcgtagttgtagtacttgcgctgcgcgtagcccgtgacgtcacgtacctcaggcttatcgatcatattggggaactcgtaggcacgtacctcgcgcttctccgtgtcgtagaagcggggagtcttctcatcgaagaggaagagcgacaggcgctcgtctctgtccttcttaacctcctccagcgtggcgtcggtgtagctacccgtcttggcgtagtagggcttaccatccttcatcaggaaggactcgacgagcccacgcgtccagcccgagttggtccccgagatcagctggtgggagacgaggtgcacgatgccgcgctccttgttgtactggcgccacagcaggatctccgagtagcccgccaggctacgc

SEQ ID NO: 3302 - DNA, 23648 bp, synthetic construct
  source 1..23648: mol_type = other DNA
  misc_feature 1..23648: note = Synthetic
agatatcagaggggatgtacacacctgccaggtgaccgatgtgcacggggccgttcgcataaggcagggcggcggtgatgagggtacgcttgaagttcttctccatctatattctttctatctaagcaccatacgaaggggtaggacggataaaagtcctacccctcggcgcgcatgatgcggtatattacttattcttctcaatgaggcgctcctgccaagcccacgcagagcggagcgtgtcggcgagggattccttagcttcccagccgaggatggtgttggccttcgtggggtcagcccagaccttctcgatgtcgccttcgcggcggccgacgatcttgtgggggaccttcacgcccgtgacagcctcgaaggtgcggatgagctccagcacgctgacgccacggccggtaccgatgttgaaggtctccagaggctcgctgcccttggagtcgtccagcatacgctcgatagcgatgacgtgggccttagccaggtcgacgacattgatgtagtcgcggatgcaagagccgtcgggggtgttgtagtcatcaccgaagacgctgagctgctgacggataccagcggcggtctgcgtcaggtaggggatgaggttctgaggcacaccattggggagctcaccgatgagtgcagaggggtgagcaccgatggggttgaagtagcgcaagcggatgaccttgtagggtacaccagcgtagactacatcgttgaggatctcttcattgatctgcttcgtattgccgtagggcgagagggctacctggataggcgcttcctcggtgacgggcaggatctcgggctggccgtagacggtgcatgacgaggagaagacgatccccttggtgccgtggcgctgcatagcctcgaggaggacgatcagtgagagcaagttattcttgtagtagagcagaggcttctgtacggattcgccgacagccttgctcgctgcgaagtggatcacgccctggatcgagggatgagccgtgaagatgcgctcgatagctgcctcgtcattgcagtcagcctcgtagaagatggggcgaatgccggtgatcgcttcgatgccatcaaggacctcgatattggagttcgacaggttgtcaatgctgacgacctgatagccggcctggatcagttcgacggtggtgtgagagccgatgtagccggtaccgccagtgacgagaatggttcctttcattgtcttactttgtggagtctattataatgtagtgttgatctcttcgatgtagccgaggagctcgtcacgccccatacgctcctccgaggaggtgacgaagatcggggggagctcctcccactcttcgtgaagcttggccttgtaggcctcgacattggctgcgagacgacccttgctgagcttgtcggccttcgtgaagaccagagcgaaggggacgccctcctcacccagccattggatgaactcgaggtcgatcttctgaggatcgtgtcggcagtcgaggagcacgaagagcagtaccagctccttacgctccagtacgtagtcctcgatcatgcgtctcaggctatcgcggctgtccttgccgaggcgggcatagccgtagccggggaggtcgacgaggtaccacgcatcattgatgatgaagtggttgatgagctgcgtcttcccaggcttctgcgaggtcatagccagccccttgcgcgcggtgagcatattgatgagcgaagacttcccgacattggagcgcccgatgaaggcgtattcggggagtcccgtcgtcgggcacttctccacgcgactattgctgatgacgaactctgcagacttgatgaccataggctttattacgcttatctcgtggctacaaagatacggctaaagaagcaaatagctacatctcgctcagctaccttgtgctgtaggctctaagtcgctcccgtagccactacgtgaggctttccataccccgtactcccgtcttcatcgtagagggtggtgcgaacctatattggtcggcgggctgaccaatataggtcgctgcatcgaccaatataggttcacacacggaccaatataggtcagcccgccgaccaatataggttcaccaagccccctcggtaggagcgagggcagaccaataagtaaggggcacgaaccgcagtcggttcgtgccccttacttgtgtgactcttcttggaagagcctgtgatagaagggcttctgtgctttaggccttcttcacgacctccagacgatcgccagcctgcatctgggggaggtacaggcgaccttggtggaggagcgtcttcgtatctaagggacggccgttgagtcggagggcgtagccacgaccttcgccaggcagaaggagcgtgtgacgataggtgtggtgtgcctcaaggactaagcggtcaagctgaccagcagaccagctgagagagcaggtggcattgccgatgacacgcaggccttggatgctaccagccttccatgccttgggcagtgcaggcagcgggatgatgcagcccgtctcactgctgaggagcatctccatgatgcccgaagagccgccgaagttcccgtcgatctggaagggcggatgcgagctgaagaggttgggctctgtaccactgccgtagggcttattcgtcttggggtcgatggcgtcgacggggcggaggagcatgttcagcacctcgtaagcgccctcagcatcgcccagtcgtgcgtggaagttcaccttccagcccatggaccagctggtgctgcttgagccacgtgcgatgagtgtcttcttcgccccttcggctagctcgggcgtgccgtgtggcgtgatctcgttcccagggaagagcccgtagagatgcgatacgtggcggtggtgtggctcgacctccttgtagtcctccatccactccatgatacgcccgtcggggccgagggtggtgggcttgagctggcgcagtgccgtggagaggctgtcgacgaaggtgcgattacgaccgagcgccatcgccgcctcgcgcgtcgtggagaagagctcacgtaggatctgattgtccatcgtcgagccagccgctacggcgacggccttgccttggggcgtgtagtagctgttctcaggtgaggtcgtggggacgttgacgaggtagccgctcttgggatccttgaccagcgtcgtgaggaagaagcgtgctgctccctgcatcacggggtagatgcgctggaggtaagcacggtcttggctgtagcggtagtgattgtagaggtgttcgcagagccaagcggcggaggtattcgtggcgccccagctgggatgctcgccaggggcagtgaactgccatatgttgccgaggacgtgcgtgacccagcccttagcacggtagaaggtgcgtgccgtacgctcacccgagggtacgatgctctcaacccagtccgtgagcgccccgacggtctcggggagtgcgcccttctcggcaggccagtagttcatctgtaggttgatgttcaggtggtagtccccgttccaaggagcttggatggtttcggtccatatcccctgcaggttgggaggcagagcgccagggcgtgtgctggagaggaggaggtagcggcccagctgcatatagagggcggccagtgctggatcgcgctcgggatgctcgtagtaagcgatgagacggtgctggataggcagcgatgagcgtgctgggtcggagccaaggaagcgcgcctgtacgcggtccatctgtgcggtgaagcgctgtacgtgctcagcgaagaggttggcttcgcccacagccttagcttggagcgtctgctcgatgctgcgtgccatgacgggcaggcgcttgtcgtagtagttagtgttgtgcgcgatgtagagctcgatcgtgggggcattcaccacgagcagctcatcgccacgggtgatgagcgtaccgccctgaggcaggacgggacgcacgacgatggcgtagctcatgccacgaccacccttgccgtcggggagctgacccgagagcgtcaagaagccagcttcggctgcagggtgcccattctcggggcgtgagagggagaggcgcagcgtgtcacggcgggcctcttcgctgtggttcgtgaggtgtacgacctgcacctcacggccgaggacgctgtacagacgcttcgtacgataggcttgcccgtcgacgacgaggctctccttgctgacgccttcgctgaggctcagcccacggtaataaccgctgagctcgggagccttgtcccaattgaggtgaaggaagccaccgacttggtagctgccatagggggtattcgctccctgtccgcgtccgctacctacgccaccgcagacgaaggtgcgatagatgagatcttcggcttccttagcacgcccagcaaggaggagcttacggatagcggggagttgcttgtaggcctcggcgttccaagcggtggagtcgaccgagccgctccacatggagctttcgttgagggtgatcctctgatgctgtacgccaccatcggagagcatccccagacgaccattgccgagggggagcgactccatcatgctcgtggctgggcgatcaaagaaataggtgaggctctcgcggtaagccttgtctacggaggtagtcgtcttagcctgcggtgccgccgtcgtggggctggcgaaggcgttgcctgcgctgagggctgctgcgacgagggtgcagcgaagtagggtagtatatgccataggacttgtgcaagcgatatggaagcatcggcttccgtttgcccgcaaagataagccattcttccgcccacgcatcagtttcgcctctcagctcgctcctctcagtcgttcgctggggctataaaaaggctcagcccgcatcccccgagtgtggggaatgcgggctgtaagccttatgaaacttgagggaaggggtcgcttcttagatgacgccctgctcgagcattgcctgagctaccttgaggaagccagcaacgttagcacccttgacgtagttgatgtagtctccttcacggccatgagccacgcactgctcgtggatgtcgctcatgatctggtggagcttagcatcgacttcttcgttggtccagtagaggtgcatagcgttctgggtcatttcgagaccagaggtagctacaccaccagcgttgactgccttaccaggagcgaagagcatcttcttttctacgaagtactcagcagcttcggccgtacaacccatgttcgacgtttcagctacgatggttacgccgttagcgtggagcatcttagcatcttcttcgttcatttcgttctgcgtagcgcaaggcatagcgatgtctaccttctgctcccaaggcttcttgccagcgaagaactgagcgttggggaacttcttagcgtagtcagagacgacgtcgttaccgctggagcggaggtcgagcatagcctggaacttctcaggagtgttgataccgtctgggtcgtagacatagccgtcaggaccagagatggtgacgaccttagcaccaagctcagtagccttctgagctacaccccaagctacgttaccgaagccagagatagcgatcgtcttgcccttgaggtcgatgttgtgctgcttgcagatgtgctgtacgaagtagacagcgccgaagcccgtagattcgggacgcaggcgagagccaccgaaggtgaagcccttaccggtcatcgtacccgtgtgctcgttagcaaggcgcttgtactggccgtacatataggcgacttcgcgaccacctacgccgatgtcccctgcgggtacgtcggtgtcagggccgatgtggcgccacagctcgcgcatgaagctctggcagaaagtcatgatttcgcggtcgctcttacccttaggagagaagtcggcaccgcccttaccaccgcccataggcagcgtggtgagtgcattcttgaaggtctgttcgaagccgaggaacttcaggatagagaggttgacagagggatggaagcggataccacccttgtatgggccgatagcgttgttgaactgtacgcggtagccgatgttcacatggactttacctgcatcgtcgatccaaggtacacggaaggtgatgatacggtcgggctctacgaggcgttccataatagctgccttttcgaactcggggtgctggttgtagacttcttctacagagagaagaacttccttcacagcctggaggaattccttttccccagggtgctttgcctcgagcgaggccaaaatctcagcggatttcataactgatcgatctaatagttttgcgtgtacggctcgtgtaggagccttgatttcacagcaaatatatgcaatgatttttaccttgacaaatgtagtagcttcttttaatttcttaggaaagaagcgcatctacacggcttttccgctatgtgtgaataggggtgtgaaaggcaaaatagctggtgaaaatcgtgtgttatccctcggtatcgtggcaaatcttttgcttttcacttcaccctccttccccgcattcatgagcacagcacaccaccctatatataataatgtatagggggaggtgaagacgatggggcggaatgcgcctaaccgcggcggaagaagcgggtggggtagagggagatgaggaaggagagtgccgtcaccgagacgaagatgaggagcatatccagcgggcgcacatccacggggagcgccatcgcttcgataccgctaccagagcggatgatgccgaagcgtgcctgcaggaggcagagtatccagccgaggagcatgccgacgctggtccccgtgagggcgatcagtaggcccacacggcggaagacctgctgcgtaaagctgggcggtgcaccgagggcggtgaagatacggctgtcgtcttgcttctcgatgaggagcatagcaagcgagctggcgacgttgaaggccgccaggaggaggatgaagaggaggatgagataggtcatgaccttctccatacggatgaggtaggagaggtcggggtgctgctcttcgcggtcaagggcggtaaggtgatcgccgtagagcaccttcacctgctgcttgaagtcggaggtcttgacgcccgatcggaggtgaatgccgagagcggatacttcgctctcctcatagtcgagtacgtcctgcaggtcagccaaggggaggtagatcgcagcatccgtctcttggctcgtgggctgatactgcccgatgacccgtgcctcgaggctctggaaggacgaggcgggggctaagggattggtgaagccgaggcgcttggggaagaggacttcggcagcgggaccattgtgctcggtgcggctgctatcctgcgggagctggatcgctgcgccgagctggatgggggtgatgggtgcaccttcggcgtctacgagggtcgtcgccgagtggagctcgggcacatcagctgcacgccccatcgggtatacggaggcaaaggccgagtccaccccgacggcatccacgacccactgctgctcccctactcgtaggagtcccttgctctccaggcgcagggcaatcgcttcggcacctgccttcgtgagcttggtacggtagtcggggaacttcttcaggtcgaagactccgccctcggtgtctctcaggacgatgtcggcatcgacctgctttgtagctccgaggatcatcgccacatagccattgtacacgccgacgacagccaccagcgccatagcgacgacagcgatggcgacggcagagagtgccgtcacgtagttcactgcatgcaggcgggtgcggctgaagaggtagcggagggctatgcggaagctgagcacgggcgaggggtggggagtgtggagatcgttacttgtcgttcagcccgaggaggctatcgatgcgctcgaggtagtcgagtgagtcatcgatgaagaaggtcagctcggggagcttacgcagctgcttgcctacgcgtaggcccaggtcgtagcggatggtcttcgcgctggagcgaattgactcgagtagctcttcggccttctccgaggggaagatgctcaggcgtacacgagcgatgctgaggtcggggctcacggtcaccgatgtcacggtgatcagtgtgccggggatgctctgggtctgtatgcggaagaggtcgctgacctccttttggatgagtcgattgattcggctcattcttgtattatccattgtctctgtctttttgaattacgcttacaaagttagtcaaagctcgcctcatctcccgcctctacaaggggcggtcggcgaaggtccgatggctgactacctatatgagactgttgccgcgagtcctgtcctctatttattgtgctaaggcatcgcgcgcccagctccccgatatgcctctccgaagtgatcaggcaaacccttcgctttatcgcgcatattcctcttatccagcggagggaaaagcaccgttctcgtgaagaaaaaagcgccttcccgtagtggttttcctgcatctatgcacgtagtcttaaagaccaggcacgtaaatccaaatatccacgtacgtagatattagatccacgtacgtagtccaaacttatctgctactcgtccgcaatttttatccctacgcggagcaacaacctaatagaggtcatttcacaaagctatataggaatcgagagaacgctatataggaattagtccaaagctatatagctttcttcgccatcctatatagctctacccacgcacccatatacctataggagaccattgcaccagaccgcctcttcacagctcgtaccttctcctcgaaaagagaagatcccacttgatgcaccctcggatggagcggtatcaagtgggatcttgcttggagtgatgtaccagagagcgtggctctcctaagccgtgaagctggctacttttttctgtcgctagcctggagttggtacatctccgaggttgatgagagtaagggctctgcggtgagggtcacttccttctcgtaggttctgatgtgcttgttcccattgtattgcttgacctcgatcttcaccttgatggctgcgggtgaattaccactattaggtctgcttgcgatgactccgacgtatagccctgagcccttgtgggtgaacgttgtgtgatgggacttcgcgacggggtctctccactcggagttgtagatcgactgagagacgagcttgccgtcacggtagatatcagagtcccccagcgtattggctgtgaagttgacctggactggtgcggaggccttgatcgtgacctcttgcttgaggtctgcgctgccgaagccgccgaattctccgcctggcaggtcactcttgccaccgcaagagctgagcactaaggcaaaggagaagaggagaagagataggaagccgagtcggcgaattgatcgttttgtagccattttacttgtagttgatgatgaggcggagggagggtagaccgagctatccagctccgcagtaatggttctgttaaatgaattgtacttagggaaggagtgtaagacgggcttcttctcctgctcaagatataaacgataggttgtatggacatcttatatatcccttacaaaaatgcttgtgtataatatgtatatgtaaatagatataaatgaagtgtgtgtggtatatcccttctcttagtggagaatgctccttgggtttgcaggctttagaggtgggaaaagtagggtgtggtggccccctttttcaagatgtaagtcgctcatggatgcggtgttgcttgctcggcagcagggaagttgctacatttgtttcagtgctacggctgatcgtagtggcctgacctctcggtctgatcacaaaaagaagaagggtgagaacctcacttaagaggccccaccctggatgttctcacaacggaataaatccttattgtgattagctttcagatttcgttactgcaaatgtagccatttttcttaatatcaacacaaccaatgcttatgagcaaacatgtacttggtcttgacctcggagtaggatcaatagggtggtgccttatcgccctcgatgcgcagggagatcctgccgaaatcttaggtatggggagccgtgtcgtccccttaaacaatgctaccgatgctgcggacttctctatcgggaaggccttcacggcgaaccaagagcggacggcgcgccgtacgatgcgccgaggctttgcccgctatcagctgcgtcgctaccggctacgtcgggagctggagaaggtcgggatgctccccgatgccgcactcattcagctccctctgatggagctgtggaaactccgcgagcgggcggctacagctggtgagtgcctgacgctgcccgagctggggcgtgtgctctgccacatcaatcagaagcgtggctaccggcatgtcaagagcgatgccgctgccatcgtcggtgatgaaggcgagaagaagaaggactcgaatagtgcctaccttgctggcatccgtgcaaatgatgagaagctccaggacgagcacaagacggtggggcagtacttcgccgagcagctacgtcagagtcagaatgagagccccacgggcggtatcagctaccgcatcaaggatcagatcttctcccgtcagcgctacatcgatgagtacgatcagattatggcggctcagcgcgtgcactatcccgatatccttacagacgagttcatccggatgctgcgtgatgaggtcatcttcatgcagcgcccgctgaagtcctgcaagcacctggtctcgctgtgcgagtttgagaagcaggagagggtgatgcgcgtccagcaggatgacggcaagggcggtcggcagctcgtcgagcgtaaggtcaagttcggcccgaaggtcgccccgaagtcctcgcccctcttccagctctgccgtatctatgaggcggtgaataatatccgtctgatccgtcccgatggctcgccacgcgatatcacacccgaggaacgtgacaagctcgttgcctatctacaaacctacgaagcacctaaaccacccaagaggaagcctgctaaggcaaagcctgtaaagctggctcatcccaagcttgacttagataagctcaaggaacttctctgtatcgaggaggagttatttgcagataagctcctcgaggaaggcctgaaaggagatactacgcggatagctctcagcattattctgcagccctatccgcagtatcaccacctcctcgatatggagctggagacgcgtatgatgaccgtccagctcaccgacgaagagacgggcgaagtcactgagcgggaggtcgccatcgtcaccgatagctacgtccgccagcccctctatcgcctgtggcacatcctctactctatcgaggagcgtgacgcgatgcgccgtgctctcatcacccagctcggtatgaaggaggaggacctggatggtgggctcttggatcagctctatcgtctggacttcgtcaagcccggctacgggaataagtccgcgaagttcatctgcaagctcctcccccagctacagcaggggctgggctatagcgaggcgtgcacagccgtcggctatcgccactcgaatagccccaccagcgaagaaatcgccgagcgcacgcttctggagaagataccgctgctgcagcgcaatgagctgcgtcagcctctcgtcgagaagatcctcaaccagatgatcaacctcgtcaatgcgctcaaggccgagtatggcgtcgatgaagtccgtgtcgagctggcacgtgagctgaagatgtcgcgtgaggagcgtgagcgtatgacccgtcagaatgggcagagaaaggaggcgaatgataaggtagcagagaggatccgtcagtgtgggctttatccgacgaagcctcgcatccaaaagtacatgctgtgggaggaggctggtaaagtgtgtctgtattgtggtcggtcaattgaagaggagcagtgtctcaatggggacgatatggaggtcgagcatatcatcccgaagtccgtcctctatgatgactcctatggtaataagacctgcgcctgccacgaatgtaatcagacgaaaggcaatcgcaccgctctcgaatacatccgtgcaaagggctgggaagccgagtatatggagcgcatcaatgacctgctaaaggagaagaagatttcctacagcaagcaccagcgtctgcgctggctgaaggaggatatcccctccgacttcctcgagcgtcagctgcgtctgacgcagtacatctctcgccaagctatggctatcctccagcagggtatccgccgtgtctccgcgagcgagggtggagtgacagctcggcttcgtagcctctgggggtatggtaagatcctccatacgctcaacctcgatcgctacgactccatgggtgagaccgagcgcgtatctcgggaaggtgaggcgaccgaggagcttcatattacaaattggtcgaagcgtatggaccaccggcaccacgctatcgatgctctcgtcgtggcatgtactcgtcagagttacatccagcgactcaaccgcttaagctctgagtttgggcgggggaataagaagatggaagatctggaggcccaggagcagcaggcgaaggagaccggaaggttctctaacctggagcgctggctgacgcagcgtcctcacttctcggtgcggaccgtcagcgataaggtcgccgagatcctcatctcctaccgaccagggcagcgtgtcgtcacccgcggacgcaatatctatcgtaagaagacggctgatggtcgagaagtcacctgtgtacagcggggcgtgctggtaccgcgaggagaactgatggaggcatcactctacgggaagattctctcccaagggagggagcgtattgtcaagcgctatcctttgcatgacctgaagggggaggtcgtagatccgcgccttcgtgagcttatcgcagtgtacaatcaagagattacatccaaggtaaaggcgaagggaactcccctctatctcgatgctgctgagaagcaagaggtgcgctctgtgcgatgctatgttgataagccttcggttgcaaaggctattccaattcgcttcgatgagtgtggtagagctattacattcgtaaagtctgggagtaaccatcaccttgctctctatcgtacccctcacggcaagctcgaggagtctatcgtgaccttctgggacgctgtagaccgtgcacgctatggaattcccttggttattacgcatccgcgtgaggtcatagagcaagtcttactgcgcggagatgtcccagagtcagtactgcgcttactcccaccctctgattgggtatttgttgactcccttcagcaggatgagatggtcgtcattggtctgtcggataaggagcttcagcgagccctcgaagtgcaggattatcacaagctcagtgagcacctctaccgtgtgcagaagatgtcttcgagggactactggttccgctaccatttggagacgagtgtggcagatgataagaatacttcggggcgtataccgaagttccatcgtgtgcggagtttgtctgactacgaaaagaggaatatccgcaaggtgcgtgtcgaccttctcggacggatctctctgcactgatgctcccctgctaccatgatgaagcgaacgatctatatcggcaatcctgcctacctctccctgcgtctcaagcagctggaggtgcggcagccgtcggatgatcgtgagacgacggtacggacgatcccgatagaggatatcggggtcgtcctcctcgatcaccaacagattacgatcacccacgctctcttaggggctttgctcgagaataattgtactgtcgtgacctgctcggcgacgcacatgccctcggggctgctcctcccgctggacggacatacgctccagaccgagcgcttccgtgcgcagctcgatgcctcacttcccctgaggaagcagctctggcagcagacggtgcaggcgaagatcctcaaccaagctcatgccctgcataccgtcttgggggagccagcgaagaatatgcttgcctggtcccgccaggtcaagagcggggataccgacaatcttgaggcgcgggcagcagccttctactggcgcaacctcttcatctccctcccgggcttcgtgcgggagcgagaggaagctgctccgaactcgctcctgaactacggctatgccatcctcagagcgatcatcgcacgagcactcgttggctgtggtctcctcccgacactcggcatccatcaccacaataagtataatgcctattgcctggcggatgatatcatggagccctaccgcccctatgtggatctgctcgtcgtggagatctgcgaggaggagggtttccctacggagctgacgaaggaggttaaggctcgactactcgcccttccgacgcttgatgtagagatcgagggacagcgtcgtccgctgatgctggcagcgacgcagacggcgacctcgctcctgcgttgcttcgcgggtgaggcccacgcttggcttatccccttttgtcatgcgagccaagcgactaagtgaatatcgcattatgtgggtctttgtcttctttgatctgcctacgagtacgcctgaggagcgtaaggcggctaccagcttccgccaagagctcctgaaggatggcttcacgatgtttcagaactccatctatatgcgccattgtgcgagtatggagcaggcacagacgcatgtgcggcgggtcaagtcgatgcttcccgatgagggcgaggtggtgatcatgacgcttaccgacaagcaatttggtctgatggagcacttctcttcgcgcaagcctaccgatgccgttcagctcccagacctctttgatatgctatgaggtcttgaatcggaaaagttactaagtaaaggaaaagcccatggatatccacgggcttttctctttctaaatccttctgctaagtgcttgtcccatagattcctttgcagggtcagctgtattagcaaatatgaaggtacgaaatctgaaagctaatcacagctaacctcgtgaagctactgcgagcctacgggctgtattagcaagtatgaaggtacgaaatctgaaagctaatcacagcagtagagccaaaatagtatatagccgtgcggctgtattagcaagtatgaaggtacgaaatctgaaagctaatcacagcttcggtggcgctcttcacgactctacagaggctgtattagcaagtatgaaggtgcgaaatctgaaagctaatcacagctattacaaatcactacaaagataatctgttgctgtattagcaagtatgaaggtacggaatctgaaagctaatcacaaccgtcgaggtagtccataaggcgcaggaggtgctgtattagcaagtatgaaggtacggaatctgaaagctaatcacaaccagcagcagctcaaccaaatcgagaacaacgctgtattagcaagtgtgaaggtacgaaatctgaaagctaatcacagcgtgatgtgctgggcagcacgcaggctctgcgctgtattagcaagtatgaaggtacgaaatctgaaagctaatcacagcgaggcaagacagtggtgtacttctatatcggctgtattagcaagtgtgaaggtacggaatctgaaagctaatcacaacgataggtcatgcgcacctcttccagcgcgggctgtattagcaagtgtgaaggtacggaatctgaaagctaatcacagccaactgctcggcattaaggactaacaatgggctgtattagcaagtgtgaaggtacgaaatctgaaagctaatcacagcgtgatgtgctgggcagcatgcaggctctgcgctgtattagcaagcgtgaaggtacgaaatctgaaagctaatcacagcaccttcagggtgagctcaatcttactcgttgctgtattagcaagtgtggaggtaactcttcgagattatctcccattcgctacaagctgtattagcaagtgtgaaggtacggaatctgaaagctaatcacaacagagacttattgactactgcacatttggtagttatggcgataggttgttgctccgcgtagggataaaagttgtggacgagtggcagaaaagtttggactacgtacgtggctctaatatctacgtatgtggatatttggatttacgtgcctggtctttaagactacgtacatagacaaaggaaaacctctacggaaaggtgcttttttcttcacgagaaggatacttttcccgccgctggataagaggaatagtcgtgataaggcgaagggcttgtatatctcttcggagagttataatcgtgtaaacctcttctgtcttcccggctgggtattgcttgccaatcggacggtgtgtgaagtcgtgatagaggtgccagagctgctgcaatagttgtttgtacgcggttcagtagtagttttatatacgaactactattagttcgtaggcgaaacgaatagtcgtttgacccccaaacgagtagtcgtttgagtgcagaccaatagtcgtttggagatcgactttgcctcaatattgcttccgtatcaaggatggggctttgatctcatgggttaggtgtcttaaacttatactatctttgcaatggtgaggtactccgaataggggacgtcaccccgattagacctcatcccttgtataagctgggatgaggtctaatttcatatactcactccttgaactacagtcggggttaggggctacttagcctactgaccctaccgatgatcttgctgggatctaaaagcgtccgtcagtagggaaggatccctgtttttaggggtgtcggggcggaaaagtgaaggagtggggtgatgggtggtagtggattgtattcgagtttgttatcaaggtacttcgccagacgagtcaaggagggtggtgtgaacctatataggtcgctgggtcgacctatatagctccgctccgcaatctatattggtcacgctgcccacctatataggttgactcgctgaccaatataggttggtgttgctttcttatagtgggatagatgctatccggataccgagcctgtggtatgtgcggggagggaaaagagaatggagccacggatgactccgtgactccaccataaagtgtcacccagagaccagcggagcttgatagaatcgcacttatagtttgctggcgtgctgacaatacaaagataatccttaactttgcactgcgaggtatcctgataaaggaacgtcgctccgatcagccctatcctcagtccagagcatagggctgatccttatagtacaagccccgctcaagtcgagtggggcttgctgcaaaaagcgaacgtacggagcttgaggtgatagcgccataggtaaatacgatcgcttcgctgggtgcaaagatagtttgtcttttccttgtctcaccttctatctccttgctgtagagaaggctaagctgtggcggtggaggagcttgagaggatgggatgcactcgctgatagctcacttgatgacaggctttgtaccctcagactctgcagagttgcgggcaagtgggaaggcatttgcgtatatgaagaagttgtattacctttgcaaccgcaacaaagaaggtggcaatactcttccttagctcagtcggttagagcatctgactgttaatcagagggtccttggttcaagtccaagaggaagagcttctcccgagtatgggcgtggtgaataagccccttctgacgctgcattaagtactcttccttagctcagtcggttagagcatctgactgttaatcagagggtccttggttcaagtccaagaggaagagcttagagaaggaattagattcagggagataccctcaggtccaattacgaggacttgggggtatttccttttatgtcccctcgtggagtgggacgaaggctatataacgacagcgcccctgctcaccgatggtgggcaggggcgctgcgcgtataggggagtgggacttagagcccgtgttcgccgaggtagcgctcagcttcgatagccgccttacagcctgaggccgctgcggtgaccgcctgacgatagagggggtctgcgacatcgccagcagcgaagacgccagggacgcaggtgcgtggcgtaggtccttcggtcttgatgtagcccacctcatcgacctcgacgtagtcagcgaagagttcggaattggggtggtgaccgatagcgaggaagaagccatcaatgggcaggtctacgcgctcttcatcgggctggccgaggcgcttgacgagatgtgcgccttcgacaccatcttcaccgtagaggcccacggtattgtgctcgtagaggacggtgatcttctcgttggctgcgacgcgttgacgcatgatgtcagaggcgcggaggtagtccttacgcacgatcatatagacgtgcgaggcgaggctcgccaggtagagtgcctcttcgcaggccgtgtcaccgccaccgacgacagcgaccttcttattgcgatagaagaagccgtcacaggtagcacaggccgagacgcccatacctgcgtacttctcttcgtcgggcaggccgaggtacttagcggaagcacccgtagcgatgatgaccgtatcggcttcgacctcgacaccttcctcgaaggtgatgacgtagggagccttagagaggtcagccttcgtcgccagaccagagcggatctccgtaccgaagcgcagagcctgattgcggaggtcctgggtgagcgctgggccggtgacaccctcgggataaccagggaagttctctacatccgtggtctgcgtgagctgtcctccaggctggatgccttcgtagaggagtggggagaggttggcacgtgaggcatagatggctgcagtgtagccagcggggccggagccgatgatgaggcagcggcgatgttctctactcatacttgcgtagtctatatgtgatggtgatagaaataggggcgagtcttagcgcatatcgcggagcttcttctggagctcttggcgagcgaagaagatgcggctcttgaccgtaccgagggggatgccgagggtatcggcgatctcgttgtacttatacccagcgacaaacatggagaaaggctccttgagtgaaggctgcagctcggcgatagcgcccgtgatctccttgatatccatggagccctcgggagtgttgtgcccgccttcgctaagcagaggtacgttgtaagcgtcgacgttggggtcgatgaagctctgcgtgcgcacgagcttgtggtagttgttgatgaagatattacgcatgatcttcagcacccaccccttgaagttgacgttgtcgacgaacttatcgtagttgttcaggacgcgcagcgtagtgtcttgcgtcaggtcttctgcatcggcttcgtccttcgtcagcgtacgcgcgaagttcttcatatagtcctgcatgccgatcaggtccttctgtatctgtaatacgtccatatctgtaatgctcttttttgtatagtgaggcggtgcgccgaggggcaatgtggcgagccgtttaatatcttttttacaaagatacgattatttctcccgcagaaagcacgggactttatataggtatattgatatactcaatatagagcgtatcaccagcggatgggcgccttgccccactgggtgaggtaggcattcgtctggctgaagtgacggcatccgaagaagccacgatgggctgagaggggggagggatgtggagcttcgagtacgagatggcgggtgcgatcgatcatacttcccttgcgtcgggcagggcttccccagaggaggaagacgacgtggtcaccgcagcggttgatcgtctcgatgatagcatcggtgaaggtctcccagccaaggccctgatggctcgctgccataccggcgcggacggtgagggtggtgttgaggaggaggacgccctgctccgcccatggcaggaggtgcccgtcagggatgatcgagggctggccgaggtcggaggcgatctccttcttgatgttgatgaggctcggaggtatggcgacgcccgctggcacggagaaggctaagccctcggcttgccctgcaccgtggtaggggtcttgtcctaagatgacgacgcgcacctcggggagggggcaggcatcgagggcccggaagatgagccctcctgggggatagatagggccttcgtgctggtaggcctggcggatgcggtcggtgaggatgctgaagtagagcttgtcgaactcaggcgcaagggcggtacgccagctctcgtcgaggcggatgttcatcgtgtagtcgggaagaggggtgggaggtctgcggagaggatctgatggacgaggccacgcagatctccgtgctgtgcggtgtagaagagggcgtgccctacggcggcgagggcgtcgaggtcattggcaccatcgcccgtatagagtgtcgaggcgagcgcccctgcagtccactcttcgaggaaggcacgcttgccctcggcatcaatgatagcctcgggatcaagtccatcgaattcgccgtcagcggtatagcgtacggcgctccctacaaaggcggagagaccgacgcgctcacagatatcttcgacgaagggctggtaagctcccgtgacgatagccgtagggagagagagctcgcggaggagaagcgtggtgttagtggggagagtgatgcttcggatgaccgagtgaagcgcctcacgggagagcccacgaaggagctcagtgcggtgcatgaagctctctcggaagggtgtggcgcctgccatagccgcttcggtcagggcagtcatctcctccgagcgacctgagagccgtgccagctcgggcagtagctccgtcgtcgtgagcgtgccgtcgaggtcgaaggcgacgtgcgtgatctcggctgtggcactcgtggaggggaggtagaaggcgctgtgcgtagcgcgcccccaggggatgaggtgcgtgaggagctcacggcgtagctccgtctcactcacgcttcgctccgtagggtagctgtagagcctgccctgtgaagtgtccgtgatacttgccttcggtgtagcgcctatcgtctcagagaggagggctctgagctgctggtcctctccgtccgtagggcgagagaagagatagaggtgctgcacgtggggcatcgaggcggcgtgagggtatgtgtatataaagcaagagtgcttgacttcgataagccaagcactcttcagtttttgggggtggaagatgggattcgaacccacgacacctggaaccacaatccagtgctctaaccaactgagctacaaccaccatgtaaatgctctgcttttcgcttgagcactgcaaaggtaatactactttctcaattcaccaaacctaccgctcaatggcggcttcgaggtcgtgccatagccgttcgtcgggtacgggagcagtgagtgtgagggcttccttgctcacggggtgtgtgaaggatatctgtctggaaagtaggctgatactcccgccggggttgctacgaggagcgccgtacttcaggtcgcccttgatggggcagccgagggcagcgagctggcaacggatctgatgatgacggcccgtgtggagctcgatctcgaggagatgatagtgttcgcccgaggccagtaggcggtaggagagtcgggcgagcttggcgccaggcgtcgcagcgccttggcgagctacgtagctcttgttctgcgactcattgcgcacgaggtactgctcgagggtgtcggagagcttcggtgggcgagccgtgacgacggcccagtagcgcttcgagacgtctcccgtgcggaagagctcgttcatgcggctgagcgccttcgacgtcttggcgaagaggacgagcccacccacggggcgatccaagcgatggatcacgccgaggtacacgttgcctggcttgttgtacttctccttgagccaacctttgagggcttcgctcatcggctcatcgcccgtcttgtcaccctggacaatttcgccggggcgcttgctgacgcagaggaggtggttgtcttcgtagacgacagtaggcttgtacatacggggatatggggaggggagacttagtccccgatgaaggtgcagttgagtacctcgcggtagctattgaagatcgcgctcttgctgatgaagccgaggtagcgcccttcctcatcgacgacgggcatcttccacgccttcgtctcgtcgaagaggcgcataacctctgtcatcggggtggctgaggagaccttgacctcgggagtgaccatgatcttacgcaccttgtagcggtcgtagagttcggggcggaacatgatgttgcgcacattatccagctcgacgatgccgacgagtaccccgcgctcgtcgaccacggggaaggagttgcggtgactcaccgagatgacgctgaccatctctccgagggtcatgtcgggggagacgacctcgaagtcacgctccagcacgctctccagattcatcagcgtcagtacggccgtatccttctgatgcgtgaggagcttgccctgctctgccaagcggagcgagtagatactgtggggcatgaagatgcggatcgtggcaaaggaggtcagcgacacgagcatcagtggcaggaagaggttgtacccgcccgagagctctgcgatgaggaagacacccgtcagtggggcgtgcatcacaccagccatcagccctgccataccgagcaggatgtagttcttcggggagatgaagacgttgagcgaactgaagtagttcaccagataggagaagatgaagcccgtgagcccgcccatgaagagggtaggagcgaagagcccgccacagccaccgcccgagttcgtcgctacggaggcgaagaccttgaagaggacggtgaggaggaagaaggcgaagacgacccagtaggagttcgagaacgcctcgaagatactcccatcgaggagctgcgtgtactgcccgtccaagagaatattcaccgagtcatacccttcgccatagagcggcgggaagaggaagatgagcagggagaggatagccgctgagatgaggtagcgcaggcggaagtccttgatgcgcttcagctcgctctcgaagcggaacatcgtcttcgagaagtacagcgacatcagcccgcacaccacgcccagcaggatcatcagcgggatgcgctcgatatgataggggtcggtctggatgaactggaagagaatctccttccccgagagcacgtaggccacggcagcagccgagacagagctgaccaggagagggaggacggaggccattgtgaggtcgaggagcaggacctcgatgacgaagaccagccccgtgataggtgccttgaagacacctccgagggcaccagcgacaccacagccgatgaggagcatgaggttgcgctgctcgaggcggaagaggcgtccgaagttcgaccccacggctgcccccgtcattacgatagggctctctgcccctaccgatcccccgaagctaatagtgagggcactggcgatgatggaggtccaggtgttgtgcggcttgatgcggctcttacgctggg

SEQ ID NO: 3303 - DNA, 23642 bp, synthetic construct
  misc_feature 1..23642: note = Synthetic
  source 1..23642: mol_type = other DNA
cgtagtactgctcgctctcttcttcgatgaagccgcccttgtcgtagatggttcggaagatcgaagaggcaagctcacggtgcgtggcgctcgtcgtacggccgtaggtatcgaaggtgataccgaagtcagcgaatgacttgcggatgatcccgtcgtagcggtcgacgatatcctgtggggtcacgccttccttcttagccttgatcgcgatgggcacaccatgctcgtcgctaccacagacgaagagcacctcctctccacggaggcgcaggtagcgagcatagatatcagaggggatgtacacacctgccaggtggccgatgtgcacggggccgttcgcataaggcagggcggcggtgatgagggtacgcttgaagttcttctccatctatattctttctatctaagcaccatacgaaggggtaggacggataaaagtcctacccctcggcgcgcatgatgcggtatattacttattcttctcaatgaggcgctcctgccaagcccaagcagagcggagcgtgtcggcgagggattccttagcttcccagccgaggatggtgttggccttcgtggggtcagcccagaccttctcgatgtcgccttcgcggcggccgacgatcttgtgggggaccttcacgcccgtgacagcctcgaaggtgcggatgagctccagcacgctgacgccacgaccggtaccgatgttgaaggtctccagaggctcgctacccttggagtcgtctagcatacgctcgatagcgatgacgtgggccttagccaggtcgacgacattgatgtagtcgcggatgcaagagccgtcgggggtgttgtagtcatcaccgaagacgctgagctgctgacggataccagcagcggtctgcgtcaggtaggggatgaggttctgaggcacaccattggggagctcaccgatgagtgcagaggggtgagcaccgatggggttgaagtagcgcaggcggatgaccttgtagggtacacctgcatagactacgtcgttgaggatctcttcattgatctgcttcgtgttgccgtagggcgagagggctacctggataggagcttcctcggtgacgggcaggatctcgggctggccgtagacggtgcacgacgaggagaagacgatccccttggtaccgtggcgctgcatagcctcgaggaggacgatcagtgagagcaagttattcttgtagtagagcagaggcttctgtacggattcgccgacagccttgctcgcagcgaagtggatcacgccctggatcgaggggtgagtcgtgaagatgcgctcgatagctgcctcgtcattgcagtcagcctcgtagaagatggggcgaatgccggtgatcgcttcgatgccatcaaggacctcgatattggagttcgacaggttgtcaatgctgacgacctgatagccagcttggatcagttcgacggtggtgtgagagccgatgtagccggtaccgccagtgacgagaatggttcctttcattgtcttactttgtggagtctattataatgtagtgttgatttcttcgatgtagccgaggagttcgtcacgccccatacgctcctccgaggaggtgacgaagatcggggggagttcctcccactcctcgcggagcttagccttgtaggcctcgacgttggctgcgagacgacccttgctgagcttgtcggccttcgtgaagactagagcgaaggggacaccctcctcgcccagccattggatgaattccaggtcgatcttctggggctcgtgtcggcagtccaggagcacgaagagcagtaccagctccttgcgctccagtacgtagtcctcgatcatgcgtctcaggctatcgcggctatccttgccgaggcgggcatagccgtagccggggaggtcgacgaggtaccacgcatcgttgatgatgaagtggttgatgagctgcgtcttcccaggcttctgcgaggtcatagccagccccttgcgtgcggtgagcatattgatgagcgaagacttcccgacattggagcgcccgatgaaggcgtattcggggagtcccgtcgtcgggcacttctccacacgactattgctgatgacgaactctgcagacttgatgaccataggctttattacgcttatctagtggctacaaagatacggctaaagaagcaaatagctacatctcggccagctacccttcagggctgacgcatcaaagtgcaagcagttggtactcaatacagcttgttagccgaacttccttgggggaagtggcgcgaagcaatggggaggtaaggataccacaatagtcgtctgcactgtggagcgatagtcgtttgtcaatctacctactgaccttgcatcagtgaatggctataactgaggatctcgtaagctctgctcttatcctgctctgtggagtctgcgagaagcaactgcaggaggagggggaaagcaagcagtactggtcactcgagtgaccagtactggttcgcgctccgaccagtactggttgatattcgtaaccagtattgcttcgattggtgagcagtactggtcgcaaaaagcctctctattagagcttggtatagagggatataagtaaggggcacgaaccgcagtcggttcgtgccccttacttgtgtgactcttcttgggagagcctgtgatagagtggcttgtgtatgccttaggctttcttcacgacctccagacgatcgccagcctgcatctgggggaggtgcaggcgaccttggtggaggagcgtcttcgtgtctaagggacggccgttgagtcggaggacgtagccacgaccttcgtcaggcagaaggagcgtgtgacgataggcgtggtgtgcctcgaggactaagcggtcgagctcgccagcagaccagctgagtgagcaggtggcattaccgatgacacgcaggccttggatgctaccagccttccatgccttgggcagtgccggcagcgggatgatgcagcccgtctcactgctgaggagcatctccatgatgcccgaagagccgccgaagttcccgtcgatctggaagggcggatgtgagctgaagaggttgggctctgtaccactgccgtagggcttattcgtcttggggtcgatggcgtcgacggggcggaggagcatgttcagcacctcataagcaccctcagcatcgcccagtcgtgcgtggaagttcaccttccagcccatggaccagctggtgctgcttgagccacgagcgatgagcgtcttcttcgcgccttcagccagctcgggcgtgctgtgtggcgtgatctcgctcccagggaagagcccgtagagatgcgatacgtggcggtggtgtggctcgacctccttgtagtcctccatccactccataatacgcccgtcagggccgagggtggtgggcttcagctggcgcagtgccgtggagaggctgtcgacgaaggtgcggtcacgaccgaggaccatcgctgcctcgcgcgtcgtggagaagagctcgcgcaggatctgattgtccatcgtcgagcctgcagctacggctacggccttgccttggggcgtgtagtagctgttctctggtgaggtcgtggggacgttgacgaggtagccgctcttgggatccttgaccagcgtcgtgaggaagaagcgtgctgctccctgcatcacggggtagatgcgctgcaggtaagcgcggtcttggctgtagcgatagtggttgtagaggtgctcacagagccaagcggcggaggtattcgtagcgccccagctgggatgctcgccaggggcggtgaactgccatacgttgccgaggacgtgcgtgacccagcccttagcacggtagaaggtgcgtgctgtacgctcgcccgagggtacgatgctctcgacccaatccgtgagcgccccgacggtctcggggagtgcgcccttctcggcaggccagtagttcatctgtaggttgatgttcaggtggtagtccccgttccaaggcgcttggatggtttcggtccatatcccctgcaggttggggggcagagcgccagggcgggtgctggagatcaggaggtagcggcccagctgcatatagagggcggccagtgctggatcgcgctcagggtgctcgtagtaagcgatgaggcggcgctggataggcagcgatgagagtgctgggtcggagccgaggaagcgcgcctgtacgcggtccatctgtgcggtgaagcgctgtacgtgctcagcgaagaggttggcttcgcccacggccttagcttggagcgtctgctcgatgctgcgtgccatgacgggtaggcgcttatcgtagtagttggtgttgtgcgcgatgtagagctcgatcgtgggggcattcactacgagtagctcatcgccacgggtgatgagcgtaccgccctgaggcaggacggggcgcacgacgatggcgtagctcatgccacgaccgcccttgccgtcggggagctgacccgagagtgtcaagaagcctgcctcggctgcggggtgcccgttctcggggcgtgagagggagaggcgcagcgtgtcacggcgggcctcttcgctgtggttcgtgaggtgtacgacctgcacctcacggccgaggacgctgtacagacgcttcgtgcgataggcttgcccgtcgacgatgaggctctccttgctgacaccttcgctgaggctcagcccacggtagtagccgctgagctcgggagccttgtcccaattgaggtgaaggaagccgccgacttggtagctgccgtagggggtgttcgctccctgtccgcgtccgctccctacgccaccgcagacgaaggtgcggtagatgaggtcttcggcttccttagcacgcccagcgaggaggagcttacggatggcggggagttgcttgtaggcctcggcgttccaagcagtggagtcgaccgagccgctccacatggaactttcgttgagggtgatcctctgatgctgtacgccaccatcggagagcatccccaggcggccattgccgagggggagcgcctccatcatgctcgtggcggggcgatcgaagaaataggtgaggctctcgcggtaagcctggtctacagaggtagtcgtcttagcccgcggtgtcgccgtcgtggggctggcgaaggcgttgcctgcgctgagggctgctgcgacgagggtgcagcgaagtagggtagtatatgccataggacttgtgcaagcgatatggaagcatcggctcccgtttgcccgcaaagataagccattcttccgcccaagcatcagtctcgcctctcagctccctcctctcggtcgttcgctggggctataaaaaggctcagcccgcatcccccgagcgtggggaatgcgggctgtaagccttatgaaacttgagggaagggttcgcttcttagatgacgccctgctcgagcattgcctgagctaccttgaggaagccagcgacgttagcacccttgacgtagttgatgtagtcaccttcacggccatgagccacgcactgctcgtggatgtcgctcatgatctggtggagcttagcatcgacttcttcgttggtccagtagaggtgcatagcgttctgggtcatttcgagaccagaggtagctacaccaccagcgttgactgccttaccaggagcgaagagcatcttcttttctacgaagtactcagcagcttcggccgtacaacccatgttcgacgtttcagctacgatggttacgccgttagcgtggagcatcttagcatcttcctcgttcatttcgttctgcgtagcgcaaggcatagcgatgtctaccttctgctcccaaggcttcttgccagcgaagaactgagcgttggggaacttcttagcgtagtcagagacgacgtcgttaccgctggagcggaggtcgagcagcgcctggaacttctcgggggtgttgataccgtctgggtcgtagacgtagccgtcaggaccagagatagtgacgaccttagcaccgagctccgtagccttctgagctacaccccaagctacgttaccgaagccagagatagctaccgtcttgcccttgaggtcgatgttgtgctgcttgcagatgtgctgtacgaagtagacagcgccgaagcccgtagattcgggacgcaggcgagagccaccgaaggtgaagcccttaccggtcatcgtacccgtgtgctcgttagcaaggcgcttgtactgaccgtacatataggcgacttcgcgaccacctacgccgatgtcccctgcgggtacgtcggtgtcagggccgatgtggcgccacagctcgcgcataaagctctggcagaaagtcatgatttcgcggtcgctcttacccttaggagagaagtcagcaccacccttaccaccgcccataggcagcgtggtgagtgcattcttgaaggtctgttcgaagccgaggaacttcaggatagagaggttgacagagggatggaagcggataccacccttgtatgggccgatagcgttgttgaactgtacgcggtagccgatgttcacatggactttacctgcatcgtcgatccaaggtacacggaaggtgatgatacggtcgggctctacgaggcgttccataatagctgccttttcgaactcggggtgctggttgtagacttcttctacagagagaagaacttccttcacagcctggaggaattccttttccccagggtgctttgcctcgagcgaggccaaaatctcagcggatttcataactgatcgatctaatagttttgcgtgtacggctcgtgtaggagccttgatttcacagcaaatatatgcaatgatttttaccttgacaaatgtagtagcttcttttaatttcttaggaaagaagcgcatctacacggcttttccgctatgtgtgaataggggtgtgaaaggcaaaatagctggtgaaaatcgtgtgttatccttcggtatcgtggcaaatcttttgctttttacttcaccctccttctccgtattcatgggcacagtataccgccctatatataatatgtatagggggaggtgaagacgacggggtggaatgcgcctaaccgcggcggaagaagcgggtggggtagagggagatgaggaaggagagcgccgtcaccgagacgaagatgacgagcatgtccagcgggcgaacatccacggggagcgccatcgcttcgataccgctaccagagcggatgatgccgaagcgtgcctgcaagaggcagagtatccagccgaggagcatgccgacgctggtccctgtgagggcgatcagtaggcccacacggcggaagacctgctgcgtgaagctgggcggtgcaccgagggcggtgaagatacggctgtcgtcttgcttctcgatgaggagcatagccagcgagctggcgacgttgaaggccgccaggaggaggatgaagaggaggatgagataggtcataaccttctccatacggatgaggtaggagaggtctgggtgctgctcttcgcggtcaagggcggtgaggcggtcgccgtagagcaccttcacctgctgcttgaagtcggaggtcttgacgcccgatcggaggtgaatgccgagagcggatacttcgctctcctcatagtcgagtacgtcctgcaggtcagccaaggggaggtagatcgcagcatccgtctcttggctcgtgggctgatactgcccgatgacccgtgcctcgaggctctggaaggacgaggcgggggctaagggattggtgaagccgaggcgcttggggaagaggacttcggcagcgggaccgttgtgctcggtgcggctgctatcctgcgggagctgaattgctgcgccgagctggatgggggtaatgggtgcaccttcggcgtctacgagggtcgtcgccgagtggagctcgggtacatcagctgcacgccccatcgggtagacggaggcaaaggccgagtccaccccgacggcatccacgacccactgctgctcccctacacgtaggagtcccttgctctccaggcgcagggcaatcgcttcggcacctgccttcgtgagcttggtgcggtagtcggggaacttcttcaggtcgaagactccgccctcggtatctctcaggacgatgtcggcatcgacctgctttgtagctccgaggatcatcgccacatagccattgtacacgccgacgacagccaccagcgccatagcgacgacagcgatggcgacggcagagagtgccgtcacgtagttcactgcatgcaggcgggtgcggctgaagaggtagcggagggctatgcggaagctgagcacgggcgaggggcggggagtgtggagatcgttacttgtcgttcagcccgaggaggctatcgatgcgctcgaggtagtcgagtgagtcatcgatgaagaaggttagctcggggagcttacgtagctgcttgcctacgcgtaggcccagatcgtagcggatggtctttgcgctggagcgaattgactcgagtagctcttcggccttctccgaggggaagatgctcaggcgtacacgagcgatgctgaggtcggggctcacggtcaccgacgtcacggtgatcagtgtgccgggcatgctctgggtctgtatgcggaagaggtcgctgacctccttttggatgagtcgattgattcggctcattcttgtattatccattctctctgtctttttgaattacgcttacaaagttagtcaaagctcgcctcatctcccgcctctacaagggcggtcggcgaaggtccgatgactgactacctatatatagtacttcattcggggtgggagagtgctcggcaaagccacttcctcgaaaagagaagatcccacttgatacgccccgagagaggagcagtatcaagtgggatcttgcctgagggactatgtgccagagggcctgcccctcctaagtcgggatcgtttggctagttgctgttagcctcgactttgtaaagttcacttgataatgactgtgaagaggtgagtgttacctccttctcgtaggtcttgaggtacttgttccctctatactgcttcacgctcgtcttcaccttgatggatgcaggggcattatcgggtctgcgtacgataataccaacatatagccccgaacccttgtgggtgaaggtcgtgcgataggactttgcgatggggtctctccactcggagttgtagatggtctgagagacgagcttgccgtcacggtagatgtcagatcccccttgggtgttggctgtgaagtggacgctgatcggagcggatgcactgatcgatacctcttgcttgaggtctgcgctgccaaagccgccgaattctccgcctggcaggtcactcttgccaccgcaagagctgagcactaaggcaaaggagaagaggagaagagataggatgccgtgtcggcgaattgattgttttgtagccattttacttgtagttgatgatgaggcggagggagggtagaccgagctatccagctccgcagtaatggttccgttaaatgaattgtacttagggaaggagtgtaagacgggcttcttctcctaccttaaccataacgagaaaatgtatggatatgttgttttatcgcggaaatatgttcgtgtataatagtatgtagtaaataaaagtaaacaatcttcgcatcgtatataccccgaattcgcggagaagcagcctcaagatagctcatttttggtgtagggaaggagggagtatggtgagccctcctgtgaggtgtaagtcgctcatagatgtggtgttgcttgctcgacagcggggaagttgctacatttgtttcagtgctacggctgatcgtagtggcctgacctctcggtctgatcacaaaaaaagaagggtgagaacctcacttaagaggccccaccctggatgttctcacaacggaataaatccttattgtgattagctttcagatttcgttactgcaaatgtagccatttttcttaatatcaacacaaccaatgcttatgagcaaacatgtacttggtcttgacctcggagtaggatcaatagggtggtgccttatcgccctcgatgcgcagggagatccagccgagatcttaggtatggggagccgtgtcgtccccttaactaaccttggagatgacaaggccttttccaagggggaggccttcacagcaaaccaaaagcggacggcgcgccgtacgatgcgccgaggctttgcccgctatcagctgcgtcgctaccgcctgcgtcgggagctggagaaggtcgggatgctccccgatgccgcactcattcagctccctctgctggagctgtgggagctccgcgagcgggcggctacagctggtcggcgcctgacgctgcccgagctggggcgtgtgctctgccacatcaatcagaagcgtgggtaccgtcacgtcaagagcgatgccgctgccatcgtcggtgatgagggcgagaagaagaagaaggactcgaatagtgcctacctcgctggcatccgtgcgaatgacgagaagctccaggccgagcacaagacggtggggcagtacttcgccgagcagctccgtcagaatcagagtgagagccccacgggcggcatcagctaccgcatcaaggatcagatcttctcccgtcagcgctacatcgatgagtacgatcagatcatggcggctcagcgcgtgcactatcccgatattcttacggacgagttcatccggatgctgcgcgatgaagtcatcttcatgcagcgcccgctgaagtcctgcaagcacctggtctcgctgtgcgagttcgagaagcaggagagggtgatgcgcgtccagcaggatgacggcaagggcggtcggcagctcgtcgagcgtaaggtcaagttcggcccgaaggtcgccccgaagtcctcgcccctcttccagctctgccgtatctatgaggcggtgaataatatccgtctgatccgtcccgatggctcgccacgcgacatcacacccgaggagcgcgacaagctcgtcgcctatctacagacctacgaagcacctaaaccacccaagaggaagcctgctaaggtaaagcctgtaaagctggctcatcccaagcttgacttagataagctcaaggaacttctctgtatcgaggaggagctacttgcagataagctcctcgaggaaggcctgaaaggagatactacgcggatagctctcagcattattctgcagccctatccgcagtatcaccacctcctcgatatggagctggagacgcgtatgatgagcgtccagctcaccgacgaagagacgggcgaagttactgagcgggaggtcgccatcgtcaccgatagctacgtccgccagcccctctatcgcctgtggcacatcctctactctatcgaggagcgtgacgcgatgcgccgtgctctcatcacccagctcggtatgaaggaggaggacctggatggtgggctcttggatcagctctatcgtctggacttcgtcaagcccggctacgggaataagtccgcgaagttcatctgcaagctcctcccccagctccagcaggggctgggctatagcgaggcgtgtgcagccgtcggctaccgccactcgaatagccccaccagcgaagagatcactgagcgcacgcttctggagaagataccgctgctgcagcgcaatgagctgcgtcagcccctcgtcgagaagatcctcaaccagatgatcaacctcgtcaatgcgctcaaggccgagtacggcatcgatgaagtccgtgtcgagctggcacgcgagctgaagatgtcccgcgaggagcgtgagcgtatggctcgaaataacaaggatcgggaggagcgtaataaagaagtcgctgcgaagatccgtgagtgtgggctttatccgacgaagcctcgcatccaaaagtacatgctgtgggaggaggctggtaaagtgtgtatgtattgtggccggacgattagcttgagccaatgtctcaatggggacgatatggaggtcgagcatatcatcccgaagtccgtcctctatgatgactcctatggtaataagacctgtgcctgccacgaatgtaatcagacgaagggcaatcgcaccgctctcgagtacatccgagcagagggtagggaagccgagtatatgaagcgcatcaatgacctactaaaggagaagaagatttcctacagcaagcaccagcgtctgcgctggctgaaggaagatatcccctccgacttcctcgagcgccagctacgtctgacgcagtacatctctcgccaagctatggctatcctccagcagggtatccgccgtgtctctgcgagcgagggtggagtgactgcccggcttcgtagcctctggggttatggtaagatcctccatacgctcaacctcgatcgctacgactcgatgggcgagaccgagcgcgtatctcgggaaggtgaggcgaccgaggagcttcgcatcacaaattggtcgaagcgcatggaccaccgccaccacgctatcgatgctctcgtcgtggcatgtactcgtcagagttacattcagcgactcaaccgcttaagctctgagtttgggcgggaggataagaagaaggaagatcaggaagcccaggagcagcaggcgacggagaccggtaggctctctaacctagagcgctggctgacccagcgtcctcacttctcggtgcggaccgtcagcgataaggtcgccgagatcctcatctcctaccgcccagggaagcgtgtcgtcacccgcggacgtaatatctacctccgtcacgggaagaagtgcgtgcagtcggggctcttagtgccccgtggtccgctctcgaaggagacggtctatgggcagatcacggtcaatggggagcagcagatcgtctgtaagtatgacctccatagcctcaaggctaaggatgtagactacgtcgttgacttggctctgaggaagcgtctgaaggagcttctcgcacagcacggaggcaaggagaaggaagcctttgcgggagatgtgtacatggatgaagcgggtacgcaaggtcccatccgtagtgtgcgctgcttcactgggctggatcgggataagatgaaggcggtgaagtacgatgagcagggcgacgctgttggatttgtctcgcctcgcaataatcatcatctggcgatctatcgtactcctaagggcaagctcgaagagtctattgtgaccttctgggacgctgtagaccgtgcgcgctatggcatccccttagtcatcacgcatccgcgtgaggtcatggagcaagtcctacagcgggaagatattccagagtcggtactgagcttgctcccatcttccgactggatatttgttgagtccatacagagggatgagatggtgttggtaggtttgtctgatgaggagattcggcaagccgttgaagcacaagactattgcaaactcagtgagcatctttaccgagtgcagaagatcgctacagggaattatatggttagatatcatctagagacagatacagatatgaataggtcggggcgtatccctaagctttatcagcttagcttaacatcttatgaagagaagaacgtacgcaaggttcgtgtcgatcttctcggacgtatctctctgctctgatgctcccctgctaccatgatgaagcgaacgatctatatcggcaatcctgcctacctctctctgcgcctcaagcagatggaggtgcggcagccgtcggatgatcgtgagacgacggtacggacgatcccgatagaggatatcggggtcgtcctcctcgaccacccacagatcacgatcacccacaccctcttaggggctttgctcgagaataattgcgctgtcgtgacctgctcggcgacgcacatgccttcgggactgctcctcccgctggacggacatacgctccagaccgagcgcttccgagcgcagctcgatgcttcgctccccctgagaaagcagctctggcagcagaccgtgcaggcgaagatcctcaaccaagcccatgctctgcataccgtcttgggagagccagcgaagaatatgctcgcctggtcccgccaggtcaagagcggggatgcagacaatctcgaggcacgggctgcggccttctattggcgcaacctcttcatctcccttccgggcttcgtgcgggagcgagaggaggctgccccgaattcgctcctgaactacggctatgccatccttagagctatcatcgcacgggccctcgtcagctgtggcctcctcccgacactcggcatccatcaccacaataagtataatgcctattgcttggcggacgatatcatggagccctaccgcccctatgtggacctgctcgtcgtggagatctgtgaggagcagggcttccctacggagctgacgaaggagatcaaggcacgactactcgcccttccgacgctggatgtggagattgagggacagcgacgcccgctgatgctggctgcgacgcagacggcgacctcgctcctgcgttgcttcacgggtgaggcccgccgcttggcttaccctctcttgtcatgcgagccaagcgactaagtgaataccgcatcatgtgggtctttgtcttctttgatctgcctacgggtacgcctaaggagcgcaaggcggctaccagcttccgccaagagctgctgaaggatggcttcacgatgtttcagtactccatctatatgcgccattgtgcgagtatggagcaggcgcagacgcatttgcggcgggtcaaggcgatgcttcccgatgagggcgaggtggtgatcatgacgcttaccgacaagcagtttggtatgatggagcatttctcttcgcgtaagcctactgatgctgttcagcttccaggcctcttcgatatgctgtgagatcttagatcggaaaagtcgctacgtaaaggaaaagcccgtggatatccacgggcttttctctttctaaatccttccactaagtgcttgttgcatagactcctctgcaggatccgctgtattagctactgtgaaagtacgaaatctgaaagctaatcacagcaagtttctgctacccgagctcggaggataggctgtattagctactgtgaaagtacgaaatctgaaagctaatcacagctgatttgacttatgaaacattctctatccggctgtattagctactgtgaaagtacgaaatctgaaagctaatcacagcattttactgctacattatgctaccctgcttgctgtattagctactgtgaaagtacgaaatctgaaagctaatcacagcgggctctgggaaaaggaattattgcagaggctgtattagctactgtgaaagtacgaaatctgaaagctaatcacagctatcccatttaagattatcgtttcactcatgctgtattagctactgtgaaagtacgaaatctgaaagctaatcacagcaccagggcgagggatcgccctggtagtagggctgtattagctactgtgaaagtacgaaatctgaaagctaatcacagcaacttcaagaaaatcaacttcaaggacaaggctgtattagctactgtgaaagtacgaaatctgaaagctaatcacagctctatcgcacgctgtctgtcgtctgcggctgctgtattagctactgtgaaagtacgaaatctgaaagctaatcacagcgcctttacaaggaatacctctgaatctgacgctgtattagctactgtgaaagtacgaaatctgaaagctaatcacagccgcggggtcaaagaaattgaccacttgggggctgtattagctactgtgaaagtacgaaatctgaaagctaatcacagcaaaggctctcgagatattggtcgcatttgtgctgtattagctactgtgaaagtacgaaatctgaaagctaatcacagccgacgagtcatctatcttatcaggacctctgctgtattagctactgtgaaagtacgaaatctgaaagctaatcacagcctctatccttgtcaagacggagcaggggctggctgtattagctactgtgaaagtacgaaatctgaaagctaatcacagcaagcggtcggtaagggtggcactggacgaggctgtattagctactgtgaaagtacgaaatctgaaagctaatcacagctgggtcatgattctagcaatacgcgtacatgctgtattagctactgtgaaagtacgaaatctgaaagctgatcacagcggaaatggtcatttatacgatagttttgaagctgtattagcaagtatgaaggtacgaaatctgaaagctaatcacagccgctcaataatgaggggctgagggtgtcatgctgtattagcaagtatgaaggtacgaaatctgaaagctaatcacagccggttatgatagatataactttggtggctagctgtattagcaagtatgaaggtacgaaatctgaaaactaatcacaacaaggtagcctgcatgttctcgttctttacagctgtattagcaagtatgaaggtacggaatctgaaagctaatcacaacagagacttgtttactactgcacatctggtagttatggtaatggattgttggtccgcatagggataaaaattgcggacgagtggcagaaaagtttgggctacgtacgtggctctaatatctaagtacgtggatatttggattgacgtacctggtctttaagactacgtgcatagatagaataataccactacgggaagacgcttttttcttcacaagaacgatgcttttccctccgctgaataagaggaatactcgcgataaggcgcagggcttgtgtatcacttcggaggggcataatcgtgtaaaccacttctgtcttcccggctgggtattgcttgccaatcggacggtgtgtgaagtagtaatagagggggcagagttgctgtaatagttgtttgcgctcggttcagtagtggtttcatatacgaactactattagttcgtaggcgaaacgaatagttatttgacccccaaacgagtagtcgtttgagtgcagaccaatagtcgtttggaaatcgactttgcctcaatattgcttccgtataaggatggggctttgatctcattgattaggtgtcctaaacttatactatctttgcgatggtgaggtactccgataggggacgtcgccccgattagacctcatccctcgtataagctgggatgaggtctaatttcatatactcactccttgaactacagttggggttagaggctcatagcctactgcccctaccgatgatcttgctgggatctgcaagcgtccatcggtagggggcatttctgtttttaggaggatggcgcgagaaaagtgaagggatggggtgctgggtggtagtggcttgtattcgagtttgttatcaaggtacttcgttggacgagttgaggagggtgatgtgaagctatataggtcgctgggttgacctatatagcttcgcttcatgacctatattggtcacgctgccgacctatataggttgactcgctgaccaatataaggttggtggtgctttcttatcgtgggatagatgctatccgcatgctgagcctgtggtatgtgcagcgagggaaaagagaatggagccacggatgactccgtgactccaccatgaagtgtcacccagagaccagcggagcttgatagaatcgcacttatagtttgctggcgtgctgacaatacaaagataatccttaactttgcactgcgaggtactccgaataggggacgtcgctccgattagccctatcctctgtccagagcatagggctaatccttatagtagaagccccactcaagtcgagtggggcttgctgcaaaaagcgaacgtacggagcttgaagtgatcgcgccataggtaatacgatcgcttcgctggacgcagagatagtttgtctgttccttgtctcaccttctgtccccttgccgtgtcgtagactaaaccgctgaagtgaaggggcttgaaggactggggtgcgctcgctgatagctccccttgatggcaggctttgtgttctcagactctgcagagttgcgggcaagtggaagaagcgtttgcgtatatgaagaagttgtattacctttgcaaccgcaacaaagaaggtggcaatactcttccttagctcagtcggttagagcatctgactgttaatcagagggtccttggttcaagtccaagaggaagagcttctcccgagtatgggcgtggtgaataagcctcttctgacgctgcattaagtactcttccttagctcagtcggttagagcatctgactgttaatcagagggtccttggttcaagtccaagaggaagagcttagagaaggaattagattcagggagataccctcaggttcaattacgagaacttgggggtatttccttttatgtccccccgtagagtgggacgaaggctatataacgacagcgcccctgctcaccgatggtgggcaggggcgcttgtcatataggggagtgggacttagagcccgtgttcgccgaggtagcgctcagcttcgatagccgccttacagcctgaggctgcagcggtgactgcctgacgatagagggggtctgcgacgtcgccagcagcgaagacgccagggacgcaggtgcgtggcgtaggcccttcggtcttgatgtagcccacctcatcgacctcgacgtagtcagcgaagagctcggagttggggtggtgaccgatagcgaggaagaagccatcgatgggcaggtctacgcgctcttcatcgggctggccgaggcgcttgacgagatgtgcgccttcgacgccatcttcaccgtagaggcccacggtattgtgctcgtagaggacggtgatcttctcgttggatgcgacgcgctgacgcatgatgtcagaggcgcggaggtagtccttacgcacgatcatgtagacgtgcgaggcgaggctcgccaggtagagtgcttcttcgcaggccgtgtcaccgccaccgacgacagccaccttcttattgcggtagaagaagccgtcacaggtagcacaggccgagacgcccatacctgcgtacttctcttcgtcgggcaggccgaggtacttagcggaagcacccgtagcgatgatgaccgtatcggcttcgacctcgacaccttcctcgaaggtgatgacgtagggagccttagagagatcagccttcgtcgccagaccagagcggatctccgtaccgaagcgcagagcctgattgcggaggtcctgggtgagcgctgggccggtgacaccctcgggataaccagggaagttctctacatccgtggtctgcgtgagctgtcctccaggctggatgccttcgtagaggagtggggagaggttggcacgtgaggcatagatggctgcagtgtagccagcggggccggagccgatgatgaggcagcggcgatgttctctactcatacttgcgtagtctatatgtgatggtgatagaaataggggcgagtcttagcgcatgtcgcggagcttcttctggagctcttggcgagcgaagaagatgcggctcttgaccgtgccgagggggatgccgagggtatcggcgatctcgttgtacttatacccagcgacaaacatggagaaaggctccttgagtgaaggctgcagctcagcgatagcacccgtgatctccttgatatccatggagccctcgggggtgttgtgcccgccttcgctaagcagaggtacgttgtaagcgtcgacgttggggtcgatgaagctctgcgtgcgcacgagcttgtggtagttgttgatgaagatattacgcatgatcttcagcacccaccccttgaagttgacgttgtcgacgaacttatcgtagttgtttaggacgcgcagcgtagtgtcttgcgtcaggtcttctgcatcggcttcgtccttcgtcagcgtacgcgcgaagttcttcatatagtcctgcatgccgatcaggtccttctgtatctgtaatacgtccatgtctgtaatgctctattttgtatagtgaggcggtgcgccgaggggcaatgtggcgagccgtttaatatcttttttacaaagatactattaattcttccgcagaaagcacgggactttatataggtatattgatatactcaatatagagcgcatcaccagcggatgggtgccttgccccactgggtgaggtaggcattcgtctggctgaagtgacggcatccgaagaagccacgatgggctgagagcggggagggatgtggagcttcgagtacgagatggcgggtgcgatcgatcatacttcccttgcgtcgggcagggcttccccagaggaggaagacgacgtggtcacagctgcggttgatcgtctcgatgatagcatcggtgaaggtctcccagccgaggccctgatggctcgctgccataccggcacggacggtgagggtggtgttgaggaggaggactccctgctccgcccacggcaggaggtgcccgtcagggatgatcgagggctggccgaggtcggaggcgatctccttcttgatgttgatcaggctcggaggtatggggacgcccgctggcacggagaaggctaagccctcggcttgccctgcaccgtggtaggggtcttggcctaagatgacgacgcgcactgcagggagggggcaggcgtcgagggcacggaagatgagccctccagggggatagatagggccttcgtgctggtaggcctggcggatgcgatcggtgaggatgctgaagtagagcttgtcgaactcaggcgcaagggcggtacgccagctctcgtcgaggcggatgttcatcgtgtagtcgggaagaggggtgggaggtctgcggagaggatctgatggacgaggccacgcaggtctccgtgctgtgcggtgtagaagagggcatgccctacggcggcgagggcgtcgaggtcattggcaccatcgcccgtatagagtgtcgaggcgagcgcccctgcagtccactcctcgaggaaggcacgcttgccctcggcatcaatgatagcctcgggatcaagtccatcgaattcgccgtcagcggtatagcgtacggcgctccctacaaaggcggagagaccgactcgctcacagatatcttcgacgaagggctggtaagctcccgtgacgatagccgtggggagggagagctcgcggaggagaagcgtggtgtcagtggggagggtgatgcttcggatgaccgagtgaagcgccttacgggatagcccacgaaggagctcagtgcggtgtatgaagctctcacggaagggtgtggcgcctgccatagccgcttcggtgagggcggtcatctcctccgagcgacctgagagacgtgccagctcgggcagcagctccgtcgtcgtgagcgtgccgtcgaggtcgaaggcgacgtgcgtgatctcagctgtggcactcgtggcgggaaggtagaaggcgctgtgtgtggtgcgcccccaagggatgagccgtgtgagaagctcacggcgtagctccgtctcgctcatgcttcgctccgtagagtagctgtagagtctgccctgtggggtgtccgtgatacttaccttcggtgtagcgcctatcgtctcagagaggagggctctgagctgctggtcctctccgtccgtagggcgagagaagagatagaggtgctgcacgtggggcatcgaggcggcgtgagggtatgtgtatatataaaagcaagagtgcttgacttcgataagccaagcactcttcagttttgggggtggaagatgggattcgaacccacgacacctggaaccacaatccagtgctctaaccaactgagctacaaccaccatgtaaatgctctgctttccgcttgagcactgcaaaggtaatactactttctcaattcaccaaacctaccgctcaatggcggcttcgaggtcgtgccatagccgttcgtcgggtacgggagccgtgagggtgagggcttccttgctcacggggtgtgtgaaggatatctgtctggaaagtaggctgatactcccgccagggttgctgcgaggtgcgccgtacttcaggtcgcccttgatggggcagccgagggcagcgagctggcaacggatctgatgatgacggcccgtgtggagctcgatctcgaggagatgatagtgttcgcccgaggccagtaggcggtaggagagtcgggcgagcttggcgccaggcgtcgcagcgccttggcgagccacgtagctcttgttctgcgactcattgcgcacgaggtactgctcgagggtgtcggagtgcttcggcgggagggcggtgacgacggcccagtagcgcttcgagacgtctcccgtgcggaagagctcgttcatacggctgagtgccttcgacgtcttggcgaagaggacgagaccacccacgggtcggtccaagcgatggatcacgccgaggtacacgttgcctggcttgttgtacttctccttgagccaacccttgagggcttcgctcatcggctcatcgcccgtcttgtcaccctggacgatttcgccggggcgcttgctgacgcagaggaggtggttgtcttcgtagacgacggtaggcttatacatacggggatatggggaggggagacttagtccccgatgaaggtgcagttgagtacctcgcggtagctattgaagatcgcgctcttgctgatgaagccgaggtagcgcccttcctcatcgacgacgggcatcttccacgccttcgtctcgtcgaagaggcgcatgacctccgtcatcggggtagctgaggagaccttgacctcgggagtgaccatgatcttacgcactttgtagcggtcgtagagttcggggcggaacataatgttgcgcacattatccagctcgacgatgccgacgagcatgccgcgctcatcgaccacggggaaggagttgcggtggctcactgagatgacgctgaccatctcaccgagggtcatgtcgggggagacgacttcgaagtcgcgctccagcacgctctcgagattcatcagcgtcagtacggccgtatccttctgatgcgtgaggagcttgccctgctctgccaagcggagcgagtagatactgtggggcataaagatacggatcgtggcgaaggaggtcagcgacacgagcatcagtggcaggaagaggttgtacccgcccgagagctctgcgatgaggaagacacccgtcagtggggcgtgcatcacgccagccatcagccctgccataccgagcaggatgtagttcttaggggagatgaagacgttgagcgaactgaagtagttcaccagataggagaagatgaagcccgtgagcccgcccataaagagggtaggagcgaagagcccgccacagccaccgcccgagttcgtcgctacggaggcgaagaccttgaagaggacggtcaggaggaagaaggtgaagacgacccagtaggagttcgagaacgcctcgaagatactcccatcgaggagctgcgtgtactgcccatccaagaggatattcaccgagtcatatccttcgccatagagcggagggaagacgaagatgagcagggagaggatagctgccgagatgaggtagcgcaggcggatgtcct

SEQ ID NO: 3304 - DNA, 23597 bp, synthetic construct
  source 1..23597: mol_type = other DNA
  misc_feature 1..23597: note = Synthetic
ctctatcctagccctcagtcccgaagagcgtgcgggtaaggtcggtcgagtacgtgagctctacgacgaagccggcacacgtgcctacgccgaagcagaagtccagcgcctcacggacaaggccttctccctcatcgatcagatggagctccgtgacgaaggacgttcactactcttagccctcttccatacgctctcgggccgaaccaagtgatgatgacacagctgatcgatagccacacgcatatctatgcggaggagttcgacgaggacttctcagcgatgcttcagcgagccgaagaggcgggcgtgtcgcagatggtcctcccctgtgtagacagggagagttggccactgatccagtcactcagtgaggcttatccccagcgcctcttcccgaccattggcctccacccgacttacgtcaaggaggactacgaggcacagctctcctatctggagcagcacctcggagagggtatcgtagctatcggagagatcggactcgactactattgggatacgaccttccgaagcgaacagctcaaggccttcgagaagcaagttcgctgggcacaccagctcgggctccccgtgatcctgcatgtacgggaggctttcagggatacctttgaccttcttcgttcgctccagctcccgggactccgtggagtcttccacagcttcacgggtagtcgggaggagctacaggaagcgctgtccttcgagcacttctacatcgggatcaatggtgtcgtgaccttcaagaatagttcgctcaaggagtacgtcgccgacatccccctcgaccgactcgtcgtggagacagatgctccttatctagcgcctgtccccaagcgaggccgacgcaatgagcctgccttcctcccctacacagcgagctttgtcgcttcttgctaccagatctccgacgaagagctctcagcccgtacgagcgagaatgcccgccgactctttgccctccctccacgctaggcgctggccttatctgaagtacatgccgaagaagaaggacggacaaaccaactaggacgtaagcgcccacgaaactctctacaggctaattatcactactatgctttctatagattcgctcatcaagcaaacacgcacttatcgtcgcttcgacgagtccgtagctatcgaccgcctacagatcgtccgctggcttgacatagtccgtcagaccccttcggcacgcaatgcccagcctctgaagtatatcatcatcaccgataccgagctctgccacgagatcaccgctaagcagcactgggcctctatgctccccgagtgggacggaccaagtgtaggggagcgtcctcgtgcttacctcctgcagatcctggatacagacatcgcacccgcagctcgcttcgacgagggtattcagcttcaggcgctggggctccttgcgacagaagctggctacggcacgtgtatcttcggcgggcatggcaaggccgaactctcccgtcgccttggcctaccgacccacctctcgatcaatgctatcatcgctatcggtaagccccgagaggaagtggtactcgaagaggctcgtaacccagaggatgtccgctactggcgtgacaaggagggacgtcaccacgtacctaagcgccccttgagtgagctgatcatcgagcccaacaagccctctatcttctagacttactgcctgctggagagccgactttgcctgtcgggagatagaccttcgcctttagagggctgaagcttttgccccgagtgatagaagcctttccctagagacaagtctacttaccctacgagacgaagcgacgtctttcgcaggtccttcggcatccagcacaaacgatcttatccccctatccttatcccatttccccatacattcatgaaggcgatcccctcccttttctccatcctcgtgcttatgctactcctctcctctgccagctgtgggggcgctacgaggcaagcacagagtgcggacagcatcagtgagcccagccgtaccgctgctcccttcgacgcagacactgccctacgatacatcagagagcaggtagcattcggcgtccgcactccaggaagcgaaggacacaaggcttgtgcttcttggatcgagtccaagctccgtgactggggctatacggtgacgctccagcacttcactgggaaggattacttcggcaaggaagtacaggggacaaacatcatcgctaccctccagcccgagcacgaggagcgcatcctactgatggcccattgggatacccgtcaggtagcggatcacgatcccgtagctagccgacagcaggagccgatcctcggtgccgacgacggcgctagtggcgtagctgtcctcctcgagctcgctcggcaggaagcgctcaagccttcgggtaaggccctggacttcgtattcttcgacctcgaagatggtggcggaagccaaagtgaagactcctggtgcctcggctctcaatattgggccaagcacccccaccgaccaggctactccgctcagtgggggatcctgctggatatggtcggtgctcatggcgcccgcttctattgggaggggctgtctaaggagtatgcacgcccactcctcgccacactctggcagacagcagcacagctcggctggggcaattactttgtccaagccaatggatcacagatgaccgatgaccacgtcgccgtagtacgtgagctcggtattccttcggtcgacatcatcaacttcgaccccacacgccccacgggcttcggtgcgcactggcacactacggccgacgacatgaacatcatctctcgggagacgcttcgagctgtcggagagacagtcgccacgacggtccgtgaggatctctaattcgtgcgaacctcttattcgctatcattccttcatgcctacaatcaacgaactacaagacgagatcatcgaggaattctcagccctcgatgattggatggatcgctatgcactgatcatcgacctcgggaataccttagagcccctgcctgagagcgacaagacaccgaccaacatcatcgaagggtgccagagtcgtgtatggatcaccgcctccttcgacggggagcatatccacttccgtggcgagagtgacgcactcatcgtcaaggggatcgtcagcctcctactacgtgtcctcgacggacagacgcctcaggacatcctcgcctccgacctctacttcatcgagcgtataggactggccgagcatctctcccccactcgctccaatgggctcgtgtcgatgctccgtcagatgcgactcttcgcagcagccttcgcaagtaaaagctaagtcttatcaatccccttatgcatatctatcatcagttactgaggtcagcggtagtgacctcagcagcccttgttgtagctactgcgctcgtcacctcctgttcgtccaagaccgttggtggtggaagtgacgatcagcttctcagcttcgtcgaccccttcataggtacgggcgagcacgggcacaccttccctggggctacacgtcccaatgcgctggtccaattcagccccgacacccacctcatcggatgggatgccagcagtggctatcatgcttctgacagcgtgatctatgccttcagcctcacccatctctcggggacgggtatcggagaccttggagatgtcgccctccttcccttctctggagcggatagtctcaagcccgtcgctaccttcgacaaggctacggaggtagccactcctggctattacgccgtccagctacagaacttcgggatcaaggccgaactcaccagcaccgatcgtgtcggactccttcgtgccacctatgccgatagcaccgaccgcaagctccttcttgacctcgggcatatcctgcagcccaactgggggcataaggtaatgggcaatgacttccgcctcgtcaacgactccacgatccaagggacgtactataccaagggctgggctgagcatcatcagctgagctacacgatccgtctagcttcgcccgtcgacagcatcgccctctatcgggatggcaagcgtgagctcatccagccgggctatgcggtgaccaaggacacagctgacctcaagcttcacctctatctccctgcaggaagcgaagcctatcaagtaaagatcggcgtctctgccgtctcacccgaaggtgctgagaagaacctcacggccgaacttcctcactgggacttcgacgctgtacatcaggagagccgacgtatctggtccgaagtcctctctcgcatcacgatcgagacgaaggatacgaccgtcctcaagaacttctacacggccgtctaccacgcacacatcgcaccctacaactatcaggacgtagatggcgccttccgtggcatggacaagcagatccaccaaggtgatccgaaggacggacattatactgtcttctccatctgggatacgtaccgtgcgctacatccactactgacgatcatcgatcctgaccaggcactccgctacggtagaagcttagtccaggactaccaagaggggacgatcctcccccgctggccacttgcggcgaactatacgggctgtatgcctgcctaccattcggtgagcatcctggctgacctcgtagccaaggggctagcttcgaaggaagaccttcgtctctggacggaagctgccgtacgtagttccatttaccgagaagacctagcgaagaagttcgccggtactcgtgagctggacctcatcacccgtcatccatattacaaggagctactaggcttcgtacccgccgactccgtgcccgagagcgttagctggggcgtagagatggcctacgatgactggtgtatcgcccgtctagcagaggcagcggggctcgactctatccgtcaagtctacgacaagaaggcgctctactaccagcgctattgggatcacgagaccaagttaatgcgtcccgtgatggccgatggcaagttccggacgcccttcaatccacgcttctctgcccacgagaagagtgattacaccgagggtaatgcttatcagtggagcttctatgcgcctcatgacatggagggcttcctcaaactcataggtgggaaggccgtacttgagcagaaccttgatacgctcttcaccacctcgtcacgtatcgacggagcagagcaatcaggtgatatcactggcctcatcgggcagtacgctcacggcaatgagcccagccaccatatcgcttacctctacaactacaccgcttcgccacacaaggggcaagcgctcctagacaccgtccttcgccacttctacaagcccacgcctgatggcatcatcggcaacgaagactgtgggcagatgtcggcgtggtatatcctcagcgccctcggcttctaccaagtctgccccgggaaggctgagtataccatcggtcgtccgctcgtagataaggcgactattcgcctgaagagtggcacctttaccatcgaagtcaagggcaattctcccgccaataagtacgtgcagtcggcgaagatcaacggccgagatatcaccggtacgctgaccttctcccacgctgatctccgtgctggtggcacacttgagatcgtgatgtccgacaagcctcgcaagtaaggtaagactacccttctccaccacacgagcgctagctactccgtgcagggactttgtccttcggagagctagcgctcgctcgtttattctgatgccttagcacccaaggtcaccgtattcaccttctctcctactcgtcagtcctccatcctcattcctcgacgaaagatctatggcaaggaaaaatctccattcataacctgtaatagaagccttcatactgggtaaaatccgaggtctttaccagtaatgaaggctggtacagcagggagcgaagacgcccacccattaggcatcgggaaggagtatcagggatattcctgaaaaaattaaataacccgttctggtttacactaatttatcttatctttgttgcacagaacgataagagtatcaactataaatacctaaataaaatggttagttacaaggaactcggcttggtcaacactcgtgagatgttcgccaaggctgtcaagggtggctatgctatccccgcattcaacttcaacaacatggagcagctccaggctatcatcggtgctgccgtagaaacgaagtcccccgtcatcctccaggtctccagcggtgctcgcaagtatgcgaaccagacactccttcgctacatggctcagggtgctgtcgaatacgctaaggaactgggttgccctaacccacagatcgcccttcacctcgaccatggtgatagcctcgagctctgcaagagctgtatcgagatgggcttctcttctgtgatgatcgacggctcacacctgccttatgacgagaacgtagcactgactcgctcggtagtcgaatatgctcatcagttcgatgtcacggtagaaggtgaactcggtgtcctcgcaggtatcgaagatgatgtcgtagctgagcaccacacctacaccgaacctgaagaagtcatcgacttcgtcagcaagacgggtgtagactctctggctatctctatcggtacgtctcacggggctaacaagttcactcctgagcagtgccaccgtgatgctaacggcatcctcgtacctccccccctccgcttcgatatccttgcagagatcgaaaagcagatcccaggcttccccatcgtccttcacggctcctctagcgtacctcaggacgaagtcgctaccatcaaccagtacggtggtgccctcaaggatgctgtcggtattcctgaagagcagctccgtcaggcttctaagagcgctgtctgcaagatcaacatcgactccgatggtcgtctagctatgaccgctgctatccgcaaggtcttcgctaccaaccctgcggagttcgacccacgtaagtacctcggtccagcacgtgaatcgctcaagaagctctacatgcacaagatcgagaacgtactcggctccaacaaccgtctctaagagacagctagctcaccgatcgccctacaactagggccgagacagtgctaatacgacaagaggctacctgccctcccgtaccctcgtgtgggtgggagtcaggtagcctctctcttttcactctaccgatagatcatatatatgcaccgcctcttcacgctccgtgagcatgatcacggagcttatcccttcgaccaagtcgaggtggcggacttccgtcctgccttcgccgaagctattgctgagaagcgtagtgagatcgaggccatcatccagcagaccgatgcgcctaccttcgccaataccatcgtagcgcttgagcgaagtggagctaagctcgaatggctctctggtatcttctacaacctcctccacgccgaagctaccgacgaactgatggagatcagtcaggagctcagccctgagctctctgccctctcctcgtacatcctcctctccaaagggctattcgctcgtatccgctccgtctgggaggagcgggatcagctgaagctagacctcgaggatgcccgcctcctgcagcgtacctacgaaagcttcagcgagagtggcgctctcctacccgaggataagaaggagcgcctccgtgaggtgaagcgccagctcagcgaactagccctcaccttcggacaaaataacctcaaggagcaagcacgcttccgactctgggtcgaggacgatgcccaagtaaccggactccctgagtcggcactcggcgtagcacgtgagctagcgaagaaggaagataagccccatggctacctcttcacccttgcagccccgagcttcttccccttcatgcagcactgccctgacgctagtcttcgagaggagatgtaccgagcgaagatgagcctgggtgcagtggagggcgagtttgacaatagagatgtcatccgtcgccttgccaacctccgtctggagctcgcccaactcctcgggcatacgacctttgcctcgaaggtcctcaccaagcgcatggcgggctctcccgaagctgtctaccgtctgctggacgaactcctagaggcttacctccccgtagcgaaggaagagctcgctaaggtagaggccttcgcccgtgaagcaggtgagaccaaggccctacagccctgggactggagctactgggccgagcagtataagaaggccttctacgagctggatgaagaggagctccgcccttacttcgagctctctcgggtctccacggcgatcttctccctcgctacccgtctctacggcatccacttcagtgagcgcaccgacctgcctgtctatcatcccgacgtacatacctacgaggtgcaggatcgggacggctcttaccttggcctgctgtacacagacttctaccctcgtgaagggaagcagagtggcgcttggatgaataacctccaggagcagtaccacaccgcctcgggcgaagaccaccgtccgcacatcgtcctcgtgatgaacttcacccagcccgtcggcgatcgtccagcgctactgactccgggggaagtgcgcaccttcttacatgagttcggccacgctctgcacggcatgctcgcccaggctcgctacagctcactcagcgggacaaacgtcgtccgggacttcgtagagctacccagccaattgatggagaactggctagaccaacgggaatggctccagagcttcgcccagcactaccagacggcagaggctctcccggactccctcatcgagcgaatggagcgtgcccgtcacttcctcgtaggctatgcagcctgtcgtcagctgagctttggctatctcgacatggcttggcacacgatcacagagcccctcccagaaggacttgacacgaaggacttcgaagagaaggcttgggctaaggccgtacttcttcccgcttcaccagccccctgtcagatgagtactgccttcggacacatcttctccggaggctacagcgccggctactacggctacaagtgggcggaggtactcgatgcggatgccttcgccgccttccagcaggaagggatcttctcgagcaagacagcccagcgcttccgtgactgtatcctcacccaaggtgaccgagaggatgctgaagttctctacgagcgcttccgtgggcaagccccctcgatcgaagcccttcttcgcagggacggcatcgagcgtcgctagcctcacattcgaccgagccccagcgtcacggaccgccgtgacgctggggcttacttgtatctaaggttcagggctaattccaaaggatttacccacacattctaagctggccaactcccccttctaaatagcctcctccgagaccctaaagaacgacctacagtaggttttatttgcgatccaccgtagatccctttttaggggtgccagagaccgcttgttatgcgggctggagagaggtgctccagctaggtgtgcgtctgtttgattttgggcgtttgatctcctaggggagtatgcctgaggtgcggggggatgatgggggtgtcgttctcttgaacttcaacttctacatgggctccgagagtagtatccctgtacataattatatcggacgagtcgaggcaagctccttcggagagctgcttgatctatcggttctcttagctgccgaaagacctcagggtgtaagttttttgtcttgtgctgggagatgggaaataaaatgtggagagaggagttgtattaggttgtttctccgtgtagaagtcactaacttcgtgagcagagctacttatcgtagtcgtctgatgatcgggcaaaaagaagacgagctccccgaaggaagcccgccttagatgttttcacaacggataatccttattgtgattagctttcaaattcagtactacaaagttagcttaaagatttaacctatacaacacaaacgcttatgagtaagcatgtacttggtctcgacctcggtgtcggatctatagggtggtgtcttatcgccctcgatgagcaggatcagcctgctgagatcttaggtatggggagtcgcatcgtacccctgacgacggatgatctcaatgaattctcccaagggaaggcgatctccaagaaccagaagcgcaccacacagcgcaccattcgcaagggactggaccgctatcaactgcgacgcaaaatccttagtgagaagctggcagagcatgggatgctcccagacaaagatctaatgcaactcccagtccttgacctctgggagcttcgtgcacgagccgcttcaccaggggagaagctgtccctcccagagataggtcgtgtactctaccatatcaatcagaaaagaggctataagcacgcaaagtccgatgaagccgaagaagcaactaagcgaggaaaggagaagggctatgtcgccacagtgaagggacgctatgcagagcttcagcgggaaggggctaccgtcggacagcactttgcctgcaaactcaaagagcacaggcaggagagcccttcgggtggattcttctataactaccgcatcaaggatcaggtctatccacgggaagcctatatcgaggagtttgatcgcatcatggaggtgcagtcagtcttttatcccgaggtcctgacccctgcgtttatccaagagctacgggataaggtcatcttcttccagcgaccactgaagtcctgtaagggactagtgtccttctgtgagtttgagaagcaagagcgtgtcgtccagctcaagcgggtcaacagggaaggcaaggaagagctccaagagcggaagatcacgatcggccccaaggtcgcaccgaagagttctccaatagctcagctctgcaagctctgggagtctattcataatatacgtatctactatcccgaagggaaggagaggccgatcactctggaggagaagcagaagctcttagcttatctgcagacgcatgacaagctgaccttcaccgctctcaagaaggagctgaagatctcagacagggagcgactctggtgcgataaactattgaaaggaggcatcaagggcgatacgacacgggtactcctgcgcaaggctctggcgggatataaaaggtatgaacccctccttcggatggacttggagctacgagacttccaggagatagtctcaggtaagcggcttatccgtccgattgtcgacgagagctacctcagccagcctctctaccgactatggcatattctctactccatagaggagcgagaggcgatgcgtagagcccttatcgatcagcttggtttcctagaggaggacctagatggaggactgctggacaagctctatcagattgactttgccaagcagggctacagcaataagtcggcgaagttcatctgtaagctcctgccccatctgcaggaggatcatgggtatagtgaggcctgtgagctagcggggaaacgccattcagcaagtagtctgactaaggaggagctggaggagcgcccactcctagagcacatccccttgctccagcgcaatgaacttcgacagcctatcgtggagaagatcctcaatcagatgatcaacctcgtcaatgcccttcgccagaagtatggatcgatagatgaagtgcgtgtcgagctcgcccgtgagctgaagatgagccgtgaggagcgagaggagacctctaggaggatccgagccagagagaaggagaacaaagagatagcagagcgtatcaaagagtacgaactctatccgacgaagtcccgaattcagaagtatcgtctctggcaggaagccggggagcaatgcctctattgtggcaggtcgatcgatgtcgtgcagttcctcagaggtgatggagtcgagatcgagcatattatccctaagtccattctctatgatgactcctctgccaataagacctgtgcttgtagccgatgcaataaggacaaaggcaataggacagcctatgagtacatcctcgctgagggacgagaggccgagtatctagatcgtctcgagactctctttcatgatggtaagctctcctatagcaagcgtcgtcgtcttcagtggaagaaagcggatatccctgcagacttcatcgagcgccagcttcgtctgacgcagtatatcgctcggcaggcgcaggagatcctccgccaggggattcgtcgggtcggtgcctctgaggggagcgtgacggccaagctccgtcatctctgggaatatgatgatatcctacgggatctcaacttcgagcgctaccaatctatgggggaaaccgagatcgtcagccaaaaggagaaggatggatctatcacgaagagcgaaaggatcaaggactggtcgaagcgtaaggaccaccggcatcatgcgattgatgcacttgtcgtggcttgtactcgacagggacatatccagcgactcaatagcttgaatagtgaggaggatagtctacagatgcaggaggatagcaagcagatgcgagagaagatgggggaacagaaacgtcctacagcagacaaacatagcatcctagagaattggctcattctacagcctcacttctcacatcaggaagtgaagtctaaggtcgcagagatccttgtgtccttccgccctggtaagcgtacggtctccactggacgtaatacctatctccgctctgggaagaaggtgactcagtccggtgtactcatccctcgagggccattgtccgaagagagcctctatgggcagatcttgaggaatggcgagcctacctacgtcaagaaggtcgccctagagagcctctccgaagctcagattgagcagatcgtagatcctaagcttcgccgagagatgatagcccgtgctcaaccttcagacggagcgaagctcaatccgaagttactcctagctaccccgttctattctgacgcagcaggtactcagcgagtacgtagtgtacgggttgctatcaagcaagggaagaatagtatcgtccccctacgctacaatgagtcaggtaaggcgatcaccttcgtcaacccaggaaacaaccatcatgtgggcatctaccgaacaccagagggtaagctcgtcgaatcgtgtgtcaccttctggcaggccgtagatcgtgtgcgctatggtctaccagcgattattaggaagcctcgtgaagttcttgatcagctccttcttagagatgatatcccagaggctctgctggtgcatctccctgcctctgactgggagtttgtagagtatctgcaggcgaatgagatgttcctcattgggcttacggacgaagagatccagacagcactagcagagtctgatcagctgaccttaagcaagcatctctatcgggtgcagagtgtgtcttcgaaggactatatgtttcagtatcaccttgagactgaggcgtctggtagcaagaaaagaaaggggaggatccctaaagtatatcgcttaacggggccaggcaatgtctatcagaagcttaatccacgtagagtcaaggttaatctccttggggagatctctctccctaagtaaactgaaagcttatgattaagcgaatcctctactttggtagtcctgcttatctggccttgaagcagaggcaactagagatccgtcagacccctgatgagggtggggctacaagtgtacggacgatctcgatagaggatatcggggtcgtcctcctcgaccatccacagatcacgatcacccatagactgctcgatgctctactcagctacaattgtgctgtcgtgacctgctctatgaatcatctcccttcggggctcctccttcctctagatgggcatagtctgcagaacgagcgcttccgtgcgcaactcgaggcctcggtacctctgcgcaagagactctggcaacagacgatccaagcaagatacagagccaagcaagagtattgcagaatgtcctaggtgaacctgcgaagaacatgatcgcttggtctcggcaggtgaagagtggcgacccagagaatctcgaggctcgagctgctgccttctactggtgtaacctcttcgtctctctcccagactttgtgcgagagcgagaggagactgcccctaattccttgcttaactacgggtatgcccttctgagagctatcattgctcgagcccttgttgctacagggcttctccccacactcggtatccaccatcacaataagtacaatgcctactgccttgctgatgatatcatggagccctaccgcccctatgtagatcagctggtcgtggagatctgtgaggaagagggcttcccctcgatgctgagtaaggagatcaaggcacgtctactctctatctcagccctagatgtggagatcgaagggcagaggcgccctctgatgcttgctgcttcacagacggcaggctcactcctgcgttgcttcaccggagaggggcgtcgtcttgcttatcccctcctctcatgttagctcatcgcctaagtgaatatcgagtcatgtgggtcttagttttctttgatctccctacctatacctcacaggagcgcaaggctgcttcaggctttcgccaggggcttatacaggatggcttcacgatgcttcagtattccatctatatgcgccattgtccgagtatggagcatgctgagactcatgttcgtcgtgtcaaggagatgctccccgatgagggcgaggtgatcatcatgacgatcgcggataagcagttcggaatgatggagcacttctcgtcgcatagtcctaaggagggaccatatacgcccctactcttcgagatgttctagcgccattcctgtatgagacaacaaaaagccgatggagctccatcggctttttgatttctaacccttcaggtaagtggctaatgtacagtagactatgtggggtcagctgtattagctgtatcgaaggtactgaatttgaaagctaatcacaacgcatgtggttagtactggtgaggcgctggtgctgtattagctgtatcgaaggtactgaatttgaaagctaatcacaaccaatttgccttaactcatccagagtactctgctgtattagctgtatcgaaggtactgaatttgaaagctaatcacaacctaagcaggctacctcgggtaatgggctaagctgtattagctgtatcgaaggtactgaatttgaaagcaaatcacaacttgctgatggtagcagcactgaccccccttggctgtattagctgtatcgaaggtactgaatttgaaagccaatcacaacacaaccaccaagtgcacctagactatctcagctgtattagctgtatcgaagatactgaatttgaaagctaatcacaacaacgagccccgctactggtgcaagggtattgttgtattagctgtatcgaaggtactgaatctggactcagggtgcaaaagcctttagcgagggacgatatgagaaagggttataccagggagaggggattctttttaggctcggctttttgggagagtatccctaagtttggaggggtggtcttgcccgtaaaaagactggacttggatagccctaaaaaacgacctacggtaggtcgccgaaaaaacctactgtgggtcgtcgatgcgacctacggtaggtcgtcaagacgacctaccgtagatccctttttgcccctcccgaagagggtgaatgagaccgcctgtatcaggggctctaaaccttgggatgcactcagggaaacaggggaatgtgtcggggtacttcttcgccgtcacaccgccttcgctagcaccgccaaaatgcggggaaatgatcgaagggatagcgccaggatgcttccaaggtcgtggggaggatgttcagccccttccgactacctaaaaatgtgtatttttgcacccgcaaatcattcaattttatcaataatcggacacagtaatgaagaaatttcttattcttttctccctactcctctccgtgggtcgtgtaagcgctcagacggaagctgcccctcaggaggaagctcctaaggcgtggaagtttaccggcgtctccggcctcaaccttgcccagacctctctgacgaactgggctgccgggggtgagaactccgtcgcttggaacctctatctcaatgcgtcggctaactataagaagggcgcttggagctgggacaatgccctggtcaccgacttcgggaagaccttcacctcgacgaataagtggctcaagagcgtcgacaagcttaacctgagcaccaaggtcggtcgcttcgtgagcaagcactggagcatctctgccctcggtgacttcctctcacagttcgaccgtggcttcgatgcctcgacgaatcccaacatcgtagggaacaaggacaagtacatctctacgatcttcgctcccggctacctgaccctggctatcggggcagactacaagcctaacgacgacttctccctcatgctctctcctgctacgggcaagatgaccttcgtcttcgacaagaagctctcggacgcaggtgccttcggtgtcaccccaggtaagaaggtgctcgctgagctcggtgccctagctgtagctaactacaagcgcaagctcgctgagaacatcaaccttgtgaccaagctcaccctcttcacctcgtacgacaagaacttcgggaatatcgacgtgaactgggatatgatgatcgccttcaagatcaataagttcctctccacgacgctcacgacaaacctcgtctacgatgacaatatcaagacccgtgacgatcagggcaatatccgtggcgctaaggtacagttccgtgaagtcctcgggctcggtctggcctacaacttctaagcgctcccagacaagcgtctaagttgctttaatcaagggctatcccactggctgggatagcccttgttgcttatctcggggaagctcatcgtgggtcgagtaggagaatagctagaaatttgctttctttacaatcaaatatcggctttggatagatccacatggataaacaagaaaaaccgattattcttaaacattagaagcaaataactcacctacttagtctccataatacctatgcttggacaagaaatctccgaattcggacacatcctcagtaacgaccagctctctgtcgtacacgtagacctccccaaggggaagaagatcgccccacacgaccacaaggggcaggacatcttcttcagtgtcgtcaagggacaggtgaaggccaccctcaacgagagcgaagagcacacgctcagccccggtacactcctacgcttcgacggcgacgtattcatcggcatcgaagccctcgtagatagcgagttcttcgtctatctcatcaacctctaattcccccatcctccgccatggaacaaatgaaagacaacctccctgaggtagacatggagaagctccgtgtcgtcctagatgtcaaggaaagatacctcagcggcgccctccctctcgacgaggcacgtgctatcctaagggagcgagtgaagaccctgcgcccctatgagatcgctctcgccgaacaagagctcaagaccttcgaagacgacgagtgtcgcaaggaagatatccagcagatgatggtcctcttccaggatgtcctcgacagaagtcgtcccgacctccccgaggatcaccccatcatgtgctacattcgtgagaatgatgccatgcgaggacttctcaagcaggtcgaggagctggcgcagtaccctgtgatcaagaaccaatggctcgagctctacgacgagctccacaagcaccgccttcacctctcccgcaagcagaaccaactctattcgatcctagagcgcaagggcttcgaccgtcccaccacgacgatgtggctcctcgatgacttcatccgtgatgaagttcgggatgctcgtaggttactcgaggaagaccgggaggaggagttcatcgccatgcagcctgtgatcgtcgccgacatccttgacctgatcgagaaggaagagaccgtactctatcccacatcgctcgctatgatccgccccgacgaattcgaagagatgaaggcgggcgaccgagagatcggattcgcttggatcaaggtcggtggagggcatcgggcagaagagaccaagaagccactacccgccaccgaagcagttggcttcgctagcgatctagcagcactcctcggtaagtatggcttctcaggagggtccaccccagggcaactccttgaggtcgctacgggacagatgaccctggagcagatcaatctcgtctacaagcatatgcccgtggacttctcctatgtcgatgagaacgagatcgtacgtttctacaccgacacagaccaccgtgtcttccctcgaagcaagaacgtcatcgggcgagatgtgaagaattgccacccacgcactagtgtgcacctcgtcgaagagattatagataagttccgtcgtggcgagcaggatgaagtcgacttctggatcaataagccaggactcttcatctacatctactacgtcgctgtacgtgacgaagagggacgcttccgtggtatcctcgagatgatgcaggattgtacccgcatccgtagcctcgaaggttcccgtaccctcctatcatgggacaagagtaataaggcagcttcgaagcactcagacgcaccgtactccgctccagcaaccactcccgcccccgaagcatcatccaccacggacaagcaagccgaaggagagagcgaatatgtctcttgctcctgcatgaagggagcaagccatgcgcccaaagctcctgaagctccccaagccgaagcaagcacttctacccccgctgtcgaagtatccgccccagagaaagcgaagtcaggcactgagatcaccggagcaactcgcctcaaggacctgctagagcagcacccttggctgaaagctaagctccccgagattaatcctgccttcaagatgctctctacgccactggcccgcatcatgatccccaaggctaccgtagcgatgatgagcgaacggagtggtatgcccctcgccgaactcatcgcacagctccagcgagtcatctctgagcataagggctaacatccccacaactcccgacagaagaatagaggctcacccgaccaatgtgtcgggtgagcctctattttatccttaggagacttggtgctcctacttaggagagttaggtgctcctattagaactggtaaccgagcgtgatatagccggtcaggaagcgtggcgtaccgtcggtgacatagtagggagtaccgaggttctttgctacagacttcgtcaggctaccatcgataccaccacggagtgagaactgcttgtactgatacatcaggctcgcaccgaggccgacttcaaagcggttgaacgccttctcctgatagaggtcgaggcttgtcccctgcttgggctgagctgcattgacattcttgccgtcattagtcagcttggcggagagaccataggctagataaggagcgacattgaagaagactcggtgatcatctccgatagtgaggagcttaagcgagacttccagaggtagctgaagggcatagttctggatctttacgttcttatactccggctcgatcacgttcttctgaccctcgccacggccaatgacatagagacctgggttgaatgagaagatcgtgttctcgaagggcaagatgacactagccccgacacggaagttcttggtcatgacgccagcgtcgccatcatgattgacaccgagcgatgtgatgcgagacagagtcagaccagcttctgcacgatagccgatcttaccaaggtcctgagccgagaggctagtaccgagagccagcagagcgcaagctgaggcaacaagattcttgaatagcttcattttgtactgtttaaataaatggattgttaagccacgtacccgctggatccttagagaagcaacctcggcatagccgatcacgatccttgtttaaggtggatcgtctcgggtggtctcgacgggacgggctacgaatgacacgcaaatatacgtaaaaccacccatacccctcttccttttttcttactctaaagtcccccgtcgcttgaaggaagccctcccattacccgatcaggtcgcacgccttactcgctaagttaggatcaaggagctatcatccttgcgggcattacttatcaaagcctctgcgatcacttgtggcgtttgctaccattacttgtaatagcgtcgggaattacggaataaaaggggactgaaattctatattttctgtacatttgttcagatcctaacgcctaaagaggacgaagttcacctcccctctgaaggataatactcctcccatcacaaactaaccgccatgaatcgattcatcctacgcctgctcctttgcttcatttgtgttagctatagcgtgtcagccagagcccagcagaaggtcacggggcggatcctcgacgagcatcgcggagctatggacggcgcagtcgtcctactcatcacggtacctcagggcgtcctggtcgaatccaccctcaccgatgatacgggagccttctccctccttcctcgtgaaggggacttccttctatgtattcgctcgctcgggtataaggaggtcaagcagaagatcacctgtactccgggcctgcgcctccctgatatccagctcgagccagaggaagtttcgctcaaggatgtcgtagtcaccgcccgcaagtctcggccgatgaccacggcctcccacggcaagatacagatccatgtagcccagtcttacctcaccgatatcggtaatgcgctggacgttctcaggcatgctccgggcatctccgtgagtaataagggggagatctctctagccactatcggcggaactgccgtctatgtcaacggtaagaagctgatgctccagggcgaggaacttgcagcttacctacgctccctctcgtcatcgaagatcgctcgtatagagacttcccccagccctaatgctagcttcggggcagatggagccggtggcatcatcaacattgtactgaaagcctcagagcactccggcttcttcctcaccacttcacacagtgtcgcctactgggatcacctgaagcagagctccgacctagccctatcctacaacacaagtaaatggcaactcgggcttaactacagccacagcatcggccaccatgggatgaggtacggctacgagaaggtacaaaacggcgacaagagcctgtcagagaccgtcgacacagacaagcggaatacctacgctacgggtattgacttctcgtggcaagtgacaccgaagagcaagttcttcgtaggcagctcggtgaatatcctctctggccccggtgagaccaataccacgaccctcctctataaggggatgacgacgctcgatggtcgcctcagagcccgcaatgactatatcgagcagaagaccctgcggtatgccaatagcctcaattacctctatcagccctccgaccgacagcagctctccctcacactggactggacacgcttcgacgggaaggcacgctgtgaccagcccaacgactactattcggccaccgatcagctcattcgctctgacgtcttctattcgcagcccgagaaggacatcgatatctacgccctactagcggactacaagctccagacgagcacgcagtctgagtggcttctgggggtgaaggcctcccgcatcgctagcgataattccttcctcttcaggaagaacgggacgctcgatccacagcgctccaatcgcttccgctacgatgagcacaacatcgagggctacacgcagtacactcatacctgggatcgcttcgaactcagcgctggcctccggctcgagtacatgcatacccagagcgaacttcgggcacacacctctcaggctacggatcgaagccgtggggatcacctacgactcttccccaacctcagtctatcctactcgatcaacgcaaagaataagctcgccctcctctatagtcgccggcaggataaacctagatacgaggacctcaatcccttcgaatacctgctggatgaattgacctactggaaggggaatcccttcctcaagccccagatcagccacaagttcatcctcaactatctgtggcgtgacctgtcgcttagcctctactatagcaagctcaacgactacttcacctccctcactgatgtactcggcccggacaagacggtcatgaccacgaagaatatcgggacacagcagcaggtcgggctcgaagccgtcttctccagacgcctcactccatggtgggacttcagtaccaacctgggcttttattactttgctaaccagctacgctacgagacctaccggcaggactatcggcgtccctcgtgcttcctctccaccagcaatagcctccttctcccgctggggatcaacctcgagctatcagctcggtactactctgcacgtcagggtgggagctatgaggtgagcaagccgacgggtggtatggatatcgggctcaataggagttggcagagcggtcgccttcgcctgtcgctcctgatgacagatatattccacaccgagcgctgggatagctacggcacgaaggatgctctgcaactcgcctcctggggctatggtgagagtcgcaaggtcagcctacgactcagctacagcttcggccgtcagcgcttcaataaggtcgagaagcagctcgaggagcacaatcgactttagcctgatctcagggacttcagggcttagcgtcctataggctggaggctcagctccctctacgccttagctccctaactgctctccccgatgccatctctatagatcctccgatagaagggctgtcggggggagcgaattagctatctttggatgagctcacttataagaacttcgggctacttctccgaagaactgagagctaattacatgatgaagagcatccaatattccttccgctactcgggatgtgtggtgatcatctccgctctgggactgatcgctctcgctttccttgcttatttcctcctcttctctataggtatcaccgtctacacgctcatagcagtgacggcggtagcggcgctcatcgagcccatcgtctcgatgcccgtcagactcagctacgacggagagcgtgtcgtgctacgacgcctgctcacctcgaagacctacagccacgccgactatcacatagaggtagtcacgggactggagctcagcggcgggctacgtctctttgcctcgggcggatatttcggcttcacggggctcttttggcgccccaagatgggtctctataggctcgtccagacggagtctactcgcacctacctcaagatcactaggcggggcaagaggcgctcactctacatcgcctaccgctagacagaagaagtactccccgatcctctataaaattccatgtcgaagaccatcaatcccctgcagtcgttcctccatgcgcagcccgctctagcaaatatcctaggagttgcctttc

SEQ ID NO: 3305 - DNA, 23594 bp, synthetic construct
  source 1..23594: mol_type = other DNA
  misc_feature 1..23594: note = Synthetic
agctccaggagcgtctcgctaagctctctggcggtgtggccgtcctctacgtcggtgcacctagcgaagttgagatgaaggagaagaaggaccgtgtagacgatgccctcagtgctacacgtgcagccctagaggaaggtaccgtccctggtgggggtacggcttacctcagagctgtcaaggccctagatagcctaacgggtgagaatgatgatgagacgaccggtatcgagatcgttcgtcgtgctgtcgaggagcccctccgtcagatcgttgccaacgctggtaaggaaggcgctgtcatcgtacagcgtgtgaaggaaggtcaggctgacttcggctacaatgctcgtacggacagcttcgagaacctctatgcgtcgggggttattgaccctgctaaggtcgctcgtgtcgccctcgagaacgctgcttcgatcgctggtatgttcctcacgaccgagtgtgtcatcgccgacaagaaggaggatactcccgctatgcctatgaacccaggtatggggggtatgggaggcatgatgtaggcctaaagccactccctcaccagtaagggagcgtaagctccacaagaaaatagatccgctagagagactcccaagcctcctctagtggatcttttttgctttccttatctcccctttattccccttttcccgacggtgtccctatagagggcgaaaggtatcgcctgcagacgcccgccctctagcctaagtatccctagtggggagtaccctgggcgggcttagtcccctaatccactagaagtagaagcttcccctggagagcgataccccaaggcttcgcccttccataattcttttgcatgagtacaagacttccatacatcaccttcctcctcggggtagggctatcgtgtacctctaggccagcggcgcagagccaagagtcgctcggtcaggaggctcctattacctattccgtggacgaactggatcggctctacaggccactgaggagggatacgttcatcctatcggtggggcatgatgagtttagagctcccatcgaagatctgttttctgccgaggagcgcagggcgcataagacacagatcctagagtatacctggggcttggatcaggacagtctactgaccgtttggtatctacctctctccgactcactgcgagtcctcggcctctttacctacccccgagatgccatattctgagcccttatctacctatcccccctatgagaatgtctagctcgtcacagccacgtgggggaataattcgttagagaagaaggggggcttccctcgccgtagatgtggagcgaaagagtacggcgataaataactaagagatataaaggtcctagctatgctaagtaatgtgctaatcgaggagggtgctctccgcaaggaggtgattggatccagcgtgtcacatacggaggttgctcagtttctccatccttgggacttcccggggaaggatgattatatggatttcctctgtgagtccaatgggctgtttttcccagaaggtctttgtctgaagagcgatctatatatggggctagaggtcgagactttgtatgatctaagggggcgaatcgaacgctattgggctatagctaaggagaaccccgattattctcaagcctttacgactagacatatgccgatagccaatgatgcggcggggaatatgtactggatcgatttaatctcaggcgaagtcttgtttatcgactcagagtgtggtgtcgccgaaggactatacgtcgtttctgatagcttctcttcattctattccgcactctgccccatgcattgtgactgatagaggggcatgtcctccgagtgctgagtgcgagctaccgctagggctgtcttggcttgcccataggggagcgctgtggtgcccccctcatggagcatagctgagatacgacagcgacaaagtcgtctacaagctggctgtagctgtggtggcagcatagccaaatgagatcgcccgccccgagagagcttagggctctgggggcgggcgataactacaccaatctaaccattgtctcgccttcggataccctcgggagagggtatcgcacgagacgaccggtcttgggggagggaggtgtgtttccctctaatacttggactttgtcgtccgtctcgggggctcagcgactaatccttgaactttgcagccaggaattcacgattgagacgggcgatgttcgtgatggagatgttcttggggcactccacttcgcaggcacgggtattcgtacagtttccgaagcctagttcgtccatcttcgctaccatagccttagcacggcgagccgcctctacgcgcccctgagggaggagtgcgagctggctgaccttagccgagacgaagagcatggcagagccgttcttgcaggcagcggcacaggctccgcacccgatgcaggcagcagcgtccatcgccatatcggcatcagccttggggatgggcgtagcgttggcgtcaggtacaccacctgtattcacggagacgaagcccccagcctggatgatcttgtcgtaggctgagcgatcgaccatgaggtctcggatgatggggaagccggcagagcgccagggctcgacggtaatcgtgtcgccgtcgttgaagcgacgcatgtgtagctggcaggtggtgatgccctcatcgggtccgtggggatgcccgttgatgtagagggagcacataccgcagatcccctcgcgacagtcatggtcgaagaccacgggctccttgccctcacggacaagctgctcgttgaggatgtcaagcatttctaggaacgagctaccctgcgatatattctgtaggtcgtaggtttcgaaggcccctggttcctcgggaccacgttgccgccagacctttacctttatattgatattcttatccattgtaccgatgttggctagggattagttcttgtagttacgctgctgacgtacgacgaactcgtagtcgagcggttctttcaggagcacagggtcttgatcctcgccctggtattcccagcaggagacgtaggcgaacttatcgtcgtgacgaagggcttcaccctcgggggtctggtgctcgaggcggaagtgaccaccgcagctctcctcacggtcgtgtgcgtcacgagccatgagctcaccgatctcgatgaagtctgctaggcgaagggccttctcaagctctacgttgaggtcatcagccttaccggggatgcggacatcgctccagaattcctttttcagtgccttgagctcgacgatagccttctcgaggccttcacgctcacgtcccataccgacgaagtcccacatgatgtgcccgagcttcttgtggaggctgtctaccgactgcttccccttgatgctcatcaggcgagcgatgcggtcctggatgcccttctctgcttcgtcgaactcaggacggtccgtgctgaagcgaggcacctggatctggtctgctagatagttctggatcgtatagggaaggacgaagtatccgtcagccagcccctgcatcagcgccgaagcaccgaggcggttagcaccgtggtcagagaagttagcttccccgatggcgaagaggcctgggatcgaggtcatcagttcgtagtcgacccagataccacccatggtgtagtggatagcggggtagatcatcatcggcgtctcgtagggattgtcgttggtgatcttctcgtacatctggaagaggttgccgtagcgagcctctacgacgtccttccctagacgctggatagcggacgagaagtcgaggtagacggcaagcccagtgttgttcaccccatagcccgcatcacagcgttccttggcggcacggctagccacgtcacgaggtacgaggttcccgaaggcagggtagcgacgctctaggtagtagtcacgatcctcctccttgatctcggtggggcggagggtgccggcctggagcttcttagcgtcctcgatgttcttgggtacccagatacgaccatcgttacgcagggactcggacatcagcgtgagcttggactggaactccccgtgtacggggatacatgtggggtggatctgcgccatacaggggttggcgaagtaagcacccttcttgtagcactgccaggctgcagagccgttggaggccattgcattggtcgagaggaagaaggcgttgccatagcccccggtgccgatgactacggcatgggctgcgaagcgctcgatcttgcccgtgatgaggttacgggcgatgatccctctggcacggccgtcgatgaggacgacgtcgagcatctcgtggcgggtgtatagcttcactgtccccttgccgacctgacggctgagggcggagtaggcaccgagcaggagctgctgccccgtctggcctcgggcgtagaaggtacgagagacctgtgcccccccgaaggagcggttgtctagcagaccgccgtactcacgggcgaagggtacgccctgggctacgcactggtcgatgatgttattagcgacctctgctagacggtacacgttggcttcgcgggcacggtagtccccccccttgatcgtatcatagaagagacggtagacggagtccccgtcgttttggtagttcttcgcagcgttgatacccccctgagcggcgatagagtgcgcacggcgaggggagtcctggatacagaagttgaggacgttgaatcccatctctgccagtgatgcggctgcagaggcaccagccagccctgtaccgacgacgatgatgtcgaggcggcgcttgttggctggattgaccagcttctggtggttcttatagtttgtccacttctcggccaatgggccggcggggatcttagagtctatctgtgacataatatggatagggctgatacggaatacttgcttatgcgctagagtctggactaaaggctacaagcccccccacagagggaaaggaggaagtaatacaccacgacggcagcgaagccgaggacgatgagggtagtatagacgttcgagatcttgtgcagacgatcgaaccacaccttgttgttgaacccgatggtgtgtagcgagctccagaagccgtgggctaggtggaaccatagggctcccagccatacgaggtagagcacgacgaagatggggttagagaaggtgtagcggatgaggcctgcgccatccgtaggacccgtgacaccactgatcccgaggtcatgctgccccgtgatctctgctagctgcatcttggcccagaagttgaagaggtgtagggcgagcccgaggatgaccacgacccctagtgccatcatgttctgcgatgcccactcgacccccttggggcgatcgaccacctcgtagcggtcgttaccgcgcgcccggcggttctggatcgttaggatgaaggcatacacgatatgtacgacgaagagcagagcgagccctaccgtcgccaccagagcgtaccagttcgcaccgaggaactcacagacggcattgtacccctcctcagagaagagcgccacgagattcatcgacatgtggaaggtcaagaacaggataagagccagccctgagatactcatgaccagcttacgcccgatcgaagatttgattaaccacgacatacaagttctattttttatgatctgttgatacacatgacacatggccatagagacggagactacagcctccacccttcgcgctccctggtaaagtcctcctctagggtatccctatcgctctacaaagatagctcaattaggtatatcaagtactattattagcgaaaaaaaggcataatcgtacgaactaacctcccaatatgtaggtatagataaggtataaatcggacttgtgtacccaaatctctacctaaaaggagctaaccatatcgctgtatatcacgtcccctgctccccgaaggagcctacgggatgacgtgtgaagacgctagagcagagggctggaggtcaaggtcggggacgtcaaggtgcctccccccagatacggtgtacctgtcccctaggaggcgacttaccgtagcgtacacctatgcccgaggagggtggagtatacacgtgtgtacactatagtatacccacgtgtacacactagtgtacacgcgtgtacactcatgcgctctcggtatgagccccagagggtgctctaggaggggataactatagagggtagtactagcgctacagagctatgagtgagggactctcgggtatacaatgcctcccaaggaggggcatactggaggggtatgtgtgcaccctctggcctacgtcgtagcctctgaggggcgggtactccaggggcaacaggcgcagagctgctggctacagtagtggcgatgtagatagagtagggcttggctgtccgaggcggtctctacggggagccccgccgaggcgaagaggcgtgtgatgcgattgctctctgccgagagtccgtccagcagggagaggggagcgtactcctctccttcgcccccatagtgtcgcctccaggtgaggcgataggggataaggacattgatgatcagtagatcacagctcgccggactgaggacgctactggagcctccctcgatcactcctctgcgaccccctcgggtggggcgaaggagctcataggcctctgttaggctgtccacacggaggctctcctcggctaggctctccctctggcagatcagtcccgctagctgtaggaggcgacgctcggggaggttgctgggtcgggtacgtgctcggcgaaacgtacccggcgggaggggacttagggtatacttgtgggagaggaagtgatattcacccctcaggagctcggtgtgctctccctcggcgaggtagctgagcagaccagcctgccccacgagtagagcctcgacctgctcggggtgatcccgatgcttcatcagtatggtgtagggtaggctgagggcgagtcgctccatggactcgctattgagcccgaagccatagtagcgcaggagcagggtgtggaaggtctgtccccagtcccctccacagcgcagtaggagatcctcgacggcctgcaccttctccctgagccgactatgtaggagacactggagccaggcacgacgagcctcgtgggggagctggctgagaggagctagtcctccccctcgggtggggctctgggtgcaggggagtgctgtgggggagtattctctggcgatgtcctcgccttccggacgatggggtaccatgagcaggcaggtcggtagtggcactccactttccaacgctatgggacgattgtcctgctccacgacgtgtaggatcaccgagtggtaggcgggatcgctgtcgtggtggtgatggtaccactcggcggaggcatggtggatctccacacagccgacccagaggaggtcattgatgcggatcttagcggcaaagaagtccgggcctgcatctgtatttagctctccaggctccagcacctctatgtgagcccctgcgagctcccctgtcgggatgagtcggtcgtagaggccatagcgccagatgtagtgtaggtaggcttctctgtgtctcatggtggtcgtcggtcgtagggggaaggtcagtcgctgagctcgtcgtagggcgggatatgctcgaggaaggtataggagccctgctcatagtcaatccggcaggcgaagtgctccatcccgttgcttaggatgaggtagggtacacgaagcgtataattgtagcgaaggatctgctgaagtacggtcggtgatgcggatgtgaggtgccttgtactcgatcagtacccgaggagtgagctggcggctatagagtagggtatcacaccgcttggtcgtcaagccgacctgtatggtcacctcgttcatcatcagctctcgggggtagcctaggtgctccatcaggtagtgcacgaagtgctggcgcacccactcctcgggggtgagagagacgaaccgctggcggaggtcatcgtggatgtagggcttaccctcttccttccggagtcgtagacggtaagccgggagatttagcttgatcattcttatctttgtcgtacgtgtcccctagggcacgtccacgaagttagacaataaataccgatatggctacctacgatgatatcgccaaggcgatcaagaagggggcactccagcccgtgtacctcctagcgggggacgaacccctctatatcgaccgcctcgccgagctcttcctggcgaaggtcatccccgaggaggagcgggacttcaacctcaccgtcctctatggtgcagaggtcacgagccgagacatcctgctcgatgctctgcgcttcccgatgatgggggagcgggtcctcgtcctcgtgagggaggcgcagcaggtgcgagaccttgaccagatagctagccacctagatgacctaccgcagagtacctgcctcgtgctctgctacaagaagaagcccgacaagcgcaagagcctctacaagaccctcaatgagcgcaaggctgtctacgagtccagtaagatctacgactccaaggttcccgacttcatcgtgcgtaccttcgctgagcatggcctaacgatcgaccagcgtacggccttcctcatggctgaggctacgggtaacgacctagagaagatcctcggcgaggtcgggaagatcgccctagccctcgaggggaagagctctatcgtgcgccccgaggatatagagtactatgtgggggtgagcaaggagtacaacaactttgagctcctctctagcctcatcaagcgggactcagctcgtgcctaccgtatagccttctacttcgcagccaacgagcgtagtcacccgatccaggtcaccttggctaccctctttggcttcttctccaacctcatggctgtctactacatcccccagcccaacgaacgttcgatagcagaggcgctgaaggtctctccctatgccgccaaggactatgacctcgctcgccgaagttataccgctagccaagtcttcgccatcgtccatcatctgaggatggtcgatgccgcctctaagggggtcgatgcctctctaccagcctcggagctctacaaggaattagtctcacttatcctatccgcctagttctccttcgctagggctcgaccattcccaaggcttatcctaattccgtatatataactaaagaggctacctccagtcatgggggtagcctctttatctggtaggctatacgagatagcctagtgaatcaccttaggggattagcgacggatgccgagttccttgatgatggcacggtaacgctcgatgtcgatcttctggaggtagtcgagcatacgacgacgcttaccgatgatcatacgtagcgcacgctgggtgctgtagtccttcttgttcttctgtaggtgacccgttaggtgggcgatacggaaggtgaagagtgcgatctggctctcaggagacccagtgtccttagcgcccttaccatgcttttcgaagagctcggccttcttagctgaatcaagatacatattacttgtacttatatagtgaaacaaaataccgccgtcgcaagctatccctcccatcccttcgcagggtggaggaaagacagacgacgcatcggatcgtggcgcaaagatacaaagaaagaaggagataagcccccgaggggctgctccgtggcggagatgagggtctcggtagcagaggtcagtacacgatgcctggggctgggcgatgctgcgggcgagagcgtggagagtaacttgtgaattagctgggaagtcagtaacttagcctgcgtaacgaggtgacctcaaggactggtgcatacgggcacaaaaaaagacgaggaccgaagtccccgccttggatgttttcacaacggaataatccttattgtgattagcttttcaaatcagtaccacaaaggtagccaaaatatttataatccaataaatgcagagaagtacaatggctagaaaagtacttggcctcgacctcggtgtcgggtctatagggtggtgcctaatcaccctagacaacgatgagaaaccacagagtatcctaggtatggggagccgtatcgtgcccctctctacggatgatgccacggaattcactcagggaaaggcgatcaccaagaacaagatgcgtacggtggcacgcaccatccgcaagggcatggaccgctaccagctacggcgagaggctctgaagaaggtgctccgtgagcatgggatgctccccgacgagtccctcatcaagctccccctcatcaagctctgggagctacgggcacaagctgctacccccggagggaagctgagcctcactgaactgggacgcgtgctactacacatcaaccagaagcgaggctacaagcatgcaaaggctgatgaggctgccgaggctgaggccgagggcaagcccaagaaggaaaaggagggctatgtagctcaagtcaaaggacgttaccaagcgctaagggagaaggggcagaccatcggtcagcacttcgctgaggagctaagggcaaaccgacagactgcctccagaggagtctactacacctaccgcatcaaggagcaggtctatccccgtgaggcatatatcgaggagtatgacagtatcatgaaggtgcaaaggacattctacccagagctccttacagacgcactaatcggtaggatacgagaccgcattatcttctatcagcgtcctctgaagtcgtgcaaacagctggtctccacctgtgagtttgagaagaaagagcgagtcgtacaagtgaagcgcatcaacaaggatggtgtcgaagagctcgttgagagaaccatcaccattggtcccaaggtagccccaaagtcttcccctatctttcaggtctgcaaggtctgggagtccatccaaaacatccgcctctactatcctgatggcacagagcgaaagctggagcaagaggagaagcaaaagctcttcgactacctccagaagaatgataagcttatctttacggcactgcgtaaggagctcaagattaagccaaaggagaagctctggtgcgacaagctacttgataaggggatagcagggaatacaactacagctatcctacgcaaggcactgaagggatatgagcagtatgagggtctgcttaggttcgatctgaagaataaggttgacgaggatggagttattctccccatcatcgacgagtcttaccaaaacgaaccgctctacaagctctggcatatcctctattccatcgaggataaggatgatatgcgtcgtgccctagtcggacagctcggtatcaaggaagaagacctagacgatgggctgatggacgccctctataagatagacttcgtcaagcagggctatgggaacaagtctgccaagttcatctgtaagctccttcctcacctccaggaggggaagatgtacagtaaggctgccgaggctgctggagtacggcactctgatagtatgactgctcaggagcgagatgagcgtagcctgctggaggaaatcccactgctacagaagaatgcccttcgtcagcctgtagtcgagaagatcctaaaccagatgatcaacctcgtcaatgcgctcaagagggaatatggtgagatcgatgaggtacgtgtcgagctcgctcgtgagctaaagatgagccgtgaggaacgtgaggagaccactaggagcaataatgcacgcgaggaggaaaacaaaaccaaagctgagtatataaagggggagtatagccttactcccacgaagtcacgcatccagaagtatcgcctgtgggaagagtctggcgggtgctgtatctactgtggtaagcatgtagatctcgagcaattcctccgaggtgaggagatcgaggtagagcacatcatcccgaggtcgatcctcttcgacgactctatgtcgaataaggtctgtgcctgtcgctcttgtaaccaagagaaaggtaatcgctttgcgatggagtacatccagtccaagggatgggagcagagctatatcgagcgtgtgaatagtctcttccatgataagaagatatcctactctaagcgtcagcgcctcctgatgctacctaaggatctacccgaagacttcatcgagcgtcacctacgactctctcagtatatttcccgtgaggcacagggcattctccgtaaggggatacgactggtgagtgcctccgagggcagtgtcacagctaagctccgacagctgtggggctatgacaatatcctgcgagacctcaacctagagcggtacagatctatgggtgagacagaggtcgttacggtagagcatcgggatggagagcgcaccgatgagcgtatcaaggattggtctaagcgaaaggatcatcgtcatcacgctatcgatgccctcgtcgtcgcttgtactcggcagagctacatacagcgactcaatagggtgaatgcagagccggatcgtgaggagatggatgcattcatcaaggagcaacaacaaaagccgactcattctaagggagagaagctctccttactggaaaattggcttatccgacaacctcacttcaagatagaagatgtgatgaagcacgtcgaaggtatccttgtctccttccgcccaggtaagcgtacggtgagtcgaggacgtaatatctacaagcgctcaggtaagaccgatgtgcagaggggggtacttatcccacgaggagcactctccgaggagaccatctatggtgtgatacagctccatagaaagggtaaaagtggtacggggctagaaagatcctacgtcaagcgaataccgctgagcaaggtcaatccgagtaatgtcaaaaacattgtagactctcggattagagacgttgttcaagcagcattgctatctctttcgggtcgaaaaggagttcttcctacagagttgtatctagatgactctcgaaagagggtagtgaggtctgttcgctgtctagtgaggtcgagctcccttattcctattcgatttaatgcggatggagaggcaattggttttactaagccaggggtgaaccaccatgtggctttgtatagggatggtgcagggaacataagagaatcagttgtgccgttctttagagcagttgagcgggctcgctatggtattcctatgattatttcagatccgagcaaagcaagagagcaggcacgagctaatcctaaccttccagaatctatccttttgtcgctgccagaggaagattggcagttagaagaaattctgcaaggagatgaaatgttccttttgggaatgactgatgaggcaatcgatagggcaatggagaccaaggattatactactctgagtcgccacctctatcgggtacagaatctttcatctatgtattatgtcttccgatatcatctcgagacggaagtcaaagataaaaagaatacttcaggggaaatccctaagttctaccggataacaagctttagttcttatcaaagacttaaccctcgcaaggtgaagatagacctcctaggcagaatatccctaacctgagtcaataggctagtatcatgatgaagcataccctttacttcgggagccctgcctacctcgcccttaggaataagcagatcgaggtgcgtcagccctgtgagggggaagctaagcgtccagtacggacaatcccaatagaagatattggggtcgtcctactcgaccatcagcagatcaccatcacccatgggctcctgcatgcacttctggagaataactgcgctgtagtaacgtgttctcctagtcacctgcctgcggggcttctacttcccctcgatggacacacactccagaatgaacgcttccgcacacagctggaggcctcccttcccctgcggaagcaactctggcaacaaaccgtgcaggcgaagatcctcaatcaagccacgctcctcgggcaagtcctcggggaacctactaagaacctacttgcctgggccaagcaggtgaagagtggcgactcggagaacctagaggctcgagcagcggccttctattggcgcaacctcttcgtctctctgccgggcttcgtccgagagcgtgaggaggctgcacccaatgccctcctcaactatggctatgcgatcctaagggctatcgtcgcccgtgcactcgtcagctgcggtctcctcccgacactaggcatccaccatcacaacaagtacaacgcctactgtctggcggatgatatcatggagccttaccgcccctatgtggatcagttggtcgtcgagctctgtgaggaggagatccctacggtgctcaccaaggagctgaaggtccagctcctctccatccctactctggacgtcgagatagagggacagcgtcatcctctgatggtcgctgcctccctgaccgcgggctctctactgcgctgcttccagggagaagcccgtaaactatcctatcctatactccgatgaaagcaagtcgtctaagtgaatatcgtgttatgtgggtctttgtattctttgatctccctacctatacgtcgctggagcgtaaggcagcctcaggcttccgacaaagcctcctcaaggatggcttttcgatgtttcagtactctatctacacccgtcactgtgctagtgccgagaatgctgctgtgcatgtgcggcgggtgaagagtatgctccccgacgagggtgaagtagtgatcatgacgatcacagacaagcagtttgggatgatggagcacttctcctctcactgtacgacgaagcccccagaagcgcctcctccccttgatctcttccctgacgaagatatttttctcctctaaccaaaggaaaagccggtggtactccaccggcttttctctttctataaatcttcataagctactcatgcttaaatcactatgcaggatcagttgcattagcgatacgaaggtactgaattgaaagctaatcacaacacccgatcgacggcatcggcggggaggttagttgcattagcgatacgaaggtactgaattgaaagctaatcacaacttgaatgtagtcagcttgattagcggtggcgttgcattagcgatacgaaggtactgaattgaaagctaatcacaacctgggggcagtcctcgatgagaggggcacgagttgcattagcgatacgaagttactgaattgaaagctaatcacaactctgaatgttgaacctttggacgtacagatgttgcattagcgatacgaaggtactgaattgaaagctaatcacaacaatagtgggcgtcaatgtcgatgcctgtgggttgcattagcgatacgaaggtactgaattgaaagctaatcacaactacgacctatccaatgagctggcaagagtggttgcattagcgatacgaaggtactgaattgaaagctaatcacaactaaacctccagtgggtagctacaggggagggttgcattagcgatacgaaggtactgaattgaaagctaatcacaacgctatctgtcgagctacattgcctctcatgttgcattagcgatacgaaggtactgaattgaaagctaatcacaacttgctcggcggtgtactcgatgccacggaggttgcattagcgatacgaagacgaaggtactgaattgaaagctaatcacaactacgcccactatctgtcttacgttacgtatgttgcattagcgatacgaagttactgaattgaaagctaatcacaactctgactgttggaaacttggtcgtgtcgatgttgcattagtgatacgaaggtactgaattgaaagctaatcacaacctcatggtgctgtctctgctctccctccagagttgcattagtgatacgaaggtactgaattgaaagctaatcacaacgagggtgcttttgttatgtgcagtgagcacgttacattagcgatacgaaggttctgaattgaaagctaatcacaacgcaatggcgaaccaatctcgccaacgtgcgttgcattagcaatacaaaggtactggattggaagctaatcataacggtacggccatcagaacgaccattgtatcgtcgtgttagctacacaaaggtactaagctgaatgctaactataggcaaaagttgtctctatcgtgatgcttggtgatgactatcattcctagagggcgggtattgagctccgtcttgccctctttgattacattgtgtgatggtacatcacagggctgacgcatgaaatctctatagtgcgagggttaggtcgtcaaggagtatgcaccgaagatagaagtatccgtgtcctaggctagatatacccagcgaatacctcctacctaggagggatgagtatacacgtgtgtacacaactgtatacccacgtgtacacaacagtatacacgcgtgtacactacctcgctctaagtatatcctctataggactcgcttgtatgtctattccttgggggataatacgtaggatctttagtgatgggctaaggctccctgggatatgaaataatacccccgaagatccaaaggtaggagtgtgcgagcgagatcatgcgtcggccttgtgggccataagtagtcagatcgcattgtcaggataattggttacctttgtgtcagctcgaaagagttagggatgcgggtaaaaccgcgtaccacggctgaggcagggataagcatacctgcctcttctattttatagctctcgtagtacctgtcatcttcgtagtaagtaggagatacgcttgtcaggaaataactatttgcggtacccctagagctcttgctagctcttatgactttctcctatccactccagctctgtgatgacataaccacccgaggtatcaatatcagtatacactcagctgcattagcgatacgaaggtattgacgtgagggctgatcacagccgatgagggtgacttttttctccgtgtgtaatttgctctgtatcaagtgtgagtagagggctgaaacgctcttaccgagagcgcacttacgctctcggtaagagcgtccccatcacctatgtaaggtgatggaagcgttctttataggagcgtaagagggggcttagtatgttcgtttgtagctcctcggtatgctgagtaggaaggggggcgatatgtcgcagtgattaggggaattagctctgtcaatcttcctaggattatctaccttcgtgctgtggttatctctattctcgtggagtggggggcgtcatgggtcgttctatcctcgtatgggggcctgctgtggctaccctcagtaccatagggtgggggaagtattcccacggggaaggagggttagcgggataggctacggggaagggtaggggcgaatgccctatctttgcgctcgtgatccatcctgagtggtggattgttcagtaagtctatggatacagctcatctcatcgctccactgcaggagcgtatcgcccgtagtggtctctctgacccacgcatcgctgtcctcgtctctggcggggtcgatagctccgtggtcgtgcacctactctgtacggcaggctatcgtcctacgctcttctatatacagataggtatgcaggagcgaggcttcacggactgctcgtgggaggatgacctagagatcgtgcgccacctagcacgtcagtatgactgtcccctagaggtcgtatcactccacgaggagtactgggcgagtgtcgtgcaatacacgatagatacggtgcgccgagggctgaccccgaaccccgatatgatgtgcaacaagctcatcaagtttggttgcttcgagcagaagtgggggcatgcgtatgactttatcgctacggggcactatgctacgacgaccttcgtcggtgagcatctcttcctagctactgcaccagaccctgtgaaggatcagacggacttcctcgcacagatcaacttcgcacagatccgtaagctcctcttcccctcggggcacctcctcaagagtgaggtgcgagccgtcgccgagtcagcacacctcatcagcgcaggccgtaaggatagccaagggatatgcttcctcgggaaggtgaactataatgagttcatcgagcgtgccctaggtacgaaggagggactgatcatcgagcgggagacggggcgtgtcctcgggaagcatcggggctactggttccatacgatcggacagcgcaagggcttggggctaagtgggggcccttggtttgtcgtcaagaagaacatccgtcgcaacatcatcctcgtctctcagggctacgacccacgagatcagtatggacagcatatagagatggagggggcggacttcatcagtctcgatccctggagctatgctcggctcgtgagtacgggtatagatacccccgtggcggaggccgatcgagagccgatcgccatcaccttcaagatccgtcatacccctgagttcacccgaggtaccctccactatgatcccactcgtggctatcgcatcgatagcgagcaggagatccagggcattgccccggggcagtatgccgtcctctatgatgaggagcatcgcatctgcttcggtagtggtatgatcactcggggctactgaacttgagccctcgcaagctcttccttttcccccccttcgtggggagaccataaaatgaagcgaaggctctgtgcaggataccgcacagagccttcgctccttttgttgcttagcctctgggtagggctagtagttgtgtgactcggggttctgtacttccttcctcgtgatcttgtgcaggtcgagtgctcgccaagcatagacgatatatgctaggacgaaggggatgagtagggagacgaagctcatagccttgagggtaaaggggctggaggagctattgcggatattcagcgagtggtggatgagctcaggcatatcggcactgtaggctgggtaataggaggtgttgttccacccagcgatgaggaagagggcgagtgccgtgagtaccacacctgctccctcgagccagatccccttcttgtacccctcccgcaggagcgtcagcaggatacctccgaggacgaggagtaccccgaggacgaagatgaggaagacgatgggcatctccacgagattgtaccagtacttgtagtccacgaggtaggtcagctcggggttcgagggagagtaggcaaagcccttcttcgtcagcaggaagaagaggtaggcgaggaagagcaggaggaaggcggctgcgttccaagccagagcactgcgcgaacgcttgtagatcgtctcgtcctcgatattgttgatgaagaagaggagtgccgtcgtacgtgagaggaagaagacggctagcccgaagaccacattccacacgttcagcacagcctctagcccatggagctgtagcccccgataggggagccactgcgagatcacctggctgctgcccgacatatcggcgatggcctcacgattgaccgtgaaggtcgagccagtgaagaaggtagagacagctgcgccgaggaggatcggggcgagtaggccgttgatgaagaggaaggtctgataggtcttgctccccagcacattcccattcttattctgatactcataggagatagcctggatgatgaagcagaagaggatcagcatccacacccagtaggcgcccccaaagctcgtggagtagaagagggggaaggaggcgaagaagcccccaccgaagacgacgagtgtcgtgaaggtgaattcccacttcctgcccaccgaattcaccaggagcttgcgctccaggggctccttgccgaggctgaagaagaggctttgtccgccctgtacgaagaggaggaagactaggagtgctcctaggatggagatcagtagccaccagtattcttgatagaatgcgtagtccatttgtcgtgttgtagtttggattgaatgagatggacggagtgcttagtgggcatcaggaccctgacggatggccttgcgcatgatgttgatctctgccaccagcatgatcgtgaagagtaggaagaagagcatgaaggtgatcatcaccgacgaagcctcgatcttggagatagcggcctgcacgggcaggaggttctgtatcgtccagggctggcgaccgacctctgctacgacccagcctgcttcgctagcgatccaggcgcagggggtgaggatgaggctagcccataggagccacttggcctgggcaagcttctcattacgcttgtaggcataccacgtcagtagcaggaagagcaggaggaaggcaccccctagacccaccatgatgcggaatgagtagtaggtcagcgggatattgggcaccgtctcgtacttgctcgtgaagtagccgtagccgtagtaggggaagttctcctccagtacggcacggtgctgggcagcaccgatgctgtcacctgccttgcgtgctgagcggaaggcattgagtgcgtcgatagcgatacgtccacggcgcatcatctcttcggtggagagggctacgctgccgtcaggcttgtggtagccaccctctaggatgttgttcaccccggggacgtagcggtcgggggtaccgtctaccatgtaggagagcagacgagggacctctatactgaagaggtgggaggccttcccgtcatcgggacgacccttgctggggttgagtgcacctaccatacctagggggagtcccttgccatcggccgtctttccctcgggggtagaggtaccagcatcgtagagggcctccatagcggcgagcttcatcggctggttcttggcgacatcgactgcagagctatgtccagtagctgcggagagtatagcggcgatgaggccgaagggggcgatgatcttcatgttgcgccgagcgaactcgaggttcttcccccgtagtaggtacagcacacataccccgagggcgaagaaagtccccagcgtccaggaggtcgtgatcgtgtggaggaacttgatgatagccgtaggggagagggctacggcccagaagtctgccatctcgttgcgcatcgtctcggggttgaagaccatcccttgtgggttctgcatccaagcgttagctacgaggatccagactgccgagatcgtcgctccgacgatcgtgagccagctggaggcgaggtggaagcctcggctgaccttgccccagccgaagaacatcacagcgatgaaggtactctccatgaagaaggccaagataccctcgatagccagaggagcgccgaagatgtcgccgacgaaccagctatagttcgaccagttcgtcccaaactggaactccagtatgatcccagtggcgacaccgatagcgaagttgatcccgaagagcttctgccagtacttggtagacttcttccagaactcatcgccactgcggaagtacttcgtctccgccagcgacatgatgatacccagccctagtgtcagaggcacgaagagccagtggtacatggccgtcagggcaaactgtgccctcgaccacgatacgagtgattctagatccattgtatatagtatttagtccttatgattacttgattggtttgtccgtccccccgtgaagagtatcagtgggggatactgctcggcgctggaggagctcctgctcgacgaactccgagcgggacatatgctgtcgctctgcctcctgcttgaccacgttggggaagaagaaggctcttaggatagcgaacatgacgaagagcttgatgcagatgatgagccagagcttacggctcgtgggggttagggttttgaagccatcgcggtagaagcgataggtacgtatgaggaagttcggtctgcccgggtcgttactcatgagggggcggagtctttataatgttagtaatgaagtgataaacgcaaatcggcgacaaaggtaggaaataactagcaaatgtaaaggagccaaaagagcctccacgcctccccagcttcagcactccagagggcgcatgtgactcatcgtgaggctccccccacggtggggagaccatcctagaggctatgctctagggctgtacggcgggctgtgtaggtcaccttggtagttttagttgtacctttgtgctcaagggtgtgtatggggctcccccagctagcacccttcatccatcactacagagagcattgacagctatagcgatcgatagcacgagcgtgctacagccctctcgtcgggggcaaagccaagcggagggacggcaatgagactcaccttcgctatccattaccatgcccagtggggcgaggccctatatatctcaggcgaaggctccaccctcggcctctgggatgaggacaaggcatgtccactaacctgcgccgagggtgatatatggcggaccgaactcgatctaccagagcctatcccccccacactctcctattcctatctcgtgcgtaatgcggcaggccaggtcgtccgccgtgagggtatgctccagcatcacctaggcctccccctaggggctagcaggataatgatcctagatgcttggctgcagagccccgaggacgcaccgagctataccacagcactactcgataccctgagagggcatcgaccatcgccccttgatctcccagagggagacaccccctatgtttgccttcagaccttcacctcctcggttggtaggggacgagagctctatctcgtcgggagcactagcgagctaggcgcatgggatacccatgctgctgtgccgatgcactacctcgggagaggtcgctgggggatcatccttcccctctccgtcctaggggcgtcaggagaggctgtagagtacaagtacttcgtcgctgacgaggagggtggtgagccccagtgggaggagggggctaatagagccttgccacaggtcgctctcggagagggctgtggctgtacgattaccgatggctttgtccgccttccctcggagcaccttcgcctagcaggctgtgtcgttcccctcttcgccctgaggggagagcgggactggggcataggggacttcgggacactctatgagctagtagacctcgtgcatgagctggggatgaatgccctacagctcctgccgatcaatgatacgacctttgcccgttcgccccgggactcatacccttataatgcgatctccgtagatgccctacacccgatctacctagacctctctcagctaccagccctccgagatgtagagctacagaggaggctcgaggaggctggggcagcactccgagcaagggagacggtggactatcctcaggtcatccagctcaaggaagcctatctgcgtcagctcttcgccgagcagtgtgcaggggatgggcttggcaccgacttcgaggactaccgacaggcgcaggagcggtggctagagccctatgcctactactgcctactacgagaccggcatgagggactccccccgacagagtgggggatggatagtcactacgacctcagtcgtctgcgcgcgacctattcggggagcgaggagcagcacctactccgctactatcagtgggtgcagtg

SEQ ID NO: 3306 - DNA, 23591 bp, synthetic construct
  misc_feature 1..23591: note = Synthetic
  source 1..23591: mol_type = other DNA
cacggaggcgcaggtagcgagcatagatatcagaggggatgtacacacctgccaggtggccgatgtgtacggggccgttcgcataaggcagggcggcggtgatgagggtacgcttgaagttcttctccatctatattctttctatctaagcaccatacgaaggggtaggacggataaaagtcctacccctcggcgcgcatgatgcggtatattacttattcttctcaatgaggcgctcctgccaagcccaagcagagcggagcgtgtcggcgagggattccttggcttcccagccgaggatggtgttggccttcgtggggtcagcccagaccttctcgatgtcgccttcgcggcggccgacgatcttgtgggggaccttcacgcccgtgacagcctcgaaggtgcggatgagctccagcacgctgacgccacgaccggtaccgatgttgaaggtctccagaggctcgctgcccttggagtcgtccagcatacgctcgatagcgatgacgtgggccttcgccaggtcgacgacgttgatgtagtcgcggatacaagagccgtcgggggtgttgtagtcatcaccgaagacgctgagctgctgacggataccagcggcggtctgcgtcaggtaggggatgaggttctgaggcacaccattggggagctcaccgatgagtgcagagggatgggctccgatggggttgaagtagcgcaggcggatgaccttgtagggtacaccagcgtagactacgtcgttgaggatctcttcattgatctgcttcgtgttgccgtagggtgagagggctacctggataggcgcttcctcggtgacgggcaggatctcgggctggccgtagacggtacacgacgaggagaagacgatccccttagtgccgtggcgctgcatagcctcgaggaggacgatcagtgagagcacgttattcttgtagtagagcagaggcttctgtacggattcgccgacagccttgctcgcagcgaagtggatcacgccctggatcgaggggtgagctgtgaagatgcgctcgatagctgcctcgtcattgcagtcagcctcatagaagatggggcgaatgccggtgatcgcttcgatgccatcaaggacctcgatattggagttcgacaggttgtcaatgctgacgacctgatagccagcctggatcagttcgacggtggtgtgagagccgatgtagccggtaccgccagtgacgagaatggttcctttcattgtcttactttgtggagtctattataatgtagtgttgatttcttcgatgtagctgaggagttcgtcacgccccatacgctcctccgaggaggtgacgaagatcggggggagctcctcccactcttcgtgaagcttggccttgtaggcctcgacgttggctgcgagacgacccttgctgagcttgtcggccttcgtgaagaccagagcgaaggggacgccctcctcacccagccattggatgaactccaggtcgatcttctgaggatcgtgtcggcagtccaggagcacgaagagcagtaccagctccttgcgctccagtacgtagtcctcgatcatacgtctgaggctatcacggctatccttgccgagacgggcatagccgtagccggggaggtcgacgaggtaccacgcatcgttgatgatgaagtggttgatgagctgcgtcttccctggcttctgcgaggtcatagccagccccttgcgtgcggtgagcatattgatgagcgaagacttcccgacattggagcgcccgatgaaggcgtattcggggagtcccgtcgtcgggcacttctccacacgactattgctgatgacgaactctgcagacttgatgaccataggctttattacgcttatctcgtggctacaaagatacggctaaagaagcaaatagctatatctcggccagctacccttcagggctgacgcatcaaagtgcaagcagttggtactcaatacagcgtgttagccgaacttccttggggaaagtggcgcgaagcaactgcaggaggaggggaaagcaaccagtactggtcactcgagtgaccagtactggttcgcgctccgaccagtactggttgatattagtaaccagtactgcttcgattggtgagcagtactggtcgcaaaatgcctctctattagagcttggtatagagggatataagtaaggggcacgaaccgcagtcggttcgtgccccttacttgtgtgactcttcttgggagagcctgtgatagcgtggcttgtgtatgccttagggcttcttcacgacctccagacgatcgccagcctgcatctgggggaggcgcaggcgaccttggtggaggagtgacttcgtgtctaagggacggccgttgagtcggaggacgtagccacgaccttcgtcaggcagaaggagtgtgtgacgataggcgtggtgtgcctcgaggactaagcggtcgagctgaccagcagaccagctgagtgagcaggtggcattaccgatgacgcgcagaccttcgatgctaccggccttccataccttgggcagtgcaggtagtgggatgatgcagcccgtctcactgctgaggagcatctccatgatgcccgaggagccgccgaagttcccgtcgatctggaagggcggatgcgagctgaagaggttgggctctgtaccactgccgtagggcttattcgtcttggggtcgatggcgtcgacggggcggaggagcatattcagcacctcatacgcaccctcagcatcgcccagtcgtgcgtggaagttcaccttccagcccatagaccaactggtgctgcttgagccacgtgctatgagcgtcttcttcgcgccttcagccagctcgggcgtgccgtgtggcgtgatctcgctcccagggaagagcccgtagagatgcgatacgtggcggtggtgtggctcgacctccttgtagtcctccatccactccatgatacgcccgtcagggccgagggtggtgggcttgagctggcgcagtgccgtggagaggctgtcaacgaaggtgcggtcacgaccgagggccatcgctgcctcgcgcgtcgtggagaagagctcgcgcaggatctgattgtccatcgtcgagccagctgcgacggcgacggccttgccttggggcgtgtagtagctgttctcaggtgaggtcgtggggacattgacgaggtagccgctcttgggatccttgaccagcgtcgtgaggaagaagcgtgctgctccctgcatcacggggtagatgcgctgcaggtaagcacggtcttggctgtagcgatagtggttgtagaggtgctcgcagagccaagcggcggaggtgttcgtggcgccccagctgggatgctcgccaggggcggtgaactgccatacgttgccgaggacgtgggtgacccagcccttagcacgatagaaggtgcgtgccgtacgctctcccgagggtacgatgctctcgacccaatccgtgagcgccccgacggtctcggggagtgcgcccttttcggcgggccagtaattcatctgtaggttgatgttcaggtggtagtccccgttccaaggcgcttggatggtttcggtccatatcccctgcaggttggggggcagagcgccagggcgtgtgctggagatcaggaggtagcggcccagctgcatatagagggcggccagtgctggatctcgctcggggtgctcgtagtaagcgatgaggcggcgctggataggcagcgatgagagtgctgggtcggagccgaggaagcgcgcctgtacacggtccatctgtgcggtgaagcgctggacgtgctcagcgaagaggttggcttcgcccacggccttggcttggagtgtctgctcaatgctgcgcgccatgacgggcaggcgcttgtcgtagtagttggtgttgtgcgcgatgtagagctcgaccgtgggggcattcactacgagtagctcatcgccacgggtgatgagcgtaccgccctgaggtaggacggggcgtacgacgatggcgtagctcgtaccacgaccgcccttgccgtcggggagctggcccgagagcgtcaagaagcctgcttcggctgcggggtgcccattctcagggcgggagagggagaggcgtagcgtgtcacggcgggcctcttcgctgtggttcgtgaggtgtacgacctgcacctcacggccaaggacgctgtacaggcgcttcgtgcgataggcttgcccgccgacgacgaggctctccttgctgacgccttcgctgaggctcagcccacggtaatagccgctgagctcgggagccttatcccaattgaggtgaaggaagccaccgacttggtagctaccataaggggtattcgctccctgtccgcgtccgctccctacgccaccgcagacgaaggtgcgatagatgaggtcttcggcttccttagcacgcccagcgaggaggagcttacggatagcggggagttgcttgtaggcctcggcgttccaagcagtggagtcgaccgagccgctccacatggagctttcgttgagggtgatcctctgatgctgtacgccaccatcggagagcatccccagacggccattgccgagggggagggcctccatcatgctcgtggcggggcgatcgaagaaataggtgaggctctcgcggtaagccttgtctgcagaggtagtcgtcttagcccgcggtgccgccgtcgtggggctggcgaaggcgttgcctgcgctgagggcagctgcgacgagtgtgtagcgaagtagggtagtatatgccataggacttatgcaagcgatatggaagcatcggctcccgtttgcccgcaaagataagccattcttccacccaagcatcagtctcgcctctcagctcgctcctctcagccgttcgctggggctataaaaaggctcagcccgcattccccgagcgtggggaatgcgggctgtaagccttatgaaacttgagggaagggtcgctccttagaggacgccctgctcgagcattgcctgagctaccttgaggaagccagcaacgttagcacccttgacgtagttgatgtagtctccttcacggccatgagccacgcactgttcgtggatgtcgctcatgatctggtggagcttagcatcgacttcttcgttggtccagtagaggtgcatagcgttctgagtcatttcgagaccagaggtagctacaccaccagcgttgactgccttaccaggagcgaagagcatcttcttttctacgaagtactcagcagcttcggccgtacaacccatgttcgacgtttcagctacgatggttacgccgttagcgtggagcatcttagcatcttcttcgttcatttcgttctgcgtagcgcaaggcatagcgatgtctaccttctgctcccaaggcttcttgccagcgaagaactgagcgttggggaacttcttagcgtagtcagagacgacgtcgttaccgctggagcggaggtcgagcagcgcctggaacttctcgggggtgttgataccgtctgggtcgtagacgtagccgtcaggaccagagatggtgacgaccttagcaccgagttcggtagccttctgagctacaccccaagctacgttaccgaagccagagatagctaccgtcttgcccttgaggtcgatgttgtgctgcttgcagatgtgctgtacgaagtagacagcgccgaagcccgtagattcgggacgcagacgagagccaccgaaggtgaagcccttaccggtcatcgtacccgtgtgctcgttagcaaggcgcttgtactgaccgtacatgtaggcgacttcgcgaccacctacaccgatgtcccctgcaggtacgtcggtgtcaggaccgatgtggcgccacagctcgcgcatgaagctctggcagaaagtcatgatttcgcggtcgctcttacccttaggagagaagtcagcaccgcccttaccaccgcccataggcagcgtggtgagtgcattcttgaaggtctgttcgaagccgaggaacttcaggatagagaggttgacagagggatggaagcggataccacccttgtatgggccgatagcgttgttgaactgtacgcggtagccgatgtttacatggactttacctgcatcgtcgatccaaggtacacggaaggtgatgatacggtcgggctctacgaggcgttccatgatagctgccttttcgaactcggggtgctggttgtagacttcttctacagagagaagaacttccttcacagcctggaggaattccttttccccagggtgctttgcctcgagcgaggccaaaatctcagcggatttcataactgatcgatctaatagttttgcgtgtacggctcgtgtaggagccttgatttcacagcaaatatatgcaatgatttttaccttgacaaatgtagtagcttcttttaatttcttaggaaagaagcgcatctacacggcttttctgctatgtgtgaataggggtgtgaaaggcaaaatagctggtgaaaatcgtgtattatccctcggtatcgtggtaaatcttttgcttttcacttcaccctccttctccgtattcatgggcacagtataccgtcctatatataataatgtatagggggaggtgaagacggtggggcgggatgcacctaaccgcggcggaagaagcgggtggggtaaagggagatgaggaaggagagcgccgtcaccgagacgaagatgaggagcatatccagcgggcgcacatccacggggagcgccatcgcttcgataccgctaccagagcggatgatgccgaagcgtgcctgcaggaggcagagtatccagccgaggagcatgccgacgctggtccccgtgagggcgatcagtaggcccacacgacggaagacctgctgcgtgaagctgggtggtgcgccgagagcggtgaagatacggctgtcgtcctgcttctcgatgaggagcatagccagcgagctggcgacattgaaggccgccaggaggaggatgaagaggaggatcagataggtcatgaccttctccatacggatgaggtaggagaggtctgggtgctgctcttcgcggtcgagggcagtgaggcggtcgccgtagagtgccttcacctgctgcttgaagtcggaggtcttgacgcccgagcggaggtgaatgccgagggcagatacctcgctctcctcatagtcgagtacgtcctgtaggtcagctaaggggaggtagatcgcagcatccgtctcttggctcgtgggctgatactgcccgatgacccgtgcctcgaggctttggaaggacgaggcaggggctaagggattggtgaagccgaggcgcttggggaagaggacttcggcagcgggaccattgtgctcggtgcggctgctatcctgcgggagctgaatcgctgctccgagctggataggggtgatgggtgcgccttcggcatctacgagggtcgtcgtcgcatggagctcgggcacatcagctgcgcgccccatagggtagacggaggcaaaggccgagtccaccccgacggcatccacgacccactgctgctcccctacacgtaggagtcccttgctctccaggcgcagggcaatcgcttcggcaccagccttcgtgagcttggtgcggtagtcggggaacttcttcaggtcaaagaccccgccctccgtgtctctcaggacgatgtcggcatcgacctgctctgtagccccgaggatcatcgccacatagccattgtacacgccgacgacagccaccagcgccatagcgacgacagcgatggcgatggcagagagtgccgtcacgtagttcactgcatgtaggcgggtgcggctgaagaggtagcggagggctatgcggaagctgagcacgggcgagaggcggggagtggggaggtcgttacttgtcgttcagcccgaggaggctatcgatgtgctcgaggtagtcgagtgagtcatcgatgaagaaggtcagctcggggagcttacgcagctgcttgcctacgcgcaggcccagatcatagcggatggtcttcgcgctggagcgaattgactcgagtagctcttcggccttctccgaggggaagatgctcaggcgcacacgagcgatgctgaggtcggggctcacggtcaccgacgtcacggtgatcagtgtgccggggatgctctgggtctgtatgcggaagaggtcgctgatctccttttggatgagtcgattgattcggctcattcttgtattatccattctttctgtctttttgaattacgcttacaaagttagtcaaagctcgcctcatctcccgactctacgtgggcggtcggcgaaggtccgatggctggctgcctatatgagactgctcccgcgagtcctgccctctatttagagtgctaaggtgtcgcacacccagctccccgatagacctctccgaagtgcccttcgccttattgcgcgtattcctcttattcagcggaggagaaagtgtccttctcgtgaataaaaaagtgccttcccgtagcggtttttctctgtctacgcacgtagtcttaaagaccaggcacgcaaatccaaatatccacgtacgtagatattagatccacgtacgtagtccaaacttatttgccactcgttcacaactttttatccctatgcggagcaacaacctaatagaggtcatttcacaaagctatataggaatcagtccaaagctatatagctttcttcgccatcctatatagctctacccacgcacccatatacctataggagaccattgcacaaggccgcctcttcacagctcgtaccttctcctcgaaaagagaagatcccacttgatgcaccctcggatggagcggtatcaagtgggatcttgcttggagtgatgtgccagagagcgtggctctcctaagccgtagtagcttgctagttgccgctagcttcgaccgtgtaaaattcctttgacaatgagtgtaaaggatcagcggtgagggttacttccttctcgtaggtcttaaggtgcttgttccccctgtacagcttcacgctcgtcttcaccttgatggatgcaggggcattatcaggtctgtgtacgatgaatccgacatatagccccgaacccttgtgggtgaatgtcgtgcgataggactttgcgatggggtctttccactcggagtcatagacggtctgaccgacgagcttgccgtcacggtagatgtcagatcccccttgggtgttggcgttgaagtggacgctgatcggagcggatgcactgatcgtgacctcttgcttgaggtctgcgctgccgaagccaccgaattctccgcctggcaggtcactcttgccaccgcaagagctgagcactaaggcaaaggagaagaggagaagagataggatgctgagtcggcgaattgattgttttgtagccattttgcttgtagttgatgatgaggcggaggagggtagacggagctatcctgctccacgataatggttccgttaaatgaattgtacttagggtaggagtgtaagacgggcttcctctcctgccttaattacaacgaggaaatgtatggatatgttgttttctcgcgatgatatgtctgtgtataatatggtgtagtaaataaaagtaaatggattttgcagggtatataccccgaagtcgaggagaaacctcctcaagatagctcgctctgggtgtagggaaagtgggtgtatgatgagcccttctgcgaggtgtaagtcgctcatggatgcggtgttgcttgctcggcagcggggaagttgctacatttgtttcagtgctacggctgatcgtagtggcctgacctctcggtctgatcacaaaaaagaagggtgagaacctcacttaagaggccccaccctggatgttctcacaacggaatgaatccttattgtgattagctttcagatttcgttactgcaaatgtagccatttttcttaatatcagcacaaccaatgcttatgagcaaacatgtacttggtcttgacctcggagtaggatcaatagggtggtgccttatcgccctcgatgcgcagggagatcctgccgaaatcttaggtatgggaagtcgtgtcgtccccttaaataatgctaccaaagcaattgaagcctttaacgcaggggcagccttcacggcgaaccaagagcggacggcgcgccgtacgatgcgccgaggctttgcccgctatcagctgcgtcgctaccgtctgcgtcgggagctggagaaggtcgggatgctccccgatgctgcactcattcagctccctctgctggagctgtgggagctccgcgagcgggcggctaccgctggtcggcgcctgacgctgcccgagctggggcgtgtgctctgccacatcaatcagaagcgtgggtaccggcatgtcaagagcgatgccgctgccatcgtcggtgatgaaggcgagaagaagaagaaggactcgaatagtgcctacctcgctggcatccgtgcgaatgacgagaagctccaggccgagcacaagacggtggggcagtacttcgccgagcagctccgtcagaatcagagtgagagccccacgggcggcatcagctaccgcatcaaggatcagatcttctcccgtcagcgctacatcgatgagtacgatcagattatggcggctcagcgcgtgcactatcccgatatccttacagacgcattcatccggatgctacgcgatgaggtcatcttcatgcaccgcccgctgaagtcctgcaagcacctggtctcgctgtgcgagttcgagaagcaggagaaggtgatgcgcgtccagcaggatgacggcaagggcggtcggcagctcgtcgagcgtaaggtcaagttcggcccgaaggtcgccccgaagtcctcgcccctcttccagctctgccgtatctatgaggcggtgaataatatccgtctgacccgtcccgacggctcgccacgtgacatcacacccgaggaacgtgccaagatagtcgcacatctccagtcaagtgcttcgctatccttcgctgcgctgaagaagcttctcaaggagaaggcactcatcgcagaccagcttacctcgaagaatgggctgaaggggaatagcacgcgggtcgctctcgcctcggctctgcagccctatccgcagtatcaccacctcctcgatatggagctggagacgcgtatgatgagcgtccagctcaccgacgaagagacgggtgaggtcaccgagcgggaggtcgccgtcgtcaccgatagctacgtccgccagcccctctatcgcctgtggcacatcctctactccatcgaggagcgtgatgcgatgcgccgtgctctcatcacgcagctcggtatgaaggaggaggacctggatggtgggctcttggatcagctctatcgtctggacttcgtcaagcctggctacgggaataagtccgcgaagttcatctgcaagctcctcccccagctacagcaggggctgggctatagcgaggcgtgcacagccgtcggctatcgccactcgaatagccccaccagcgaagaaatcgccgagcgcacgcttctggagaagataccgctgctacagcgcaatgagctgcgtcagcccctcgtcgagaagatcctcaaccagatgatcaacctcgtcaatgcactcaaggccgagtacggcgtcgatgaagtccgtgtcgagctggcacgcgagctgaagatgtcgcgtgaggagcgtgagcgtatgacccgtcagaacgacaagagaaagaaggcgaatgataaggtagcagagaggatccgtcagcgtgggctttatccgacgaagcctcgcatccaaaagtacatgctgtgggaggaggctggacgccagtgtctgtattgtggtcagtcaattgaagaggagcagtgtctcaatggggacgatatggaggtcgagcacatcatcccgaagtccgtcctgtacgatgactcctatggtaataagacctgcgcctgccacgaatgtaatcagacgaagggcaatcgcaccgctctcgagtacatccgagcagagggtagggaagccgagtatatgaagcgcatcaatgacctgctaaaggagaagaagatttcctatagcaagcaccagcgtctacgctggctgaaggaggatatcccctccgacttcctcgagcgccagctgcgtctgacgcagtatatctcacgccaagctatggccatcctccagcagggtatccgccgtgtgtctgcgagtgagggcggagtgacagctcggcttcgtagcctctgggggtatggtaagatcctccatacgctcaacctcgatcgctacgactccatgggtgagaccgagcgcgtttctcgggagggggagacgaccgagaagcttcatattacaaattggtcgaagcgcatggaccaccgccaccacgctatcgatgctctcgtcgtggcatgtactcgtcagagttacattcagcgactcaaccgcttaagctctgagtttgggcgggaggataagaagaaggaagatcaggaagcccaggagcagcaggcgacggagaccggtaggctctctaacctagagcgctggctgacccagcgtcctcacttctcggtgcggacagtcagcgataaggtcgccgagatccttatctcctaccgaccagggcagcgcgtcgtcacccgaggacgcaatatctatcgtaagaagacggctgatggtcgagaagtctcctgtgtacagcggggcgtgctggtaccacgaggagaactgatggaggcatcactctatgggaagattatctcccaagggagggagcgtattgtcaagcgctatcctttgcacgaccttaagggggaggtcgtagatccgtgccttcgtgaactcatcacaacgtataatcaagagcttaaatctcgagagaagggggcacctattcctccactttgcttggataaggataagaagcaggaggtgcgctctgtgcggtgctatgcgaaaacactgtctttggataaggctattcctatgtgcttcgatgagaagggagagcccaccgcatttgtaaagtcggcgagtaatcatcacctcgccctctatcgtactcctaagggcaggctcgtggagtctatcgtgaccttttgggatgctgtagaccgtgcacgctatgggatccccttagtcattacgcattcgcgtgaggtcatggagcaagtcctacagcggggagatatcccagagtcggtactgaggtcgctccctccctccgactgggtgtttgttgaatccctacagctgaatgagatggtcatcattgggctgtcggatgaggagctccagcgagccctcgaagtgcaggattatcgtaagctcagtgagcatctctatcgtgtgcagaagctctccgcaggtaagtactttataagatatcatttggatactgatgtagacgaggataataggtcagggcgcatccctaagttctatcagcttagcctggatgcttacaagaagaataatgtacgcaaggtgcgtgtcgaccttcttgggcggatctctctgctctgatgccccccaactaccatgatgaagcacttctcttcgcgcaagcctaccgatgctgttcagctcccaggtctcttcgatatgctatgagatcttggatcggaaaagtcgctaagtaaaggaaaagcccgtggacatccacgggcttttctctttctaaatccttccactaagtgcttgtcgcatagactcctctgcagggtccgctgtattagctactgtgaaagtacgaaatctgaaagctaatcacagccagctgcgtctgcactcgcccgtagttacgctgtattagctactgtgaaagtacgaaatctgaaagctaatcacagcatccccatcatcaaagatactgcatgcccaggctgtattagctactgtgaaagtacgaaatctgaaagctaatcacagcaatcgtgtcttcaagcagagagggttcaaggctgtattagctactgtgaaagtacgaaatctgaaagctaatcacagcaggatcatagacaccaatagccatagtatggctgtattagctactgtgaaagtacgaaatctgaaagctaatcacagcgtgaatgtcacggaagaagttgcgcttatagctgtattagctactgtgaaagtacgaaatctgaaagctaatcacagctattgggtggtgttttcgcactgctactgcactgtgaaagtacgaaatctgaaagctaatcacagctgggtcatgattctagcaatacgcgtacatgctgtattagctactgtgaaagtacgaaatctgaaagctgatcacagcggaaatggtcatttatacgatagttttgaagctgtattagcaagtatgaaggtacgaaatctgaaagctaatcacagccgctcaataatgaggggctgagggtgtcatgctgtattagcaagtatgaaggtacgaaatctgaaagctaatcacagccggttatgatagatataactttggtggctagctttattagcaagtatgaaggtacgaaatctgaaaactaatcacaacaaggtagcctgcatgttctcgttctttacagctgtattagcaagtatgaaggtacggaatccaagtatgaaggtacggaatctgaaagctaatcacaacagagacttgtttactactgcacatctggtagttatggtaatggattgttggtccgcatagggataaaaattgcggacgagtggcagaaaagtttgggctacgtacgtggctctaatatctaagtacgtggatatttggattgacgtacctggtctttaagactacgtgcatagatagaataataccactacgtgaaggagcctttttcttcacgagaaggatactttttcctccgctggataaagaggaatactcgcgataaggcgcagggcttgtgtatcacttcggaggggtataatcgtgtaaaccacttctgtcttcccggctgggtattgcttgccaatcggacggtgtgtgaagctatataggtcgctgggttgacctatataacttcgcttcgtggcctatattggtcacgctgctgacctatataggttgactcgctgaccaatataggttggtgtggccttcttgtagaggagtagatgctatccgcatacagagcctgtggtatgtgcagcgagggaaaagagaatggagtcacggatgactccgtgactccaccatgaagtgtcacccagagaccagcggagcttgaagttatcgcgcttatagtttgctggcgtgctgacagtacaaagataatccttaactttgcactgcgaggtatcctgataaaggaacgtcgctccgattagccctatcttctgtctagagcatagggctaatccttatagtacaagccccactcaagtcgagtggggcttgctgcaaaagcgaacgtacggagcttgaagtgatcgcgccatcggtaaatacgatcgcttcgctgggtgcaaagatagtttgtcttttccttgtctcaccttctatcttcttgctgtagagaagggtaagctgtggaggtggcggagcttgagaggatggggggcactcgctgatagctcccttgatgacaggctttgtactctcggactctgtagagtcgtgggcaagtgggggaagcgtttgcgtatatgaagaagttgtattacctttgcaaccgcaacaaagaaggtggcaatactcttccttagctcagtcggttagagcatctgactgttaatcagagggtccttggttcaagtccaagaggaagagcttctcccgagtatgggcgtggtgaataagccccttctgacgctgcattaagtactcttccttagctcagtcggttagagcatctgactgttaatcagagggtccttggttcaagtccaagaggaagagcttagagaaggaattagattcagggagataccctcaggttcaattacgagaacttgggggtatttccttttatgtcccccgtagctcgtagggtgggacgaaggctatataacgacagcgcccctgctcaccgatggtgggcaggggcgctgcgcgtataggggagtgggatttagagcccgtgttcgccgaggtagcgctcagcttcgatagcggccttacagcctgaggctgctgcagtgaccgcctgacgatagagggggtctgcgacgtcaccagcggcgaagacaccagggacgcgggtgcgtggcgtaggcccttcggtcttgatgtagcccacttcgtcaacctcgacgtagtcagcgaagagctcggaattggggtggtgaccgatagcgaggaagaagccatcgatgggcaggtctacgcgctcttcatcgggctgaccgaggcgcttgacgagatgtgcgccttcgacgccatcttcaccgtagaggcctacggtattgtgctcgtagaggacggtgatcttctcgttggctgcgacgcgctgacgcatgatgtcggaggcacggaggtagtccttgcgcacgatcatgtagacgtgcgaggcgaggctcgccagatagagtgcctcttcgcaggccgtgtcaccgccaccgacgacagcgaccttcttattgcgatagaagaagccatcacaggtagcacaggccgagacgcccatgcctgcgtacttctcttcgtcgggcaggccgaggtacttagcggaagcacccgtagcgatgatgaccgtatcggcttcgacctcgacaccttcctcgaaggtgatgacgtagggagccttagagaggtcagccttcgtcgccagaccagagcggatctctgtaccgaagcgcagggcctgattgcggaggtcctgggtgagtgctgggccggtgaccccctcgggatagccagggaagttctctacatccgtggtctgcgtgagctgtcctccaggctggatgccttcgtagaggagtggggagaggttggcacgtgaggcatagatggctgcagtgtagccagcggggccggagccgatgatgaggcagcggcgatgttctctactcatacttgcgtagtctatatgtgatggtgatagaaataggggcgagtcttagcgcatatcgcggagcttcttctggagctcttggcgagcgaagaagatgcggctcttgaccgtaccgagggggatgccgagggtatcggcgatctcgttgtacttatacccagcgacaaacatggagaaaggctccttgagtgaaggctgcagctcggcgatagcacccgtgatctccttgatatccatggagccttcgggggtgttgtgcccgccttcgctaagcagaggtacgttgtaagcgtcgacgttggggtcaatgaagctctgcgtgcgcacgagcttgtggtagttgttgatgaagatattacgcatgatcttcagcacccaccccttgaagttgacgttgtcgacgaacttatcgtagttgttcaggacgcgcagcgtagtgtcttgcgtcaggtcttctgcatcggcttcgtccttcgtcagcgtacgcgcgaagttcttcatatagtcctgcatgccgatcaggtccttctgtatctgtagtacgtccatgtctgtaatgctctttttgtatagtgaggcggtgcgccgaggggcaatgtggcgagccgtttaatatcttttttacaaagatactattaattcttccacaaaaagtacggaactttatataggcgtattgatatactcaatatagagcgcatcaccagcggatgggcaccttgccccactgggtgaggtaggcattcgtttggctgaagtgacggcatccgaagaagccacgatgagccgagagcggggagggatgtggtgcttcgagtacgagatggcgggtgcgatcgatcatacttcccttgcgtcgggcagggcttccccaaaggagaaagacgacgtggtcacagctacggttgatcgtctcgatgatagcatcggtgaaggtctcccagccgaggccctgatggctcgctgccataccggcgcggacggtgagggtggtgttgaggaggaggacgccctgctccgcccacggcaggaggtgcccgtcagggatgatggagggctggccgaggtcggaggcgatctccttcttgatgttgatgaggctcggaggtatggcgacgcccgctggtacggagaaggctaagccctcggcttgccctgcaccgtggtaggggtcttgccctaagatgacgacgcgcacctcggggagggggcaggcatcgagggcacggaagatgagccctccagggggatagatagggccttcatgctggtaagcctggcggatgcggtcggtgaggatgctgaagtagagcttgtcgaactcaggtgcaagggcggtacgccagctctcgtcgaggcggatgttcatcgtgtagtcgggaagaggggtggaaggtctgcggagaggatctgatggacgaggccacgcaggtctccgtgctgtgcggtgtagaagagggcgtgccctacggcggcgagggcatcaaggtcattggcaccgtcgcccgtatagagtgtcgaggtgagcgcccctgcagtccactcctcgaggaaggcacgcttgccctcggcatcaatgatagcctcgggatcaagtccatcgaagtcgccgtcagcggtatagcgtacggcactccctacaaaggcggagagcccaactcgctcacagatatcttcgacgaagggctggtaagcccccgtgacgatagccgtagggagagagagctcgcggaggagaagcgtggtgtcagtggggagggtgatgctgcggatgactgagtgaagcgcctcacgggagagcccacgaaggagctcagtgcggtgcatgaagctctcacggaagggtgtggcgcctgccatagccgcttcggtcagggcagtcatctcctccgagcgatctgagagacgtgccagctcgggcagcagctctgtcgtcgtgagtgtgccgtcgaggtcgaaggcgacgtgcgtgatctcgtctgtggcactcgtggaggggaggtagaaggcgccgtgcgtagcgcgcccccaggggatgaggcgggtgaggagctcacggcgtagctccgtctcactcacgcttcgctccgtaggatagctgtagagcctgccctgtggagtgtccgtgatacttgccttcggtgtagcgcctatcgtctcagagaggagagctctgagctgctgatcctctccgtccgtagggcgagagaagagatagaggtgctgcacgtggggcatcgaggcggcgtgagggtatgtgtatataaagcaagagtgcttgacttcgataagccaagcactcttcagttttgggggtggaagatgggattcgaacccacgacacctggaaccacaatccagtgctctaaccaactgagctacaaccaccatgtaaatgctctgcttttcgcttgagcactgcaaaggtaatactactttctcaattcaccaaacctatcgctcaatggcggcttcgaggtcgtgccatagccgttcgtcaggtacgggagccgtgagtgtgagggcttccttgctcacggggtgcgtgaaggatatctgtctggaaagtaggctgatactcccgccggggttgctgcgaggtgcgccgtatttcaggtcgcccttgatggggcagccgagggcagcgagctggcaacggatctgatgatgacggcccgtgtggagctcgatctcgaggagatgatagtgttcgcccgaggccagtaggcggtaggagaggcgggcgagcttggcgccaggcgtcgcagcgccttggcgagccacgtagctcttgttctgcgactcattgcgcacgaggtactgctcgagggtgtcggagtgcttcggcgggcgggcggtgacgacggcccagtagcgcttcgagacgtctcccgtgcggaagagctcgttcatgcggctgagtgccttcgacgtcttggcgaagaggacgagaccacccacggggcggtccaagcgatggatcacgccgaggtacacgttgcctggcttgttgtacttctccttgagccaacccttgagggcttcgctcatcggctcatcgcccgtcttgtcgccctggacgatttcgccggggcgcttgctgacgcagaggaggtggttgtcttcgtagacgacgataggcttatacatacggggatatggggaggggagacttagtccccgatgaaggtgcggttgagtacctcgcggtagctgttgaagatcgcgctcttgctgatgaagccgaggtagcgcccttcctcatcgacgacgggcatcttccacgccttcgtctcgtcgaagaggtgcatgacctccgtcatcggggtcgctgaggagaccttgacctcgggagtgaccatgatcttacgcaccttgtagcgctcatagagctcggggcggaacataatgttgcgcacattatccagctcgacgatgccgacgagtaccccgcgctcgtcgaccacggggaaggagttgcggtgactcaccgagatgacgctgaccatctcaccgagggtcatgtcgggggagacgacctcgaagtcacgctccagcacgctctccagattcatcagcgtcagtacggccgtatccttctgatgtgtgaggagcttgccctgctctgccaagcggagcgagtagatactgtggggcatgaagatgcggatcgtggcgaaggaggtcagcgacacgagcatcagtggcaggaagaggttgtaccctcccgagagctcagcgatgaggaagacacccgtcagtggggcgtgcatcacgccagcgatcagccctgccataccgagcaggatgtagttcttcggagagatgaagacgttgagcgaactgaagtagttcaccagataggagaagatgaagcccgtgagcccacccatgaagagggtaggagcgaagagcccgccacagccaccgcccgagttcgtcgctacggaggcgaagaccttgaagaggacggtgaggaggaagaaagcgaagacgacccagtaggagttcgagaacgcctcgaagatactcccatcgaggagctgtgtgtactgcccatccaagaggatattcaccgagtcatacccttcgccatagagtggagggaagacgaagatgagcagggagaggatagctgccgagatgaggtagcgcaggcggatgtccttgatgcgcttcagctcgctctcgaagcggaacatcgtcttcgagaagtacagcgacatcagcccgcacaccacgcccagcaggatcatcagcgggatgcgctcgatatgataggggtcggtctggatgaactggaagaggatctccttccctgagagcacgtaggccacggcagcagccgagacggagctgaccaggagagggaggacggaggccatcgtgaggtcaaggagtaggacctcgatgacgaagacaagccctgtgataggtgccttaaagatgcccccgagggcaccagcgacaccacagccgatgaggagcataaggttacgctgctcgagtcggaagagacgtccgaagttcgaccccacggctgcacccgtcattacgatagggctctcagcccctaccgatcccccgaagctaatggtgagggcactggctatgatggagctccaggtgttgtgcggcttgatgcggctcttacgctgagagatggagctgagcaccttcgttaccccatggctgatgtcgtcccgcacgatgtagcggacgaagagcagggagaggagaatccccagcgcggggaagagcaggtagaggtagtgatgatcctcgatattctggaggatgaagctctcgacgacgtggatgatgaacttgaggaaagcagccacaagcgccatcgtcaccccgatgagaaggctcaggatgaggaggaagtagcgctcgctgatgtggcgctctcgccagctgatgagtcggtcgagcagaggcgtgatggcttgactgaaggcagacatcggcgtgtgcagcggctatgggcgtatgaccttgacctcgcccgtgggcccgagcatgatgatctgagagggctcacgaggcgtctcgtcgctctgacggtacttgacgacatagtctacgccagcgacgatttcggggctgatgcccgagaagaagagcggggtaggctccccgctgatgttggcagaggtggagacgatgggacggcgcaggcgcttgcaaagggcggaggagaagagctcacggctctggcggataccgagggagcccccttcgccgaggaggttagacgctacgcccgtagcatggggatagatgatggtgatggggcgcacggcgagctccatgaggtcataggcgacctcggggacttcgctcaccagacgctcgacttcgtaggtctctgctacgaggacgagcatactcttgctgtcttcgcgacgcttgagctcgtagatacggcgcacggcttcttcgttggtggcatcgcaaccgataccccacaccgtatctgtgggatagaggatgatcccaccgcggcgcagggtctctacagcttcgtccaggtcggctttgtcgtaaggctcttgagtaatcttctttgtgtccatctccatatatataataggtaaggacaaaggtacgaccttttccccgtagtcgctctgcccgaaggggctaatattaattatagcgctttgtagaggaagctcacgaagtcgatgtgtaaacgactactggtctatgtacggacgactattgcttcggggtacaaacgactacttgtttcacatgcgaatgagtagtcgttcgcatacggaagaatactgctttgagtgcaaacgactattgcttttttcttcgctctcctacagcttcactccacttcctcacggacactcggctgaagtgctgtgtcaagcacgaatagcctgcaccttgatgtgggcgccgtgtggacttgtggcttaataaaatcgacttaataaaatcgatataattaaccgtacctttgctatatatctgcatataagggaatatcaagttgcttccgcagctcctcgatatccatcacaagtgtggggcggtctgtcccagcgagcttgtaactaccaccacaaaagcgatgaatagatttacgctaaggctcttcctgttttgtatggcgataggctatgctatcttgggaagtgcgcagacaaaggtcacggggagagtcctcgacgagaaccgccagggagtggatgcagccgtcgtcatgctggtagcttctccaggagatgtcctcgtagagtctgtactcactgatgctgctgggcagtattcgatcctccagcgcaagggggagttcctcctttgtataagggcactgggctataaggaggtgaagagaaagatagctatcgcctcggccgatacactccccgatatccagctggaggtagaggatatttccctaaaggatgtggtcgtcaccgctcgtaagtcccgctcgctgaccagcgcatccaatgggaagatctgga

SEQ ID NO: 3307 - DNA, 23579 bp, synthetic construct
  misc_feature 1..23579: note = Synthetic
  source 1..23579: mol_type = other DNA
ctttacacggggtcatgccgatatcgtggcacgtggtctcgacctctttgatgaggtcatcgttgctattggtaccaatgatgctaagcgtaacctatttactgccgaggagcgtctccagcaaatccagcgttactatgcctctgagtctcgtgtgcgtgtccttacctatacggggctaacggtctcactggctcaagagatgaaggtcaaggtcctcctacgtggggtacgcagtagcactgatatggagtacgagcggacactggctgacctcaaccgtcacattgccgacatggagacggtactcctgcctgcctcccagcggttcacacatattagctctactgtagtgcgtgaactactgcactatggtggagatgtatcgaccttcttacctcaaggattctctcttgaggtcagtctctaatacttcagatgcataatgtctgactggaagaaacgactaggcgtcctctacagcaccgatccaaactatagctacactaccgaggagaatgctcccgaggaggcaacactgcctccagcagagcaacgccttcgcctctccttgtctcgtaaacagcggggagggaaggaggtgactctcgtctctggctttgttggttcaagtgaagatctcgaggtactggggaggacacttcgccagcgttgcggtgttggtggatcagtcaaggatggagagatccttatccagggggatcagcggaccaagctcgtctctattctccaagcccttggatatacgaagacgagaggctaagcccaatacgagcgcagcgtcctaagtaaaggcgggggcaatgaccatcataccttacaatacctgtccctgaatccgttttttaatgggtcttataatggggcgcgatgagttactataagtcgctgtaacgagttaccataactcttaatagcgacttaccgtaactctttgaaacgacttaccacaactcgccgaagcgagttgtggtaagtcgttttttcttccttttgttgtttgctatcttgtttgttatcagtttgttgtatttgtgtctgagagtgctatcctgtggacttctattctgctggttggggatcagtggctgaggatcattttgggttgcttctgctaccacattgggttggtgaaaatgttttgccacgcattgctttactagattggtatgtcaatatattgatgcagatgtggtgtgtgctttctttatcggtatatttctgctggagctcgacctcgagtagccgttatgtaggggcgaagggtgtttgagaggagtatttttcctatcctcatgtcggtgttgctagtttctcaatcttgttttatagacttctatttgcattataaggtggacaaaagttggtattaatgttgtttttaaggaaatttattttgtttctcttgcttcttgtttgaaaaactattgctaactttcgcccaagattaaggggaaatcccttgtgaggaataagtaaaagttataatgtatcataaaacaagacatgacgagatgattacccgctcctagccctcataccagcacacgagggggcggccgcccatcgtgtagtacctaaagaggacaggggtatatgcataaccacaaacgcatgacccaggccagtctacataagctatatcaggaaaagtaaggtcgtacgcaggaggtatatatctctcctgcatctgatcacgccctcgatggcagatttagcctcaggcagatcacgctcacacacactacgactctggaggtaataccatactcctctcagggtgaacactgaaatagaatcaaacttatgagacagaaaatgaaatacgcgatagggctattggctctcttactatttattccagcctgtaagcagaataatgatatagaagagccaacgctagagctttcgacgagctcgctgaccttcgcaaagaatgcatctgaacagaccgtatcagtgcagacaaataaggatagctggaacgctttctcttcccaagaaggatgggttaccctcactcaggttgggacgagccttcaggttaaggtcaaggctaatgacctcggggtagaacgtactgcgtccgtgatcgtgaacgctggtggtttacagcgtcgtatcgccgtcaagcagagtgctgccgatgtaatcatagacctcgataaggaagcggtgacgctacctgtcgcaggcggaacggagaaaataggcttctatagcaatacggagcaggtgaaggtggagcttgcctccgccgtagactggctcacgctggataaggtgacgaagaatagcttcaccatcacagctaaggctaacgatggaacggctaaacgctctgtgaaagttgtactcactgcaggtactgtaaccaaggaagtcgaagtcactcaagaagcaacaagcatctacgtacttcccctccttaagctccctgctgatctctccagtgtttgctcttatgaagtaggccgtggtcacacattggtcaagattcccgatggtctgtttaacaagaccttctatcgcttcttgacgaaaagtgcagcgatgccctttattcagtattccttcgcatccgagactgcaaagggctatacctctgcagctactgtttgccttgatgtgagcttagttaaggataatgcaaactttgatgccttcctcaaggaaaatggtcttgataaaaagactaagagtcaggatgagaaggtgattacctatacgggtaccgaggtgctcttctctctaaaggttgccattgaagccaatggggctgtaattacagctgagtatacaccaaagggacaagataaggattacactaccttcaaggctctacctatgacagatcaggtacagtacatgggggatcgggacctcaagctaccaggtaagaagcaagaagaaatgcggaagatagaggaagaaacatggggtgcagagcgagatccctctgtcactcagaataactacgaccgcttcatcgccaaggggaaggtgtttgacaacgaaagccaccgaggctacttctacgttgtccctagcgcaaagattcctaaggatgatgaatatatcggcgtcgtagaggcttgccaagctatctatccgaatacgacccttgccttctggtctgatgcaatgggacgctactacctgactaaggaagttaaggcactctttgctgatgcacagttccgttactttggtcagcaagaaggggtagatgtcttcctgaacaaggcaaagaaccaagcttatttcctccgtgtcgctaccttccagggtaagcctgccattgaaatgcagtgcatctatcaggatctaagtaagattaaggattcttatagccagagcggtgaactctctattaagctccttactgattacaaggccttccttaaggttaaggctgaagaagccgctacggtacgtagtcttgtgcagcaagtcgttcgtaggcaggttcgctcactcaagtagctagtaccaataatctttccttgagagagggctaggagtagccctctcccaatccaatcaagtgaatccaaaaccctattcttgtttgggagagaaggcttagtgagcctctctcccatgcaggaggggtgaatggtaataatattctagagaaagtagaatgccctaaccgctctgtaccctttcgtatggtctttggtgggatagtaagactaccttctctacatgcagctccttggtaagcactctgtttgtgaaagaatgaatttctttcgtcacccaagagaaaaagaagcatacgcgaggggagcaaatgaacgaatatgcaatcaacctgattagattacgacaatgaaaaggactatactaaccctgtcgcttctgtcgctctgtgccctctcttcatgtaagaaggattttgatgaagcacaacctcgaggtggcgagctccgctccgaagtggcggagacctcttcgtctgctagagagttactccctaccgagggggcagagcttggtgtcttgtacatccgcttacagaaaggctcagagaaaagccttcgtgctctaacctttgagcccaaggaaatcgaactaaaagccctctcttcacctctagctacgtcactccgtagccttggtgcaagtggtatggaaccattgttccccatcgatcctcgctatgaggaacggatgcgtcaagaggggcttgatcgttggtttatcgtgcgctttaacgaacggcatgacctaagggctgcaatgcagaccctccttgataataaagaagttgactacgctgagcccgtatatcccatagcttatcctaatgctaagcctgtggggatatcctcgcttcccgagacgtcaatgtctcaatcgagagggtcctcatttaatgacccaaggctgaaggatcagtggcactacaacaatactgggtcgatcagaggtagtgtccccggtgccgatattagtctcttcaaagcatgggagaccgaagtgggcaagtcaaacgttatcgttgctgttaatgatggtggtattgatgtcgagcatccagacctcgtcgataacctctatgtcaacctagcagagaagaatggagtgaaggataaagatgatgacaacaacggcttcgttgatgatatcaatggcttcaacttcattaagaataatggtactctttatcctgatgatgcttcacatggcacacacgtagcaggtacagtcgccgcccgtaataataacggcatcggtgtctgcggtgtcgctggtggtgatggaactgcaggtactggtgtgaagctgatgagttgtcaagtcttcggtgttggtaatgaaggggcagatgcagcacgtgcttttgtctattcagccaataatggagccgttattagccaaaactcctggggttatcgctatacggcaaatatcacagttattcctccctctatgaaggaagctattgactacttcatcaaatgggcagggtgtgataagaatggcaatcaaaaggcagatgctccaatgaagggagggattgtcatcttcgctgcagggaatgatggtcgtgactacaaatcatacccaggtgcctatgaggctgtcgttgctgtgtcctcgatgaacccggccttcacaaatgctccctactccaatcgtggtgactgggtagatataatggctcctggtggtgatgtgaacttcggagatgcagggcaggtcattagtacactctccaaaaagattacaaagggtgatgagtatggaggtatgcaaggtacgtctatggcttgtccacatgtctcgggtgtagcagctctgattgtctcacacttcggggggcaaggctttactagtgagaaatgtaaacagatcctactcggttcgcttaaaagcaagagtattgatcagacgatttctcgatatgctggtcgcttagggcgtggctacatagatgctagtgcagcctttgcaacgaataagggtaaggctccagcgaagattgcttctatcttcatcgataaagtttcctttgtcacagctaacctttcctttcaagcggtggcagacgaagacgatggtacacctgtagagtatcgtgcgtatctctcgacgagcacgattacagaagcgaaccacgccaactacctactgcgtacgattaatggtatggggtatgctcctgggcacaagctattcctcccactagcaaacctgaaagagaacacgacatattcagtcgctgtcgaagcggttgaccgctgggggcttagctcgggtctaactatctctagcttcacaacgaagaagaataacccaccgcttctcaagctctcacgtgaagacaagattcgagtctctgctgtatcgaagcaatccttctccgtggcgtactctgatccagatgggcagactgtaagcattgacatcagcggagagaagcgtggtgtcagccatcaggtgctagatggtaagattgaatttacgctgcgagcagtagcccctgcaggtaactacagtattaaggtgacagctacggatgagcttggggcaaagaccacgctggatatccccttcgaagtctacacatataaggctccagagttcactgcttcgatgggtaatcagattgttggtgccagtcagcagattaagctcgatgtcgcctccatactgacgtataccgaaggaattaaccttacttactctgctagtgcagtggacggagcggttgctacggcatcaatctctaagacgggagaactcgttatcacaggtcataagcccggtaccactcaggtacaggtggaggtctcagatggtattagttcctctgtacagacgaccatacctgtacgtgtcgtgacgagcacagctgatgcggtctattcggtttatcccatccctgctactacagtactcaaccttgtcatggatccctcccttgaccgagtgcaggttgagattgttagtacgctcggtacatgggtatttgataagacctatacggtcaagggtattggctcaatcaaggtgcctgtgaagacgattgctccaggggcttatgtcctcagggtaaaatctgctaagggtacatatacgaaggggtttgtcaaacaataagcattctgaatagaccatgaacaagttatccatcctgctacttgggactctttgtagcgtagcctctctctccgctcagacgacgaaggctcgctcactacccatcctcgagatggcagttgatacacgctcagccgcactaggggggaatcactatggtgaatcccatacatcgtacctatacgctaaccctacgtcgctactctatagtgatgaaggcaatctctctgcctctgcgagcgcacgcttcttaggtaagattgagggctttgatggatcccgtaacctgtttaatctcgctctaggagctcgactcggagatcatgggttcttcttgggtggacgctacctaggtggactcaagttccaagaggttgaccaagctgagcgggttaagaagacatataccatcgaggactatacgattgatgttggttatgcccttcggttatcatctttgtctgcgtatgtgacggggagctatatctcgacaagcctcaagcgctctgcctcaacgttcgttgtgggggttggagcattctaccgaagtcagcctgctgaagaccatctgggacttagctacaccattggagcaaaggctcagaaccttggtgggagttatcgctatacgagtaaagggtcagatgcgtaccctccagctttctttggtttaggtggtgagttgggctatggcatcagtgcggagcatcatcttgcgcttgctctcggagcagattacttcttctatccatcgaattctcggtctactgccctacacgttggtggtgaatatctattccgccaagcctacgctttgcgcctcggatatttctatgacagtaatggagcgaagcacttctctgcgggtgcaggccttcgtttcaagcccatgaatattgacctcgcttatcttgcttcttcggctgaagggttgaaggctgccttccagctaaccattggggttaatcttggtgtattctagcaagaagtattggacttaatcccccctccttagaattactttgagaaagaagttgatgcttcacaaagggagggaaggagtgaaaagctccatcgtccgtacaataagacaatagagctggtctaagaagttttctgatagaataaacgtaatcactcggctaatcctttgggattggtcgagtgatttgttgtattgagcctcgtctttctatccaatagtttgccccctttatacgagtagctttattgctgagccgatcgatgaagaatgtgaggagaaaaggtttgggagggaagacaatgccttccttgtgtcactgattatcccaagtcaaaccgtttacggatgccttcggagagtagtcggtataactgctccagcttgggtgtgttgtgtaggagcttgaggtgccgctcgataatcatctgatcgccccttcgtgctggacccgtctgtgcctcttgggcagggaggtggtggagcttctcaatcatctcatctaggagtgggaggagagccttagatgggagctgatgggcggagagaagttcctcagctagcgtgatgagataattcgagaagttacatgagaggactgcggctacatgcagagccatgcgtgcctcagagctggcatgatgtacctcgttgcttaggctgtgtgctaaggtctcaatccgagccagtgtggactcattgttggcctcgatatagagaggaacggaggagaagtctaataccttccccttgctgaaggtttgtagaggataaagcacccctgtactgctatggtatttcgtcattgagcagaggtcggtgctccccgatgtgtgtagccaagtgcctgatgtgtggtgagcaagctgtgtccaaagctcaaggagtgcatcatctcggacagtgaagacgtaccagtctgcgtcttgtggtagagagctgaggtcgttggtgctatgaaccccttcgccaagggtagaggctaagtcgcatgctgtcacgccactcgggctgtatatatcggtgacgatatactccgtctcccctacattaagtagatggagggcgcgagctaagtgccaggctacgttgcctgcacctaggaggacgatttgctcttgcttcttcacagggattggtttagctctgggaggcttcctcctctagggctggatagcacccgatatggatctgctcccacctcagttcctccaccgcatgtggggcaaggctggaagctttatgcccaacagcaatgatacataggacctcaagctgatagggaatgcctaaaacattgcgaacgtactcactagcctcttgcccgttagacgtattttgtccgaagacatctgcccagcaggagccgagaccaagggcttctgcttgtagctggatatagcctgcagcgagagaggcatctgctatccaacgctcgcactccatcggagagccaaggatgacgatgccgagtggcacttgcctgaggaagtcagctccatcggggcgcatgtagcttagctctgtcaaggttcctcggctctcgatgagtataaactgtgtggtatgtgctcctcgggatgagggagcccgcagtccagcctctagcagtatctggacatcttcaccggagaggggggtatcggtaaattgccttatggatcggcgactacagatggcaggaagtacctcgtgtgtatggaagacttcaccctgctcaataagttcctgcccgagttcacggacttcattcatccagctgtccttattactcgcgtctgtcatatagcgttgcttgttttgtcgtttagttcgtttgcaaagatacttagcttctaattaaatcgctctctgcctcagtctactttcatgcttgagaagccctgttgacctactataagtcggaggggtgtgacgagttaccataagtcttagtgacgagttgtggtaactcgttttagagagttatggtaactcgtcagagcgagttatggtaagtcgcaaaaaggagttatggtaactcatggaggggaggtcaaggggatcgtgttttgtgttcttgtaaagtgttgattttcacttgtgtatataccgtttgtttggctgttgggtggccttatactttgtggtgtgtatactacccttgctctcttgtgttttttatttgctatttatccgaaaagtcagtaacttagcctgcataacaagggtacctcatgggctggcatgtaaacacaaaagaaaggcgaggcttggagttattacctccgccccccgccttggatgttttcacaacggaatgaaatccttattgtgattagcttcaaatcagtgcctcaaaggtagccaaataatgattaactaacgaaatataagagtactatgggaaagaaagtacttggtcttgacctcggtgtcgggtctatcgggtggtgcctaatcaccctagacaaagatgagaaaccacagagtatcctaggaatggggagccgtatcgtgcccctctctgcggatgatgctacagaatttacccagggtaaggcgatcaccaagaacaagatgcgcacggtagcacgcaccatccgcaagggcatggatcgctaccagctacgacgagaggctctaaagaaggtggtccgtgagcatgggatgctccccgatgaagctctgattaagctccctctactggagctctgggagctacgagcacgagctgctacccccggagagcaactgagcctaaccgaactgggacgcgtgctgctccacatcaatcagaagcgaggctacaaacacgcaaaggcagacgaagccgcagaggctgagaccgagagcaaggccaagaaggaaaaggagagctatgtagctcaagtcaaaggacgttaccaggccctaaaagagaaggggcagaccatcggtcaacacttcgctggggagctaagagctaatcaacaaactacccccagaggcacctactatacctaccgcatcaaggagcaggtctatccccgtgaggcctacatcgaggagtatgaccgcatcatggcagtgcagagggtgttctatcccgagctccttacggacgcactgatcggtaggatacgagaccgcattatcttctatcagcgtcctctgaagtcatgcaagcagttggtctccttctgtgagtttgagaagaaggagaaggtcatacgagtaaaacacaccaacaaggagggcgtcgaagagctcgttgagaagaccatcaccatcggtcccaaggtcgccccgaaatcttcccctatcttccaggtctgcaaggtatgggaatccattcataacatccgcctttactatcctgatggcacagagcgggaactcgtgcaggaggaaaagcaaaagctcttcgactatctccagaagaacgataagctcacgttaaagaacctttacaaaacactcgggatcaaagataaagatgaggaagaggagctctggtgtgataaactactcgagaaggggatcgcagggaatacaactgcagctatcttgcgcaaggcactgaagggatataagcagtatgaaggtctacttaggttcgatctgacgataagggattcacacgaggccgatgaggatggcgttattcgtccaatcattgatgagtcttatcagaatgaacctctctacaagttttggcatatcctttattccatcgaggatagggaagagatgcgcagtgccttgattgggcaactaggcattaaggccgaggacttagatagtgggctgatggatgctctctataagatagactttgtcaagcagggctacgggaacaagtctgctaagtttatctgtaagctccttcctcatctacaagagggtaagatgtatagtgaggcggcagaggctgctgggatgcgacactcggatagtatgactgcccaggagcgagatgaacgtagcctgctggaggaaatccctctcctgcagaagaatgccctacgtcagcctgtggtcgagaaggtccttaaccagatgattaatctcgttaatgcgctcaagagagaacatggagagattgatgaagtgcgtgtagagctagctcgcgagctaaagatgagtcgtgaggagcgagagaagaccacaaagaataacaacgcacgagagaaggagaacaaggatgcagctgagcgcataaaggagtatcgtgttacccctacgaagtcacgtatccagaagtaccacctatgggatgagtctggagggaagtgtatctactgtgacaatcctatgggtgttgagcaattcctcaaaggagaggagattgaggtagagcatatcatcccgaggtcaatcctcttcgatgactctatgtcgaataaggtctgtgcctgtcgctcgtgtaaccaagagaaaggtaatcgctttgcaatggtgtacatcaagtctctagggacggaacaggaacagaaatatatcagtcgggtagaaggccttttccatgctaagaagatatcctactctaagcgtctgcgcctcttgatgctacctgagaatctgcccgaagacttcattgagcgtcatctacgtctcactcagtatatctcccgtgaagcacagggcatcctccgtaaggggatacgactggtgagtgcctccgagggcggtgtcactgctaagctccgccagctgtgggggtatgataatatcctgcgagacctcaacctagagcgatatagatctatgggagagacagaagtcgttaccgtagagcatcgggatggtcagcgtacggatgaacgtattaaggattggtccaagcgaaaggatcatcgccaccacgctgttgatgccctcgtcgtcgcttgtactcggcagagctacatacagcgactcaatagggtgaatgcagaggaagatcgtcaggagatggatgcgtttatcaaggagcaacaagagcagaaaccctccaagaaagagaaactctccctgttggagcattggctcattagacagccacacttcacgaccaaagaggtgatgaagcatgtagaagaaatcctcatttccttccgtccaggcaagcgtaccgtaactcgagggcggaatgtctacaagcgctcaggtaagaccgatgtgcagagggatgtacttatcccacgaggtgcactctccgaggagactgtctatggtgtgatccacgcaggaggtaaagatgaggtcgtatgcaaatacgcactccggggtctaaaagtaaaggatgtcgactacattgtagataaggcgctacaagaaaaggttagagggcgtatctcacaatatggagagaagcaagcctttgcagagcctctttatctagatgaggcaaagacgcaagaggtacgcagtgttcggtgttttacgggtaaggatcagtctaagctcgtaccacttagatacaatattgagggtgaagctgtgggctttgtggcgccagggaacaatcatcacctagccctatataaggatgatgatggaaatgtggttgagtcgattgttaccttctggcaggcagtcgagcgagcccgttatggcttaccgattgtagttgccagtccacgagaggtgatggagaaagctcttgctatcccagggcttccggaatcggttcttaaggctctcccagcctctaatctacgtctgatggaagtgctacgtatgaatgatatgttcctgatcgggatgacagatgaggagattcaagtggcaatagaagccaaggattattcgactctaagccgccacctatatagggtacagaagctttcatctaggtactatgtattccgataccatcttgagacggaggttaaggacgaaaagaatactacaggcaatattcctaagttctataggatagtaagctttaatgcttataataaactcaaccctcgtaaggtgaagatagatctcttggggaggatattgcttgtctaagtctatggattagtatttatgatcaagcgtaccctctactttggtagtcctgcgtacctctccctaaggaataagcagattgaggtacgtcagccctgtgagggggaagctaagcgtccagtacggacgatcccaatagaagatattggggtcgtcctactcgaccatcagcagatcaccatcacccatgggctcctgcatgcactcttagagaataactgcgccgtagtaacgtgttctcctagtcacttgcctgcaggacttctacttcccctcgatgggcacacgctccagaatgagcgcttccgtacgcagctggaggcctcccttcccctacggaagcaactctggcaacaaaccgtgcaggctaagatcctcaatcaagccacactcctcgggcaagtccttggggaacctgcgaagaacctacttgcctgggccaagcaggtgaagagtggcgactcggagaacttagaggctcgagcggcggccttctattggcgcaacctcttcatctcattacctggatttgtgcgtgagcgtgaagaggcggctcccaatgccctacttaactatggctatgcaatattgagagccatcgtcgcccgtgcactcgtcggctgtggtctacttccgacgctgggtatccatcatcataacaagtacaatgcctactgtctagcggatgatatcatggagccctaccgcccctatgtagatcaactggtggtagaaatctgtgaagatgaggttccaactatgcttacgaaggagctaaaggtacagctcctctccatccctacactagatgtcgagatagatggacagcgccatcctttgatggtagctgtttctctgactgctagctctttgctccgctgcttcgaaggagaaattcgtaagatatcttatcctctacttcgatgaaagcaagtcgactaagtgaatatcgtgttatgtgggtcttcgtcttctttgatcttcctacttatactgcactagagcgtaaagctgcctcaggctttcgccaaagtcttctcaaggatggcttttcgatgtttcaatactctatctacatgcgccattgtgcgagtgcggagaatgcagctgtacatgtacgacgagtgaagaatatgctccccgaagaaggagatgtagtgattatgacaatcacagataagcagtttgggatgatggagcacttctcttcgcatattccaactaagccgccagtagctcctccccctcttgatctatttggattttaggaaattcatttctctgatacatagaaaaagccgatggaacaccatcggctttttcttttctataaatcctcgtaaggagctagtgtatagctgaatatctatggtctgttgtactagctattacgaaggtactgaattgaaagctaatcacaaccaataaggagtacgagaggcaagacccccagttgtactagctattacgaaggtactgaattgaaagctaatcacaacccatttgcggtatatttaaccttctggaacgttgtactagctattacgaaggtactgaattgaaagctaatcacaacctggtagggcgcgccaaattccgcttggagttgtactagctattacgaaggtactgaattgaaagctaatcacaacgcttatgcgtacacctattacttactacgggttgtactagctattacgaaggtactgaattgaaagctaatcacaacacacaccacaaaggtatatgaagttttttgttgtactagctattacgaaggtactgaattgaaagctaatcacaacaggtctacaagagcgaagccccaagcctatgttgtactagctattacgaaggtactgaattgaaagctaatcacaacagccatccgcaaatcttgggtagagagcgggttgtactagctattacgaaggtactgaattgaaagctaatcacaactgccatcatccatactgtcgccctctactgttgtactagctattacgaaggtactgaattgaaagctaatcacaactggtagattcgaccttccgagtgcaagatggttgtactagctattacgaaggtactgaattgaaagctaatcacaacatgacggcttggcgtcgcttcgccaattcagttgtactagctattacgaaggtactgaattgaaagctaatcacaactacgatggaaagcttcctgttcgacctttggttgtactagctattacgaaggtactgaattgaaagctaatcacaactaaggtctataacgacttttattctcacaagttgtactagctattacgaaggtactgaattgaaagctaatcacaaccttcgagatatgcaacctcttcaaaagcagttgtactagctattacgaaggtactgaattgaaagctaatcacaactgaataccgccgcttttgttcgtcttcgtggttgtactagctattacgaaggtactgaattgaaagctaatcacaacatgtggatagttacgttacggatgccactagttgtactagctattacgaaggtactgaattgaaagctaatcacaacgggcagttgcgattggcttgtgcggtgcttgttgtactagctattacgaaggtactgaattgaaagctaatcacaactacaggaagtgttaacattgaatctttttagttgtactagctattacgaaggtactgaattgaaagctaatcacaacctacaattcttaatatcggtgcttctacttgttgtactagctattacgaaggtactgaattgaaagctaatcacaacttgctcgaataaaagtcgttgtaaacttttgttgtactagctattacgaaggtactgaattgaaagctaatcacaacccagtggcataagcgtcaaatgcagtttccgttgtactagctattacgaaggtactgaattgaaagctaatcacaacgttccttaccgtgtgctttggcgtgattgggttgtactagctattacgaaggtactgaattgaaagctaatcacaaccgctgggcatcacgagtatctctactgatgttgtactagctattacgaaggtactgaattgaaagctaatcacaactgacatacagagcatttgccacaggaggctgttgtactagctattacgaaggtactgaattgaaagctaatcacaacaaaaataatccaactttgaatcctttcaggttgtactagctattacgaaggtactgaattgaaagctaatcacaactcgacgcggatagtagcacgctcgatcaaggttgtactagctattacgaaggtactgaattgaaagctaatcacaactcaggcgctgtttggttcgagttttaagaagttgtactagctattacgaaggtactgaattgaaagctaatcacaactagctccgccattgcccttgtacgggcgtcgttgtactagctattacgaaggtactgaattgaaagctaatcacaacgggcggataggcatgcaatcgagtatgtaagttgtactagctattacgaaggtactgaattgaaagctaatcacaacgggttgcctcggaagataccctgcttgccgttgtactagctattacgaaggtactgaattgaaagctaatcacaactacacacatctgaattgtttcgacttggcgttgtactagctattatgaaggtactgaattgaaagctaatcacaaccgaactctcaagtaaacgctgtgtctgattgttgtactagctattacgaaggtactgaatgcttagcctcgggaatagggctagcgggaaatgtgcattggagcagggatggtagaggtaggataagagggtgtatcctagttgggaggagaatagccatgcgaggcttatgctatttatggtgggatacagtatcccttacgctatggttttcacggtaggtctttgtacctttgccttgggggtacactgggggtagagtgatttgccctctagactgcccggcaaagtgataacatattacacttcattatcaggatgaaaagaactactatctgctttactctcgcagccttgtttatggggagcttgtgtacccaggcacaagtactgacccgaggcaaaagctatggaacgcacccgcttactactccagtcctcattgattccgtcaatctaagtaagacgagctttgacctgacgagcttcatcaaacgtccttatgagattgaaggaagacgctctacctctgtagctgcttcaccaaaggggatatttgccgtaccccgaggggctaaccccagtgatgcttcgctctcagtctactcatttagtgctgtttctcctacatacacaaagggaaatctgcgtctctatggacgaggtcgctatgcgatctatgccgatggtgcactccttagctcgaatgagaaggcacctgtgtctagcgatactgttccggctgttacagcacctcttacgctagaggctacgcataaggagctggttgtaaaggtgcttcgtatgcccaaggatagcgtgaaagctgacttcaaacttgtttttgtgccagaggagaagttcgctcctctagactcagtagcctcaatgaatggtacccacttcatcgactggaagtatatcacacatggcaagcgcatttactcagtttcggtatctccctctggtaagtatgcgtctgtggtgtgggcagatcgtgtaccgaagaagggagctacctatgtagacattcgtgatgcctcgggtaaggtacttcgctcgacacaagggctgtatggtgcccgctggatgcctaagcaggattacctcatcctagagcgagggaatgggaacaagcgtcagcttttaaagatccatcccgtgacgggagagcagagtgtgtgggtcgataatctgcctggctctagctatacgattagccctgatgagaagacgatttacttctacgagcaaggaaagggcccagggaaaaatccacttgctatacgccgtatttctcctgatgataggcagcccggctggcgtgatcgtacagagatttatcagtatgatattgcctcggggatatatatgcctttgacctatggtgtacgaagcaataatatctatgatatttctgaggatggctcgaagctcctactcggtgtacacgggatggattggacgaagacgccctatggacacacgacgatcctactctatacccctgctacgtctcgggtagacacgctgattaaggatgaaatagagatagctgacgtttcctttatcccggggacgaaggagttactcatcactgcttcacccaatagctttaattccgcaggtagcaccttgccggaaggggagtggggaaatggatatgagcgagagcttctccgcttcaacatggagaccaagcaagtagtacctctgaccaaggacttcgcccctagcattgcagatgtgaagggatatgtcgccaagcagaaggcgttctacttctctgcggataatgggagtcgtaaatccctttatcgattagatatcgctacgaataagattactccgctcaatgctagcgaagaggttgtgcgaagctttagcctctcgagtacagggaatgcactttggtatgtagggcagagcctcaacaatgccgatcgtctctatcgactagaggctcctggtaagagtcgccttgtctgggatctctctagcgagaagctccgtgatgtgcgttttactccagctaagagctttgtctaccgtactcctgatgaagtcagtattgatggttggtactacctccccccgaactttgatccaaagaagaagtaccccatgattgtctattactatggcggtacgattcctctgactcgtgagctggagacaacctacgatttggcgatgtttgcctctcagggctatgtggcactctctctgaacccaagaggctgtactggctatgggcaggcattcgccgctgaccatctgaatgcctggggtacaaagacagcagatgatatcattggggctgtgaaagccttcactgaggagcatggcttcgttgatgaaaagaaaattgggtgctgtggcgcaagctacgggggcttcatgacgcagtatctgcagacgaagaccgacatttttgctgcagccatcagtcacgctggcattagttccatctcgagctactgggcaggaggctactggggtattgcatacagctcggtagcatctgctgggagctatccgtggaataacccagagctctatacgaagcatagcccgcttttcaatgcagataagatccacacacctctcctgctcttgcatggtacgtccgatgtgaatgtaccgcctagtgagagtacggcgctctataactcgctgaagatcctcggtcgtaccgtagagctggtcgagtttacaggtgaagaccaccatatcctagagcctgagcggaaagacatttggatgaagaccatgtttgcgtggttcgctaagtatcttcaggataagccccagtggtgggatgctttgtatcccaagacggtgtacgagcagtaaatagtcactcgttcccctaaataagaggtgataagatgtctagtccatccgccacagttgatgtggtggatggactagactctttttcgtctcttatggatatgtactaggtgcactatctcgctgtttgatagtaggctacaaagaactttacgtatatttgtcgtacactgttcccttgacctaccgaggggataagcaaaacaatagacattatggaaccgatcatcccacacgtcaccaacgagaccgaccctctgaaggtcgtggtactcggtctgcctcacagcctcggaggagtgcccaagctcaccgagacttacgacgccaagagctacgaggcagttaataaaggtttttatccgagagagagcgacgtcatacatgagatgaatgaggtgcttgctattctccagcgctatggggtagaggtgcttcgccctgcacccctagagaactataatcagatttttgcccgtgatgtgggcttcacgattgataataccttcttcatctctaacctcattcccgaccgagccttagagacggatgcctttgctacttcgatcttgcctcgcatagcacaagaccatatagagcgtttgcccgaagaggtgcatactgagggtggggatatcttgctctatgatgatgtgctcttcgtggggacctatttggggccggattatcctgacttcaagactgcccgcaccaatcgctatgctattgactacctgcgagagcggttcccccgtaagcatattgtcccactagagctgaggaagcatgaccaagatccacgtaagtcggtcttgcatcttgactgcgccttccagccaatatcgaagggaagggctcttatttataaggaggggttcctacataagaaagatgtaggtctcttggaggaagtctttgggcgtgataacctctttgctgttaccccagaggaggcctattacatgaatacgaatatcttttccctaggcccagaggcgatcattagtgaccaacacttcatccgtctgaaccagttcctgcgctcagcctggggaatgaccgtcgaggaagctccctatcaagaaatctcgaagatggggggactcctacgctgctccactatgccacttgtgcgtggggcaaagtaagagactgctcagctatttgtgtgtagcccctgcatccttccctagcgagcctagggggaggtgtgggggcttctccgtctgtccttctacgctctgctgtatctttgtagccatataaagaggaaagagatgctagtaaatgagatattctacagtctacagggagaggggctgaatatggggcgagcctcgatattcattcgcttgagtaaatgtaatctgagctgtagcttctgtgatacggagtttgagagcggcgtggagatgacgctggaggaggtgagggatcggatagcccaatggccaggtaggcgcatcatctggacggggggagagcctaccctacagctgacggaggagatcgtggcttactttaaggctcttggctatcatcagtccatcgagacaaacggtacacgtcgcccccctcgtgggctagactacatcacttgtagcccgaagaaggaagcgatgcgcctgctctcccgtaatttccctgatggtgtgaatgagttccgctttcctatagggaaggatattgacttacccccaaacattagtgaccttccgcctgctgaggcctatctccttagccccatcttcgtcggtgagacccagggtgaagtagatagctctgccgtagagctctgtgtggattatatcctcaagcatcccgaatggaggctcagcatccagatgcacaaactcattcacatcccctagggccttatgcgcttccctctatccctttaccttgctatccttaccctgtctttccttctccctgcctgtacgtctcgtcttttgagggaggcagagactgcggaggctcgtggggaatatcaccaagctatggggctgtataaacagctctaccagcgtacacctagggagcaaagggcagagaaggcacgcctagcgtttcgctcgggggagaatgctcggtgtctcagagcttttgcctctgcccgcacgagctatcactcagctctaaagtatcaatatcccgatagcctgctcctcattcgtcttgcggaggtcgcattggctacgggggcatatcaggagaccttgacctttgctcggcgttaccttcgctatgattctgcgagccaagaggctcgtctgctggaggagagtgctggcttcgccctccgtacggctcaccccagtttcccctctgcattgcgctataaggtcacccaatcggggcacttgtcctcctcccggagtgactatggtgtcgcctactcgcctgaggggaaaacgatttatttcactagtcataggcgcccctcggcaggggttagtacccagagtccgatcacgggtgaaggtctaggacgtatctacgccctgcatcagggagcgaatgcctcttggtcgggtaaggtagatacactcgcagggctgacttcgccccagagtgacataggcacccctacctttacccccgatgggcgaacaatgtattatacacgctcagagcaggggaaagagggggtacacactgctcagatttatgtggcatcacagggtgaagatgggacttggagtgaggggaagccgttctctatctttgaggatagtacgatactagttgcccatccttcgttaagcgcctcggggaagacccttttttttgtctctgatgtagctgggggtaggggaggtaaagatctctatcgtatgagcctagagcatggaggaataggtgctatctataacctcggtgagcaagtaaatagtcctcgggatgagctcttcccctatgctgtctccgatagcgtggtctactttgcctcagagggctggatgggctatggggggctagatgtctaccgtgctacgctcctgcctgatggaggctatgaactccaccatctaccttatcccattaacacccatgcggacgactatggctttgccccggctcccatcgtggacgagctgtctggggggaagagcctccgagaggtaggtttcctagcctcctcccgtgatgacctaaggggggtaccgcatctctatcgctttgagttggagaaggttgagaccattattgagggaattgtctctgaccgagaggggtaccctctctcaggggtaaccctaagcctcgtaggcaatcgccgtgaggggcagatgcaggccgtgacgacagaccaacaagggagctaccgcctcccagcctccgctgataccgactatgtgatgctggcctcggcgcagggctacctcaatcagtatgtacgcctacacaccgatccct

SEQ ID NO: 3308 - DNA, 23576 bp, synthetic construct
  misc_feature 1..23576: note = Synthetic
  source 1..23576: mol_type = other DNA
gaaggctatcgcctcacgatcggggctcggggtattgatctcgtcgctcgtgatgaagctgggcttcgtcagggggcacagagtctcctgcagatcatcgggcagtatggctctcgcctccctcagctctcgatcgttgactcggcacgtcttgcttatcgaggggtgatgctcgatgtctctcgccacttcatgaagacggatatgatcatccgtctcctcgatgagatggctcgctacaagctcaatcgcttccactggcacctcgtcgatgggggagggtggcgcttcccctcggagaagtatcctctgctgacgaagaaggcggccttccgtaccgagacggactgggataagtggtggcagaaggatcgccgctttgtcgacgaaggtaccccaggtgcttacgggggctactacacgaaggaagagatcctgcgtgtcgtgcgtcatgccgagcagcttgggatcacggtgatccctgagatcgaactcccagggcacagcaacgaactcttctccgcttaccccgagctaagctgcctcaataagtgggccttcgagaactccgatgtatgtattggcaacgagaagaccttcaccttctttgaggatatcctcgatgaagtcatggcgctcttcccctccaagtacatccatatcggaggagacgaagctacgatgaggcactggggcgaatgtgctaagtgtaccgagcgtaagcgtgtcgaaggtctgaaggacgatcacgagctccagagctacatgatccgccgcatcgagaagtacctcaacagtaagggacgcaagctcatcggctgggacgagatcctcatgggtggtcttgcgcctgatgctacggtcatgagctggcgtggtgaagaagggggcatcaaggcggctaaagaagggcatgatgtcgtcctcaccccggggagtcatgtctacctagacttctatcagagagaagctgacggcgagccacgtgctaacggaggcttcactacgctggagaaggtctattcctacaaccccatgccgaaggaacttacacctagtgaagctaagtacatcctcggtgtgcaggccaacctctggacagagtacgtcctcgacgaaccccatgccgagtacatgctcttcccccgtgtgctggcgctggccgaagttgcttggaccccacagtccgagcgtgactataccagcttccttcgccgtacgaactaccatgtgcctgccctcatcaagcgaggggtcaatgcctatccgctccgccacatcgctgcgctgaacgaagtcgatactactcgtcatgaagtctccgttcgcctcacgagcgagcgcccagctgcacagattcgctatacggtagacggcactgagcctactgcctcctcacccgtctatacgggtcagcccattacctcttgtgactcgatcctcctcgtcgctcgactcttcgatgggtcaaaggctcttgatgtgcccgagctgcgcttccgctccgactaccataaggggatcgggaagaagatcacctacaacgattgctcgtggaacgagaagtatcccgccggtggtgagcgagctctgctcgatggtgtacgtggtacgcctacctatctcgatgggcgctggcagggcttcacctcacctctggatgtgacgatcgatctgggtaaggaagaggagctgagtcatatcttcgccaagttcatgcaggagcgcatccagtgggtctacatgcctggggatgtggagatcctcctgagcagtgatggacagaacttccgtagcgtcgctaagcaagctacccgcacgagtgaagagatctaccagcctgtcttcgagaccttctccttcccgatgaaggagcgtgctcgctacgtgcgtctcaaggcctcgaatgctcgccccaaggggaacttcatcttctgtgatgagatcgtgatccattaggacgcattccactagctccgctgacttaggcggtagctgacgaagcttccatgccgagaggctggtccttgagcggatcacctctgggtatggaagctttttatttacccccttctcagaaacctactgtgggtcgccgagacgacccacggtaggtcggttgaccgacccacagtaggttttttcggcgacctaccgtaggtccctttttgagcatttgaagagcacgctccgaagcgctgtagtagccccatgcctaggacggggtttttactcgaagaaaggttagtagatgacgaggtggcagccttggggttaggcttccttcttcggagctacagaatgagctcaagtagccaagccgaatagggcgcacggctgctctctttaggggagcgttgctcagctatgacgtgtccgtcccgctggcacctcgggtattgctcctgattctgtacctttgtctcatatttcatactaataagtaagcacagagaccgatgacactttcgcatccctatcgtcgccttctactcctctcgatggccctactcttcatctatgtggggggaagtgcgcagggaaaccgacgcatacgtgagcacgaggtgcagcgtgaagagaccgtctacagcatagcccgcaagtataatgtccccatcgataagatctacgaactcaatccttgggctcgtcagcagatcaaggtcggggataagctcctcatcccttccgcctcggcggctacacctcagacgactacttcgcagaagggacggaagcacaaagtagagtctggagaaaccctctacggcatcagccgcaactatggggtggatctggtggatctcctcagagccaacccaggggttacctcttctaatgtccaggtgggcatggagctcatcatccctacggggaaggctgatagccccgtgatcaatgagcctgctcccgccccgcaggagcctaccactccttcgcccgtggctacttcccagacccgcatccttgtgcttctcccactcaagcaggataagcactatgtggagttctacgaaggcttccttctcgggatgtaccagctgaagaaggctgggatctccatgcagctgaccacgctcgatgtccccagcgatgcggcactcaatgcctacatcgaagagggcaagctccgagggaaggatctggtcgtcggcggtgtcacggaggggcagatacgagctatcgcagccgcttcggggtatagctactacatcatcccctttagcaaggcaggtgccctagagacgggggatggtcgtgtcgtcctagcgaatgcacatacctctacgatccttgatcgggtgatcccagccttcctgcagcgctaccgagggaaggaagtgatcttcacccatcgcttgggagatacggaggatggcttcgtgacccagcttcgttcagctctgggtcgagcaggtatctccagccgctctctagagcttggccgaggcgctgtcagcttcggaagcaatgccgtggtcgtgcccatctcgcccgatcgcaatcttgcccaagcgaccatggctgctatcggtagtcagacagcgggtgttagcctcttcggctatccccagtggcaggcctatggcacgcagttccagcagaacctacgtcgctacaatacgacgatctatacgagcttcttcttcgacccaacactccctgagtcgaaggacttcctcagccagttcacgggctggttcagccacaaggtgagcaactcctatcccaagtacagcgtcctaggctatgatctggcacgctacttcatccgtgcctactcgatgtatgggcagggctttgtgaacaacatgtcctctgtcccctccgacgggcttcagctagacttccatctccagcgaggtgaggggaatgtctacaccaacgatcgcttcttcttcgtctactatccttcttcaggcgctatcctccgtgaagcacattagtcgtcagctcctcttagcgttgcttctgcctctgctccttgccagtccgctttgggcgcagggggaagcgaagcagtccttctctcaatcgctctccatcggagcacacggagggatcacggctagccgcttcaccttcgtgccctcggtgcgccagcgcatccacgtgggttatgtcggagggctcgctctgcgctacgacattgagcggggtgcttctctgcaggtggaacttaactatctgcggggcggatggctagagaagtatgacttgcgttcgacgagctatgcccgacaccttgattatctggagctcccgttcctttcgcatctttacttccgctcgggtggtatacgtctcttcctcaatctagggcctttcgtcgggtatcacctcagcgaatcctcagaggtctcaggcgaggcgaatatgagcgagcgtgatcttgctcggcacaagatggtggtcaccgaccgcctcttctgggggctgggcggaggccctggggtcagtgtcgctcttggctcaagacagcggatcgagctcgaaggacgcttcgtctacgggctgggcaatatctggagtacccgccgaggatcggcctatgtccagtcctcagagatgcgcttcggggccacgctcaactacttcttccgtctctaagcttcggggataagggcaaggggcaatgcagaatttcgctatctttgcccccgtctggagcgctctgaagctccttgactgaggccctcgtagttcaacggatagaacaagaatttcctaaattttagatagcagttcgattctgctcgggggtacaagaataaaatagatgctgttatgacctagcccctagtgtagcttcaagtggaagtcactaggggctcttcttaatgaggtaagcagagtaaaatcattttcactagatggagattctagcctcaataatcccacttatattatggatagcaagatcatcttatacaccacagatgctggggatgtgaacgtacaagttcgctacgaggatgggagcttctggctcacgcaaaagcggatggcggatctcttcggggtgaatgtgcggacgatcaacgagcatctgaagaatatctttgcgtcgggtgaactcctcgaagagggaactatccggaagatccggatagttcaaaccgaaggtacacgagaggtcgagcgagatatgtccttttatcccctagaggcaatcattgcagtgggctacagagtcaattctgtagaggctaccctcttccgtcagtgggcgacaactacacttaatgcctttattacaaaggggtatgttctcgacaagaatcgtctcaaacaaggggagagcttcgggcatgattatttccaagagttacttgaagatatacgtgagatccgtgctagtgaacgtcgcttctatcaaaagatcaccgatatctatgcactctcgatcgattacgatagccaagctcaagaaactaagcgtttctttgcgtcggtgcaaaataaacttcattgggctatatcgggacagacagcggcagagatcatctaccatggagcaaatgcagcgctacctcacatggggctgatgacttggagacgagcccctcagggtaaagtgatgaagtcagatataggtattgctaagaactaccttagccatacgcagatgagtggtatcaatcgcttggtatctgcatatcttgatctagccgaggatagagccctgcgtgagatccctatgagaatgcaagactggagcaagcttcttgatgacttccttagtattgcgggacgccctgtgttagaaggggctgggagtatctctgctctagaagctaagctcaaggctgagcgggagtatgagactttccgaaagagacaagacttggatttcgtctctgactttgacctagaggtcaagcgcctcaacgggaaggactagcatgttgtctccctaaaagataaagatcgagctgatatagtctatttatgatagtttactagaagagctcgtcaagatgacaccccctctgtacatcagcactgtacagagggggtatttctttgggtggatgtcgggtgtgcggagctcctcccttctgctggggaccgcccgtcagcataataacgaaaagtagctacctttgtaccgagcgtcacttgttcgctctgactgaaaaagagacaatctgtgtgtcccatcttggcctccctaatatccttatctgggggagtgagcttgggacagaatacgacaaagattatagatgaaacataagatcaagccctggctttggctcgctttctcgctcgtctggctgggcatcttaggcggtatcttcgccatctcaatgggttggataggctatcttcctcccatcgaacagctccagaatccaattgacaagtatgcctcccagatattggcttccgatggggaagtgatcgggtcatttgcccacggaggatcgaaccgtgtccttgtagactataaggatctttcgcctaatctggtcaaggcgcttattgcgaccgaggatgtgcgcttcgagaatcactcggggattgacttccgttcgctggctcgtgctgtcttcaagacggggatccttcagcagaagagtgccggtggggggagtacgttgacccagcagctcgctaagatgctctattcgcctcccagctctaacttcttcactcgtatgatgaagaagccggtcgaatgggttatcgcagccaagctcgagcgcttctacaccaaggaggagatcctagcgatgtacctcaatcagttcgatttcctctacaatgctgtggggatcaagtcggcggctttcacctacttcggtaagacccccgctgagctgaatatccaggaagcagcgatgctcgtcgggatgtgtaagaatccatcgacctataatcccgtcctccgagctaatagcccgctaccgatggagcgacgcaatgtcgtcttccagcagatggagaaggctggttaccttacttctcgtgaagtcgactctctgtctcgcttgcccattaaggtctccttcaatcgtacggaccacaagcagggcatcgctccctacttccgtgagcatctgcgcaagatcatgatggccgagaagcccaaccgtagtgattacgcttcgtggcagtatgcgaagttcagagatgacagcatccagtgggagacaaatccgctctacggctggtgcaataagaaccgcaagtcggatggttccccctacaatatatacaccgatgggttgaagatctatacgacgatcaaccccgtcatgcagcgctatgccgaggaggcagtgcaggagcatatggcagggcatctccagcctgccttcgacagagagcgtaaggctcgaggtggagatcccttcagttcttctctttcggcagagcagcgtaagaagatccttgaccgtgcgatgcgtcagtctgaacgctggcgtttgagcaaggaggatggtctctcggatgaagagatccgctctcagttccatcgcaagacgaagatgcaggtgtggtcttggcaggggagacgtgatacgatcatgacacctcttgactccatccgctatatgaaggggatcctgcgctcaggcttcatggcgatgaatccacacaatggctatgtgctggcctatgtcggggatatcagcttctcccagttccagtacgacatggtctcggatggtcgtcgtcagacggggtcgatcatcaagccttatctctattcgctagccatgattgatggggcttctccctgcgatcaggtgcttcatgtgcagcgtacctaccgtctagataatggtcagacttggaccccacgtaatgccaaccaccgccgcatcggtgagatggtgtcgatccaatgggggctgcagaattcggataactgggtgacggccgaactgatgagtcgtacctctcctatcactttcaagcgtctcctcgaaagctatggccttcgtggacctatcgaagcgacgatggcgatgtcccttggtacaccagaagctacggttggggagatggtctcgggttatacgacctttgtcaatgacggggtgcgtgttgatcctatcatggtcacgcagatcgaagatatgcacggcaatatcgtagcgacctttgctcctaagatgaccgaggtcctcaccgcagatgcagcgcacaagatgctctacatgctccagcatgtcatcaatggaggtacagggggccgtcttcgttcgtccttcggtcttcagatgcctctaggcggtaagacggggacgacgcagaataatagtgatgcgtggttcatgggcttctctcccgatctagttgctggctgttgggtcggcggtgaagagcgaagtatccgcttcaactccatggccttcgggcaaggggcagcagctgctctcccgatcttcggtaagttcatgaagaaggtttatgcagaccgtacgctgggctatctggtaggtattcccttccagatgccgcaaggcttctctccctgctacgatgcgggaggaggagatgacgaagcggttgagatcttcgaaggtgagccgagtgatactccagactcatccccacctccgatggacttctaagaagaagtctaggggaagcctcccatagatagaaaacgattgaggcccttgaaccaatctggttcaagggcctcaatcgttttctctgctatcagtatctgccagtctcttctgtcaacgggagtgggctatcagctgggctgtgtccccttcctctctttgcttgctgtggaagtaggatcgtatgcgtaagcgaccgccataaaagagagaaacatcccaagatcaccttagtgaatcttagaatgcctcatcaaacaaatacacatcaaaactatggaaacctattggagcggaagacgggactcgaacccgcgaccctaaccttggcaaggttatgctctaccaactgagctacttccgcatgtcaatttgcttttagagaggtttgcctttctcttttgcgttgcaaagttacgatgactttttgaattgaccaaatcttctggaaaatttctttgagagcacctctgctcctaggtgcagtagtgcacagcagagtcgaggtgtagtctccgagttcgggcatgaatcgaagccttctcttgctttatcctccagagagagttgggatccctagatgccaacttagtctatctattgcttttgtgtactggctaaggtgagggcggctcctcatcacctgtaagccctcttgagttatgcccgtgaagaggggatgcttgatgattgcatcgctctgttgctagtaggctctgctgaggaggagaataggaaggggatgtactttgaaatagctcggtagagtgacctatgatgggtcgcaagtgggatccatagtgggtcgccttgacgacccactgtaggtcgtcgaggcgacctacagtaggttttgtttgcttgtcgctctagctctgattttggggctaggactgacgtgtgataattggagaggggcacgctatgggcggtgatccttctgctttgtctgctctcctacttagccctattaagatgacgactggttatctgggagttgtgtcatgatacgtcagatctcatgcagccttgggaaatggaggtgttgatgtgccctcagagggagggatagtaggggcgtgcttcgtggatgggtagcctaggctgggtcttagctcgctcatcggtatctctaaggatgtatctcttctacgaaatattcgtgcttgagaataaaatgcaggaagaagagttgcattaggttgtttctcttcgtagaagtcgttaatttcgtgtggtgagctacttatgctagatgtctgatgctggagcaaaaagaagacgagctctccgagggaggcccgccttagatgttttcacaacggaataatccttattgtgattagctttcaaattcagtactacaaaggtagcttaaagatttaacctacacaacataatagcttatgagtaagcatgtactcggtctcgacctcggggtcggatccatagggtggtgtctcatcgcccttgatgagcaggagcatcctgctgagattttagggatgggaagtcggatcgtgcctctgacagcagatgatctgaatgagttctcccaagggaaagccatctccaaaaatcaaaagcgcaccactcagcgcaccatccgaaaagggatagatcgctatcaattgcgacgcaaagtgcttagcaaaaagctcggggatcatggaatgctccccgatgaagctctgatgcgtcttcctgtcctagatctttgggagcttcgtgcacgagctgcatcaccaggagagcaactcacgctcccagagatcgggcgtgtactctaccatatcaaccagaaaagaggctacaagcatgcaaagtccgacgaagctgaagaagcagctaagcggggtaaagagacgggctatgtagctgctgtgaagggacgctatgcggagcttcagcaggaggggactaccgtcggacagcactttgctctcaagctcaaaaagcataggcaggagagtctttcgggtggattcttctataactaccgcatcaaggatcaggtatatcctcgggaagcctatatcgaggagtatgatcgtatcatggaggtgcaggcgaatttttatcccgaggtcttgactccagcattcatccaagagctaagggatcaggtcatcttcttccagcgtccactgaagtcctgcaaggggctagtatccttctgtgagtttgagaagcaagagcgtgtcgtcaagcttaagcagatcaatagggagggtaaggaagagctccaagagcggaagatcacgattggccccaaggttgcgcctaagagctctccgatagcccagctctgcaagctctgggagtccatccataacatacgtatctactatcccgatgggaaggagagaccgatcacgcttgaggagaagaagaagctcttagcctatctacagacgcatgacaagctgaccttcaccgcccttaagaaggctattaagatctcagatagggaggggctctggtgtgataagctcctcaagggaggagtcaagggagatacgacacgactcatcctgcgcaaagctctagcaggatataagaagtatgaagggcttcttcgcctggatctgaagctccgagatgcccaagtagctgatccagaaactgggcttatccgctccattgttgatgagagctacctcagtgaacctctctatcggctgtggcatatcctttactccatagaggagcgagaggcgatgcgtggggcgctcatcgatcagttgggcttccaagaagaggatctagatgaggggctgcttgataagctctatcagatcgacttcgtcaagcagggctacagcaataagtcggcgaagttcatctgtaagcttctgccccatctgcaggaggggtacggctatagtgaggcctgcgagcgagcagggaagcgccattctgctagtagtctgactaaggaggagctggaggagcgtccactcctagagcacatccccttgctccagcgcaatgcacttcgacagcccattgtggagaagatcctcaaccagatgatcaacctggtcaatgccctccgccagaagcacggatcgattgatgaggtgcgagtggagctggcacgagagctgaagatgagtcgagaggagcgtgaagatacctctaagaggatccggtctagggagaaggagaacaaagagatcgcagagcgtatcaaggagtatggactctatccgacgaagtctcgtatccagaagtatcgtctctggcaggaggcgggagagcaatgtctctactgtggtaagtcgatcgatgtcgtgcagttccttcgaggtgatggggtcgagatcgagcacatcatcccgaagtccatcctctacgatgattcgtctgcgaataaaacctgcgcatgtagccgatgcaataaggaaaaagacaataggacggcctatgaatatatccttgctaaggggcaggaggcagagtatagagatcgcctagagagcctcttccatgatggtaagatctcttatagcaagcgtcgtcgcctcttgtggaggaaggaggatatcccctcagacttcatcgagcgtcagcttcgtctgactcagtacatcgctcgacaggcgcaggagatccttcgtcaaggggttcgtcgtgtctacgcttctgaggggagtgtgactgctaaacttcgtcatctctggggctatgatcggatcctgcacgaactcaactttgagcgctaccaatctatgggtgagacagagcttgttcgccaagaggagaaggatggctcgatcactgagaccgaaaagatcaaggactggtcgaagcgtaaggatcatcgacatcatgcgatcgatgcgctcgtcgtggcttgcacgcggcagagccatattcagagactcaatagactgaactctgaggaggatagcgagcagatgcttcaggaagtgcagggacagtggcgtaccactgcggagaagcatagtctcctagaaaactggctcatcctacagcctcacttctctcatcagacagtacgagccaaggtagcagagatccttgtgtccttccgcccaggtaagcgcacggtctccacggggcgcaatacctaccaccgctcaggaaagaacgagactcaggctggtgtgctcatcccccgagggccattgtcagaagagagcctctatggacggatcttgaggaatggtgagcccacatacgtcaagaaggtcgctctagcaagtctcaccgcacctcagatagagcagatcgtagatcctaagcttcgccgtgaagtgatggctcgtgtcaatcaatctggtgatgcagcaaagcctgatctgaaattgatcacagccaccccgctctactctgatgcagcagggacccagcaagtgcgtagcgtacgggttgccgtcgagaatggaaagaatagcatcatccctttgtactacaatgattcgggtgaggcgatcacctttgtcaaacccggtaacaatcaccatgtagctatctaccgaacgccggagggtgagcttgttgaatcgtgtgtcaccttttggcaggctgtggatcgtgttcgctatggcatacctatgatcatcaggaagcctcgtgaagtccttgatcaagtactccaaaagaaagatgtcccagaggctctactagcgagtctccctgactctgactgggagttcgttgagcacctgcaggctaatgagatgttcctcattgggctaacggacgaagagatccagacagcactggagcagtctgatctgctgaccctaagcaatcacctctatcgtgttcaaaagctgtcatcggaggactatgtgttccggtaccaccttgagaccgaagtcgaggatatcaagaataagacgggaattatccctaagttctaccgcttacggggggctaaatcctatgagaaggaaaatccacgtagggtcaaagtcaatctccttggcgagatgtctcttcccgaataagcttaagacttatgatcaagcgaacactatactttggtagccctgcctacctggccttgagtcagagacagctggagatccgtcagtctgcaggtgaaggcggagctccgagcatacggacgatcccgatagaggatatcggggtcgtcctccttgatcatccgcagatcacgattacacataggcttcttgatacgctcctcagttacaattgcgctgtcgtaacctgctctatgaatcatctcccctcagggcttctccttcctttggatgcacatagccttcagaatgagcgcttccgtgcccagcttgatgcttcggtaccgctacgcaagcgactctggcagcagacgatccaagccaagatacagaatcaagcagctgtacttcaggcggtccttggtgaaccagctaagaatatgctcgcttggtctcggcaagtgaagagtggagacactgagaatctggaggctagagcagcggcgttctattggcgtaacctctttgtctccctcccagactttgtgcgagagcgagaggagacagcccctaactcactactcaactatgggtatgccctcctgagagcgatcattgcccgagctctggtcgctgcaggtctcctgcctacactaggtattcaccatcataataagtacaatgcctattgtcttgctgacgacatcatggagccctatcgcccttatgtcgatcagctcgtcgtggagatatgtgaggacgaagggtttccctctgtattgagcaaggagatcaaggctcgcctactttcgatctctgccctagatgtggagatcgaaggacagcgacgacctctgatgcttgcagcctctcagacagcgacctctctcctgcgctgctttacgggggagagccgtcgcctctcttatcctctcttctcatgctagctcatcgcctaagtgaataccgagttatgtgggtcttagtcttctttgatctccctacctataccactctggagcgaaaggcagcctctggcttccgccagggattgatacaggatggtttcacgatgcttcagtactcgatctatatgcgtcattgtccgagtatggagcatgctgagacgcatgtccgtcgtgtcaaggagatgctaccagacgaaggagaggtgatcatcatgacgatcacggataagcagtttgggatgatggagcacttctcatcgcatatacccaaagagggccctactactcctctgctctttgatatgttctagagtctaagtctttttctggtattagaagacaaaaagccgatggatacccatcggcttttttgtttctaaatccttcgataagtggctaatgcacagttgactatatatggtcggctgtattagctatatcgaaagtactgaatttgaaagctaattacaacgacgcgtgaactcaatgagatccgccaagggctgtattagctatatcgaaagtactgaatttgaaagctaattacaacgcactgaagcgctccttagaggaggggtcggctgtattagctatatcgaaagtactgaatttgaaagctaattacaactcttagcttcgtcgagtgcggacgcctcgagctgtattagctatatcgaaagtactgaatttgaaagctaattacaactaaaaacaccaattaaatagaagtaaaatggctgtattagctatatcgaaagtactgaatttgaaagctaattacaacttggtagtgttgacatccaaccaattatcagctgtattagctatatcgaaagtactgaatttgaaagctaattacaacgcagagcagtcgccgaggatgacatcattggctgtattagctatatcgaaagtactgaatttgaaagctaatcacaactcggtgaagcccttatcccgatcgctcaggctgtattagctatatcgaaagtgctgaattggagagctaatcgcagctgagctctcacatgacgaccgatagcagtagctcgaagctctgcaggctgtcagtcccctcaatgcgatagctccgaaaagaaggatgtgtcttccatggtcgttctagggggagattgtaggggcttcagaaatacctatgatgggtcgcaagaggaacccatagtgggtcatcgaggcgacctatcataggtctctccatcgccccctcagatagctatggatattgggctgatggctcgtggggaaaggtagacaaggagcgtgtttgggggcttcagggaatatggtgggcttcttcgttattgctagtgcatactcatgggatggggatggcggtcgctgcaagtgatggtatagcaggagaagctaaaagccatgcaagccaccagatggggatggcggtcgcttccggtgatggtacagcgagaataaccttgggttagatcggccgaggggggacgaacttaggcgaagatgacgaagaagaaaagaagcatcgataggagaacaacgcaggtagagactactcgtaacccccgattttggaccatgctcaggttgaatagtggaagaccgaagaagctcaatgcccaaggaatgatcagactgccgtactgaaagtgtaggagctcgaagaaaagccaaaagcgtagacggggatgtcccactctgcttagaccaacgtagtgcgtttcaccagagcgtatatcgcttgcttcgggaagggtgtagaacgctacctcctccccgctcttccctttgtgctggagactgaaccatccgccaaagtactcggtggtatagatcttcttctctcctacgatcttgagataggcatcgtggtgccttcgtcctgtgctcttccagctctcgacgatgcccgtcttatataccaagtggggtagggtagagatgctcctttggatagcgatgaagttggtcgatagggcacagagtaggaaggcgactcctaggatattcgctaggactggattggaatgaaagaacgagtgtacgggattgatcgtcttcgacattgggttttgccttggtgtgtggaggaattatcggggaactagcagtaggcgatgtacagcgtgcgtgagccacccttctttgttatctgaagatagctgctggaggactctgtctgaatgagcttgaagagtcctaccttgggtttccaaaacaggcctaagaagccaaagtatccacccgaaccaaagacccgaagacttccctggaggctcaggccttcgaccttctggatcgaatagtcggcacggctatagaccttcgaccaaagtaatcgtcttaggacaagtgtctccccgtcatagctcaggctcagtggcatagatatgatgggatagacgagtaccagcaccgcagaccatccgatgagctcatagataagctgctctttggaggtgaggaggaaatagaggagatagctaagagccacgaggcccaaggtggagatgatccacaccaacttcgagtagcggaaggaatagtgtatcgtgtccatagggcgaattgctgtcaattgcaccgtgaagtaggttgatcctcatcttacagagctacttcaaagatagctaattctcatccctatgcttgtgctatagcctatttacttcatcgagatcccgctctaccttgttgaacttctgccgtccgaagctgtagctgaggcggagtatgaccttacgactttccccatgaccccaagaggataggttcagtgcatctttcaccccatagctatcccagcgctcggtatgcagcacatcggtcatcagaagagataggcgcatacgaccgtctaagcagctgcgattgagccccagatcaatgccccccgtaggcttgctgacttcgtagcttccaccctggcgcttggaatggtagcgcccagagagttcgaggttgaagccgaagggcagtaggatgctgttgcttgcggacagagagcaagaggggcgtttgtactcctgcttgtatgtctcgtagtctaggcggttcacgaagtagtagaagcctaggttggtgctgaagtcccaccatggagcaaggcgcttagagaagacggcttctagtccgacttgctgctgtgtccctatgttcttcgtggtcatgatggtcttgttgctctcgaaggcatccgtgatcgaagtgaagtagtcgtcgagcttggtgtaatataggttcaaggatagactactccagatatagtttaggatgaacttgtggcttgtctgaggtctcaggaagggattccccttccagtaggatagttcgtcgagcaagtactcgaagggattcaagtcttcgtatctaggtttatcctgacggcgactatacagcagggctatcttattcttgtcgttgatcgtgtaggataggctcagattggggaagagacgtagctggttacctttgttctcctcggcgttttgatgggtatgtgtacttagcttgttgtgcgtgtgcatgtactccatccgtagtccagcactgagctctagtttgtcccacgagtgggtgtactgcgtgtatgcctcgatgttctgctcattgtagcggaagctgttggagcgctgaggatcaatgaccccattcttcttgaagaggaagctattgtcgctcttgattgaagaggtcttgatgcctgcaagccattcgctctgggtattgggacggtgcttatagtctacgaggagggcatagatatcgatgtctttctctggttgtgagtagaagaagtccgagcggaaaagcctattcgtcgctgagtaataatgattaggttgctcgcagcgggccttgccatcaaagcgtgtccagtctgcggtgatggatagctgttgattttcggacgcttggtacaggtagttcaagctgttgctgtaccgaagggtcttctgctcgacatagtcgttgcgtgctcggagtatgccctccagagaagtcaagcctttgtagatgtgcgtcgttgtctgagtcttgccaggccctgcgaggaggttcactgtgctgttggcaaatagcttgctcttgggtgtcacttgccacgagaagtcaatccctgccgaataggtgtttcgcttgtctgtgtcgatcgttattgacgaacttctatcaccattctggatcttctcatagccatagtccatggcatgatgtccgatcgcatggttgtagttgagccccagctgccatttgctcgtgttgtaggacaaggcgaggtcggagttctgacgtaggttctcccaataggcggcgctgtgcgaagtcgtgaggaagaagccggagtgctccgaggctttcagtacaatgttgatgatgccaccggctccatccgccccgaagcttgcattagggctgggggaagtctctatacgagcgatcttcgatgacgagagggagcgtaggtaggctgcgagttcctcgccttggagcatcagcttcctcccattgacatagagggctgtcccaccgatcgaggccaaggatatgtcgcctttgctactgaccgagatcccaggggaatgcttcagcacatctagcgcattcccgatgtcggtgagataggattgggcaacgtgaatctgtatcttgccatgggatgcactggtcatcggccgagacttgcgggcggtgactacgacatccttgagcgaaacttcctctggctcgagctggatatcagggaggcgcaggcctggagtgcaggagatcctttgcttaacctccttatatccgagcgaacggatacatagaaggaagtccccttcacggggaaggagggagaaggctcccgtgtcatcggtaagagtggattcgaccaggacaccctgaggtatcgtgatgagtaggacgactgcgccgtccatcgctcctcgatgttcgtcgagtatccgccccgcgaccttctgctgagctctggctgacacgctatagctaacactaatgaagcaaaggagtaggcgtagaatgaatcgattcatggcggttagtttgtgatgggaggagtattgtccttcagaggggaggtgaacttcggcctctttaggcgttagaatctgaacaaatgtacagaaactgtaaactacctcgccttgattgacatcgcgtatgaggcttatcgaagtgtataccccttgattttcccgttgtaggtcggctgtgagtgctaggagctcacatggaatataaagagttcggggaggtcagcacacgtggctaacctccctttcatcgaggggatggtgtcggtattcaagaggcgtgacaccttattagctgacaagattactttgagagccagcaatgaatccctccattgctatacatatgctatgcgacggcggatatcgagagcactctattgctcttatcctgtcagcaggaatagtgctatgcaatagaatgtataggtgagcaatccctccccctacttctctttggatagagcgtactcgatgacttcgttgatttgtgctgactttttattgttaggggagcgaaatacgacctcttctttatcttcatcgattacatagtagagggtgatgatctctttcctccccctagagtcggtatgccgaaacgtgtgcttcacttcatgtcctcggaatttggggacgatcatactgctcctattccttatcttttctagaagatattcaatatgatctttcgccttgtcaaactcctgttgcttacgatcgatccttggttggaagtactcatcatatacatcacggtatatgtcaagctctttctttatagattcggcctcagtcgctttttcgagcgcttcctctgcaagctggaggatctcagcatctatataaggagagtcaaagacactatctaagacttttgtttcgagtggctcatagcgatagaaatcggctatagtcttgttcaggtcttctttgatgatctttccgaacttgctctctaggcttctggagcaggacgatacagatatcatggctatcagtgccagtagtttcttgttcatttgtgtatagatcagttgttattctatgtgagagcctagttagtttctgcgaagttagagaatatcaagacgagtaacaataatggtagggttacgcaagtcgtatattcttcaggtcttctccctgttttgtacagagggaggtgttcagcgtttgtcctggaggagattcttccctgtagtattcgtcactattaccggtaatgatgatgctcattgtaggttgtgtaagttgccttggcgggtaatgagagggcttccttcaagcgacgggggactttagagtaagaaaaaagggagaaggggtctgaggggttttacgtatatttgcgtgtcattcgtagctcgccccatcgagccctctcaaagcgatccaaactagcaggatcagttgtattgaggttatttctcttagggtctctggggatgcgtggctcaagtaatcaatgtattaaagcagtacaaaaaatgaagctattcaagaatgtttttttctcagcctgcgccctgctggctctaggtactagcctctccgctcaggagcttggtaagatcggctatcgtgcagaggctggtctgactctatctcgtatctcttcactcggtgtgaaccatgatggcgacgcaggggtgatggctacgagcttccgtgtcggggctagtgtcatcctgcccttcgagcatacgatcttctcgtttaacccaggtctcttcgtcatcggccgtggggaaggtcagaagatcgtgatcgagcccgagtacaagaatgttaagatcgagaactatgccctccagctgcccctagaggtctctatgaagttccttacgattggggatgatcatggtttcttcttctcggttgctccttacctcgcttacggtctctctgccaagctcaccaatgacggcaagaacgtagatgcagctcgccctaagcgtggcacgagccttgatctgtatgctgagaaggccttcaaccgctttgaagtgggtctgggtgctagtctgatgtatcagtacaagcagttctcgctccgtggtggtatcgatgctagcttgacgaagaccgtagccaagagccttggtgctccctactacgtatcgactgatacgccacgcttcatgaccggctacatcacgctggggtatcagttctagtagaagctagaggagagcagatctcctaagcaataaaagcgaggctcacccgaccaatgtgtcgggtgagcctcgcttctttgtggaaggatgagggagtaattagcccttgtgctcagcgatgagtcgctgtagctgactgatgagctcggggaggggcatgccactacgttcgctcatcatcgataccgtagccttggggatcatgatgcgggcaagtggagaggagagcatcttgaaggccgagttgatctcggggagcttgcccttgagccaagggtgtagctcgaggagctccttgaggcgagtcgctcccgtgatctcgatctctgacttctgcacggatgagactggagcgggggcttcgtcgtaggtagcctctggagccttgggagcatggctagcgcccttcatgcaggagcaggagacatactcgctctcttcctcggcttgctcttggggggctgctggtgcttcgggcgtaggcgaaggagcagatgctgttcttggggcttctccgtgcttcgaggctgccttgttgctcttgtcccaagagaggagggtacgcgaaccctcaaggctgcggatgcgggtacagtcctgcatcatctcgaggatgccacggaagcgcccttcttcatcacgtaccgcgacgtagtagatgtagatgaagagccctggcttattgatccagaagtctacttcatcctgctcaccccgacggaacttgtcgatgatctcttcgacgagatgcacgctcgtgcgtggatggcagttcttcacgtctctcccgatcacattcttacttcttgggaagactcggtggtcggtgtccgtatagaagcggacgatctcatgctcatcgacataggagaagtccacgggcatatgcttgtagacgaggttgatctgctcaagggtcatctgccccgtagctacctcgaggagctgtccaggggtagagcctcccgagaagccgtacttaccgaggagtgctgcgagatcacttgcaaagcccgcagcttcggtagcggggaggggcttcttgggttcctcagccttttgccccgcacctaccttgatccatgcaaagccgatctcacggtctccagccttcatctcctcgaactcctcggggcggatcatcgccagcgaggtggggtagaggacggtctcttccttctccatcaggtcaaggatgtcagcgacgatcacaggctgcatggcgatgaactcctcctcccggtcttcctcgagtagcctacgagcatcccgtacttcatcacggatgaagtcatcgaggagccacatcgtcgtggtgggacgatcgaagcccttgcgctctaggatcgaatagagctggttctgcttgcgggagaggtgaaggcggtgcttatggagctcgtcgtagagctcaagccattggttcttgatcactgggtactgcgccagctcctcgacctgcttgagaagtcctcgcatggcatcattctcacggatgtagcacatgatggggtgatcttcgggaaggtcgggacgacttctatcgaggacatcctggaagaggaccatcatctgctggatatcttccttgcgacactcgtcgtcttcgatggtcttgatctcttgttcggcgagagcgatctcataggggcgcaaggtcttcactcgttccctaaggatagcacgtgcctcgtcgagggggagcgcgccgctgaggtatctttccttgacatctaggacgacgcggagcttctccatgtctacctcagggaggttgtctttcatttgttccatggtggagaatcgggggaattagaggttgatgagatagacgaaa

SEQ ID NO: 3309 - DNA, 23573 bp, synthetic construct
  source 1..23573: mol_type = other DNA
  misc_feature 1..23573: note = Synthetic
tacacggggtcatgccgatatcgtggcacgtggtctcgacctctttgacgaggtcattgttgctattggtaccaatgatgctaagcgtaacctattcactgccgaggagcgtctccagcagatccagcgttactatgcctctgagtctcgtgtgcgtgtccttacctatacggggctaacggtctcactggctcaagagatgaaggtcaaggtcctcctacgtggggtacgtagtagtaccgatatggagtacgagcgtacactggctgacctcaatcgtcatattgccgacatggagaccgtactcctgcctgcctcccagcggttcacacatattagctctaccgtagtgcgcgaactactccactatggtggagatgtatcgaccttcttgcctcaaggattctctctggaggtcagtctctaatacttcagatgcataatgtctgactggaagaaacgactaggcgtactctacagcaccgatccaaactatagctacactacagaggagaatgctcccgaggaggcaacactgcctccagcagagcaacgccttcgcctctccttgtctcgtaaacagcggggagggaaggaggtgactctcgtctctggctttattggctcgagtgaagatctcgaggtactggggaggactcttcgccagcgttgcggtgtcggtggatcagtcaaggatggagagatccttatccagggggatcagcgccccaagctcgtcactattctccaagcccttggatatacgaagacgagaggctgagccttacgtggaaataacgttttaagtaaaggtggggaaactaccattatccctcacaatacttgtcctagaggccttatttaatgaggcttgtaacggggcgtgatgagttactataagtcgctgtaacgagttgccataactctttatagcgagttaccataactctttgaaacgacttaccacaactcgccgaatcgagttgtggtaagtcgtttttttcttccttttgatgctttgtatcttgtttgttatcagtttgttgtgtttgcatttgggagtgctgtcccgtggccttttattctgctggttggagatcagtggctgaggatcgttttggttgcttctactgccacattgggtcggtgaaaatgctctgttacgcatcgctttactagattggtatgctaatctagtgaagtagatgcgccgtgttttttctttgttttttattttgcaggggtctaaccctgagctacagttattcaggggtgaagggtgtttgaaggggtgagtgtttttcctgccctcatctaggattgttcgtttttcaatcttgttttatagacttctatttgtattataaggtggacaaaagacattgttaaggctatttttaaggaaatttattttgtttctcttgtttcttgtttgaaaaactattgctaactttcgcccaagattaaggggaaatcccttgtgagggataagtaaaagttataatgtatcataaaacaagacatgacgagatgattacccgctcctagccctcataccagcacacgagggggcggccgcccatcgtgatagtacctaaagaggacaggggtatatgcataaccacaaacgcatgacccaggccagtctacataagctatatcaggaaaagtaaggtcgtacgcaggaggtatatacctctcctgcatctgatcacgccctcgatggcagatttagcctcaggcagatcacgctcacacacactacgactctggaggtaataccatactcctctcagggtgaacactgaaatagaatcaaacttatgagacagaaaatgaaatacgcgatagggctattggctctcttactatttattccagcctgtaagcagaataatgatatagaagagccaacgctagagctttcaacgagctcgctgaccttcgctaagaatgcatctgaacagaccgtatcagtgcagacaaataaggatagctggaacgctttctcttcccaagaaggatgggttaccctcactcaggttgggacgagccttcaggttaaggtcaaggctaatgacctcggggtagaacgtactgcgtccgtgatcgtgaacgctggtggtttacagcgtcgtatcgccgtcaagcagagtgctgccgatgtaatcatagacctcgataaggaagcggtgacgctacctgtcgcaggcggaacggagaaaataggcttctatagcaatacggagcaggtgaaggtggagcttgcctccgccgtagactggctcacgctggataaggtgacgaagaatagcttcaccatcacagctaaggctaacgatggaacggctaaacgctctgtgaaagttgtactcactgcaggtactgtaactaaggaagtcgaagtcactcaagaagcaacaagcatctacgtacttcccctccttaagctccctgctgatctctccagtgtttgctcttatgaagtaggccgtggtcacacattggtcaagattcccgatggtctgtttaacaagaccttctatcgcttcttgacaaaaagtgctgcgatgccctttatccagtattccttcgcatcagagaccgcaaagggctatacctctgcagctactgtttgccttgatgtgagcttagttaaggacaacgcaaactttgatgccttcctcaaggaaaatggtcttgataaaaagactaagagtcaggatgagaaggtgattacctatacgggtaccgaggtgctcttctctctaaaggttgccattgaagccaatggggctgtaattacagctgagtacacaccaaagggacaagataaggattacgctaccttcaaggctctacctatgacagatcaggtacagtacatgggggatcgggacctcaagctaccaggtaagaagcaagaagaaatgcggaagatagaggaagaaacatggggtgcagagcgagatccctctgtcactcagaataactacgaccgcttcatcgccaaggggaaggtgtttgacaacgaaagccaccgaggctacttctacgttgtccctagcgcaaagattcctaaggatgatgaatatatcggcgtcgtagaggcttgccaggctatctatccgaatacgacccttgccttctggtctgatgcaatgggacgctactacttgactaaggaagttaaggcactctttgctgatgcacagttccgctactttggtcagcaagaaggggtagatgtcttcctgaataaggcaaagaaccaagcttatttcctccgtgtcgctaccttccagggtaagcctgctattgaaatgcagtgtatctatcaggatctaagtaagattaaggattcttatagccagagcggtgaactctctgtcaaactgctcactgattataaggccttccttaaggttaaggctgaagaagccgctacggtacgtagtcttgtgcagcaagttgtccgtaggcaggtgcgctcactcaagtagctagtaccaataatctttccttgagagagggctaggagtagccctctcccaatccaatcaagtgaatccaaaaccctattcttgtttgggagagaaggcttagtgagcctctctcccatgcaggaggggtgaatggtaataatattctagagacagtagaatgccctaaccgctctgtaccctttggtgtggtctttggtgggatagtaagactactttctctacatgcagctccttggtaagcactctgcttgtgaaagaatgaatttctttcgtcacctaagaggaaaagaagcatacgcgaggggagcaaatgaacgaatatgcaatcaacctgattagattacgacaatgaaaaggactatactaaccctgtcgcttctgtcgctctgtgccctctcttcatgtaagaaggattttgatgaagcacaacctcgaggtggcgagcttcgctccgatgtggcggagacctcttcgtctactagagagttactccctaccgagggggcagagcttggtgtcttgtacatccgcttacagaaaggctcagagaaaagccttcgtgctctaacctttgagcccaaggaaatcgaactaaaagccctctcttcacctctagctacgtcactccgtagccttggtgcaagtggtatggaaccattgttccccatcgatcctcgctatgaggaacggatgcgccaagaggggcttgatcgttggtttatcgtgcgctttaatgagcgacatgacctaagagctgcaatgcagaccctccttgataataaagaggttgactatgctgagcctgtgtatcccatagcttatcctaatgctaagcctgtggggatatcctcgcttcccgagacatcaatgtctcaatcgagagggtcctcatttaatgacccaaggctgaaggatcagtggcactacaacaatactgggtcgatcagaggtagtgtccctggtgccgatattagtctcttcaaagcatgggagaccgaagtgggtaagtcaaacgttatcgttgctgttaatgatggtggtattgatgtcgagcatccagacctcgtcgataacctctatgtcaacctagcagagaagaatggagtgaaggataaagatgatgataacaacggattcgttgatgatatcaatggcttcaacttcattaagaataatggtactctttatcctgatgatgcttcacatggcacacacgtagcagggactgtcgctgcccgtaataataacggcatcggtgtctgtggtgtcgcaggaggcgatggtacagcaggaagtggtgtaaggctgatgagttgtcaagtcttcggtgttggtaaggaaggggcagatgcagcacgtgcttttgtctattcagccaataacggagctgttattagccaaaactcttgggggtatcgctacacagcaaatatcacagttattcctccctctatgaaggaagctattgactacttcatcaaatgggcagggtgtgataagaatggcaatcaaaaggcagatgcaccaatgaagggagggattgtcatcttcgctgcagggaatgatggtcgtgactacaaatcatacccaggcgcctatgaggctgtcgttgctgtgtcctcgatgaacccggccttcacaaatgctccctactccaatcgtggtgactgggtagatataatggctcctggtggtgatgtaaacttcggagatgcagggcaggtcattagcacgctctccaaaaagattacaaagggtgatgagtatggtggtatgcagggtacatctatggcttgcccacatgtctcaggggtagcagctttgattgtctcacacttcggtgagcaaggttttaccagtgagaaatgcaaacagatcctacttgggtcgcttaagagtaagagtattgatcagacgatctctcgatatgctggtcgcttagggcgtggttacatagatgctagtgcagcctttgcaacgaataagggtaaggctccagcgaagattgcttctatctccatcgataaagtttcctttatcacagctaacctttccttccaagcggtggcagacgaagacgatggtacacctgtagagtatcgtgcgtatctctcgacgagcacgattacagaagcgaatcatgccaactacctacttcgtacgattaatggtatggggtatgctcctgggcacaagctgttcctcccactcgcgaatctgaaagagaacacgacatattcagtcgctgtcgaagcggttgaccgctggggacttagctcgggtctaactatctctagcttcacaacgaagaagaataacccaccgcttctcaagctctcacgtgaagacaagattcgagtctctgctgtatcgaagcaatccttctccgtggcgtactctgatccagatgggcagactgtaagcattgacatcagcggagagaagcgtggtgtcagccatcaggtgctagatggtaagattgaatttacactgcgagcagtagcccctgcaggtaactacagtattaaggtgacagctacggatgagcttggggcaaagaccacgctggatatccccttcgaagtctacacatataaggctccagagttcactgcttcgatgggtaatcagattgttggtgccagtcagcagattaagctcgatgttgcctccatactgacgtataccgaaggaattaaccttacttactctgctagtgcagtggacggagcggttgctacggcatcaatctctaagacgggagaactcgttatcacaggtcataagcccggtaccactcaggtacaggtggcggtttcagatggtattagttcctctgtacagacgaccatacccgtacgtgtcgtgacgagtacagctgatgcagtctattcggtttatcccatccctgctactacagtactaaacctggtcatggatccctcccttgaccgagtgcaggttgagattgttagtacgctcggtacacgggtctttgataagacctatacggtcaagggtattggctcaatcaaggtgcctgtgaagacgattgccccaggggcttacgtcctcagggtgaaatctgctaagggtacatatacgaaggggtttgtcaaacaataagcattctgaatagaccatgaacaagttatccatcctgctacttgggactctttgtagcgtagcctctctctctgctcagacgacgaaggctcgctcactacccatcctcgagatggcagttgatacacgctcagccgcactaggggggaatcactatggtgaatcccatacatcgtacctatacgctaaccctacgtcgctactctatagtgatgaaggcaatctctctgcctctgcaagcgcacgctttttgggtaagattgaggggtttgatggctcccgtaacctgtttaatctcgctctaggggctcgacttggagaccatgggttcttcttgggtggacgctacctaggtggactcaagttccaagaggttgaccaagccgaacgagttaagaagacatacgcgatcgaggactatacgattgatgttggttatgcccttcggttatcatctttgtctgcgtatgtcacggggagctatatctcgacaagcctcaagcggtcagcctctacgttcgttgtgggggttggagcattctaccgaagtcagcctgctgaagaccatctgggacttagctacaccattggagcaaaggctcagaaccttggtgggagttatcgctatacgagcaaagggtcagatgcttatcctccagctttctttggtttaggtggtgagttgggctatggcatcagtgcggagcatcatcttgcccttgctctcggtgcagattacttcttttatccatcgaactctcggtctaccgctctgcatgttggtggtgaatatctattccgccaagcctacgctttgcgcctcggatatttctatgacagtaatggagcgaagcacttctctgcaggtgctggactacgtttcaagcccatgaatatcgacctcgcttatcttgctccttcggccgaagggttgaaggctgccttccagctaaccattggggttaatcttggtgtattctagcaagaagtattggacttaatcccctctccttagaattactttgagaaagaagttggtgcttcacagagggagggaaggagtaaaaagctctattgtctgtacaataagacaatagagctggtctaagaagttttctgatagaataaacgtaatcactcggctaatcctttgggattggtcgagtgatttgttgtattgagcctcatctcttctatccaatagtttgccccctttatacgagtagctttattgctgagccgatcgatgaagaacgtgaggagaaaaggtttgggagggaagacaatgcctcctttgtgtcactgattatcccaagtcaaaccgtttacggatgccttcggagagtagtcgatataactgctccagctcgggtgtgttgtgtaggagcttgaggtgccgctcgataatcatctgatcgccccttcgtgctggacccgtctgcgcttcgcgggctgggaggtggtggagcttctcaatcatttcatctaggagtgggaggagagccttagatgggagctgatgggcggagagaagttcctcagctagcgtgatgagataattcgagaagttacatgagaggactgcggctacatgcagtgccatgcgtgcctcagagctggcatgatgtacctcgttgcttaggctgtgtgctaaggtcttgatccgagcctgtgtggactcattgttggcctcgatatagagaggaacggaggagaagtctaataccttccccttgctgaaggtttgtagaggataaagcacccctgtactgctatggaatttcgtcattgagcagaggtcggtactccctgatgtgtgtagccaagtgcctgatgtgtggcgagcaagctgtgtccaaagctcaaggagtgcatcatctcggacagtgaagacgtaccagtctgcgtcttgtggtagagagctgaggtcgttggtgctatgaaccccttcgccaagggtagaggctaagtcgcatgctgtcacgccactcgggctgtatatatcggtgacgatatactccgtctcccctacattaagtagatggagggcgcgagctaagtgccaggctacgttgcctgcacctaggaggacgatttgctcttgcttcttcacagggattggtttagctctgggaggcttcctcctctagggctggatagcacccgatatggatctgctcccacctcagttcctccaccgcatgtggggcaaggctggaagctttatgcccaacagcaatgatacataggacctcaagctgatagggaatgcctaaaacattgcgaacgtactcactagcctcttgcccgttagacgtattttgtccgaagacatctgcccagcaggagccgagaccaagggcttctgcttgtagctggatatagcctgcagcgagagaggcatctgctatccaacgctcgcactccatcggagagccaaggatgacgatgccgagtggcacttgcctgaggaagtcagctccactggggcgcatgtagcttagctctgtcaaggtttctcggctctcgacgagtataaactgtgtggtatgtgctcctcgggatgagggagcccgcagtccagcctctagcagcatctggacatcttcaccggagaggggggcgttggtaaattgccttatggatcggcgactacagatggctggaagtacctcgtgtgtatgggagacttcaccctgctcaataagttcctgcccgagttcacggacttcattcatccagctgtccttattactcgcgtctgtcatatagcgttgtttgttttgtcgtttagttcatttgcaaagatacttagcttcttattaaatcactctctgcctcagtctactttcatgcttgagaagccctgttgacctactataagtcggaggggtgtgacgagttaccataagtcttagtgacgagttgtggtaactcgttttagagagttgtggtaactcgtcagagcgagttatggtaagtcgcaaaaaggagttatggtaactcatggaggggaggtcaagggaatagcgttttgtgttctagtaaggtgttgattttcacttgtgtatataccgtttgtttggctgttgggtggccttatactttgtggtgtgtatactgcccttgctctcttgtgttttttatttgctatttgttcgaaaagtcagtaacttagcctgcataacaagggtacctcatgggctggtatgtaaacacaaaagaaaggcgaggcttggagttattacctccgcccccccccaccttggatgttttcacaacggaacgaaatccttattgtgcttagcttcaaatcagtaccataaaggtagccaaataatgattaactaacgaaatataagagtactatgggaaagaaagtacttggtctcgacctcggtgtcgggtctatcgggtggtgcctaatcaccctagacaaagatgagaaaccacagagtatcctaggaatggggagccgtatcgtgcccctctctgcggatgatgctacagaatttacccagggtaaggcgatcaccaagaacaagatgcgcacggtggcacgcaccatccgcaagggtatggatcgctatcagctacggcgagaggctctaaagaaggtgcttcgtgagcatgcgatgctccccgatgaagctctgattaagctccctctactggagctctgggagctacgagcacgagctgctacacccggagagcagctgagcctaaccgaactgggacgcgtgctgctccacatcaatcagaagcgaggctacaaacacgcaaaggcagacgaagctgccgaggctgagactaacaagggcaaggagacagggtatgtggctcaagtcaaagggcgttaccagatcctaaaagagaagggacagacgattggtcagcacttcgccggggagctaagagctaatcaacaaactgcccccagaggtgtctactatacctaccgcatcaaggagcaggtctatccccgtgaggcctacatcgaggagtacgaccgcatcatggcagcgcagagggtgttctatcccgagctccttacggacgcactgatcggtaggatacgagaccgcatcattttctatcagcgtcctctgaagtcatgcaagcagttggtctccttctgtgagtttgagaagaaggagaaggtcatacgagtaaaacacaccaacaaggagggcgtccaagagcttgttgagaagaccataaccattggtcccaaggtagctccgaaatcttcccctatcttccaggtctgcaaggtctgggaatccattcataacatccgcctttaccatcttgatggcacagagcgaaagctcgagcaggaggaaaagcaaaagctctttgactatctccaaaggaacgataagctcagccttactgtgcttcgtaaggagcttaaaattaagccgaaggataagctctggtgtgataagctgctagtgaatgggataggagggaatacaactgctactatcttgcgcaaggcactgaaaggatatgagcagtatgagggtctactcaggtttaatctaacgacaagggattctcacgaggtcgatgaggatggtgttattcgtccaatcattgacgagtcttatcaaaacgaaccgctctacaagctctggcacatcctttattccatagaggatagggcagagatgcgcagtgccttgattgggcaactaggcattaaggctgaggatctagacaatgggctgatggatgctctctataagatagactttgtcaagcagggctacgggaacaagtctgctaagtttatctgtaagctccttcctcatctacaagagggtaagatgtatagtgaggcggcggaggctgctgggatgcgacactcggatagtatgactgcccaggagcgagatgagcgcaacctgttggaggaaattcccctcctgcagaagaatgccctacgtcagcctgtggtcgagaaggtccttaaccagatgattaatctcgtcaatgcgcttaagagagaacatggagagattgatgaagtgcgtgtagagctagctcgcgagctaaagatgagtcgtgaggagcgagagaaggctacaaagaataatagctcacgagagaaagaaaacaaggctatcgccgagcgtataacggagtatggccttacccccacgaagtcacgcatccagaagtatcgcttgtggcaagagtctgccgaaagctgtatctactgtggtaagcgtgtggatgtcgtgcaattcctcagaggtgaggagactgaggtagagcatattattccgaagtcaattctctttgatgactctctgtcgaataaggcctgtgcctgtcgctcttgtaaccaagagaaaggtaatcgctttgcgatggagtacatccaggctaagggttgggagcaggactacatcaagcgagtggatagcctcttccatgataagaagatatcctactctaagcgtcagcgcctcttgatgctacctaaggacctgcccgaagacttcattgagcgtcatctccgactctctcagtatatcgcccgtgaggcacagggcattctccgtaaagggatacgactggtgagtgcctccgagggcggtgtcactgccaagcttcgccagctatgggggtatgataatatcctgagagacctcaacctagagcgatatagatctatgggagagacagaagttgttaccgtagagcatcgggatggtcagcgtacggatgaacgtattaaggattggtccaagcgaaaggatcatcgacaccacgctgttgatgcccttatcgtcgcttgtactcggcagagctacatacagcgactcaatagggtgaatgcagaggctgatcgtcaggagatggatgcgttcatcaaggagcaacaagagcagaaaccctccaagaaagagaaactctccctgttggagcattggctcattagacagccacacttcacgaccaaagaggtgatgaagcatgtagaagaaatcctcatttccttccgtccaggcaagcgtaccgtgactcgggggcgtaatgtctacaagcgctcaggtaagaccgatgtgcagagaggggtgcttatcccacgaggtgcactctccgaggagactatctatgggacgatacagctccatagaaaggatagaagtggtacggaactagtaagatcctacgtcaagcgaataccgctgagcaaggttaatccgagtaatgtcaaaaatattgtagactctcagattagagaagttgtccaagctgcattgctatctctttcaggtcgaaaaggagttcttcctacagagttgtatctagatgactctcgaaggagggtggtgaggtctgttcgctgtctagtgaggtcaagtacccttattcctattcgatttaatgcggatggagaggcagttggttttactaagccaggggggaaccaccatgtggctttgtatagggatggggtagggaacataagagaatcagttgtgccgttctttagagcagttgagcgagctcgctatggcattccgatgattatttcagatccaagcaaagcaagagagcaggcacgagctaatcctaacctaccagaatctgtccttttgtcgctaccagaggaagattggcagttagaagaaattctgcaaggagatgaaatgttccttttgggaatgactgatgaggcaattgatagggcaatggagaccaaggattatactactctgggtcgccacctctacagggtgcagaatctagcagcaggcgactatgtgtttaggtatcacctagagacaacacttgatggtaaagacaatgtgggggatatcccaagctcgtatagaattgcaagtcagaaaagatatcaggagctcaaccctcgcaaggtgaagatagacctccttgggagaatatctcttgcctgagtcaatagcttagtatcatgatgaagcataccctttacttcgggagtcctgcctacctcgcccttaggaataagcagatcgaggtgcgtcagccctgtgagggggaggctaagcgcccagtacggacaatcccaatagaagatattggggtcgttctacttgaccatcagcagatcaccatcacccatgggctcctgcatgcactcctggagaataactgcgccgtagtaacgtgttctcctagtcacctgcctgcggggcttctacttcctctcgatggacacacactccagaatgaacgcttccgtacacagctggaggcctcccttcccctgcggaagcaactctggcaacaaaccgtgcaggctaagatcctcaatcaagccacgctccttgggcaagtccttggggaacctgcgaagaacctacttgcctgggccaagcaggtgaagagtggagactcggagaacctagaggctcgagcagcggccttctattggcgcaacctcttcatctctctgcctggcttcgtccgagagcgtgaggaggctgctcccaacgcccttctcaactacggctacgcaatcctgagggccatcgtcgcccgtgcactcatcagctgcggtctactcccgacgctgggtatccaccatcataacaagtacaatgcctactgcctagcggatgatatcatggagccctaccgcccctatgtggatcagttggtcgtcgagctctgtgaggaggagatccctacggtgctcaccaaggagctgaaggtacagctcctctccatccctactctggacgtcgagatagagggactgcgtcatcctctgatggtcgctgtctctctgacggcgggctctctactgcgttgcttccagggagaagcccgtaaactatcctatcctatactccgatgaaagcaagtcgtctaagtgaatatcgtgttatgtgggtctttgtattctttgatctccctacctatacgtcgctggagcgtaaggcagcctcaggcttccgacaaagtctgctgaaggatggcttttcgatgtttcagtactctatctatacccgtcactgtgctagtgccgagaatgcagctgtgcatgtgcgacgggtgaagggtatgcttcccgaggagggcgaagtcgtaatcatgacgatcacggacaagcagtttgtgatgatggagcacttctcttcgcatattccaactaagccgccagtagctcctccacctctcgatctattcgggttttaggaaatacattcctttgataatatagaaagagccgatggtattccatcggctttttcttttctataaatcttcgtaaggagctagtgcatagctggatatctatagtcagttgtactagctattacgaaggtactgaattgaaagctaatcacaacagctcaggttgccatattgccccaaacacggttgtactagctattacgaaggtactgaattgaaagctaatcacaacccactcaccgaaataccaacagccaagatagttgtactagctattacgaaggtactgaattgaaagctaatcacaacaccttaaggatcttaccgtcggcatcggtggttgtactagctattacgaaggtactgaattgaaagctaatcacaacaatggcaaagagaagccgattttagtcagcgttgtactagctattacgaaggtactgaattgaaagctaatcacaactcaccttagcgatccttataataacgaggtgttgtactagctattacgaaggtactgaattgaaagctaatcacaacaccgagtgggtgcgtgaagcgctcttcggcgttgtactagctattacgaaggtactgaattgaaagctaatcacaacggtggagttgtcgacgagcaccttaggatcgttgtactagctattacgaaggtactgaattgaaagctaatcacaacgcttttcggcaaaggtgtaggtgctacttgttgtactagctattacgaaggtactgaattgaaagctaatcacaacccttcatggctgatcccgttatccgcgagagttgtactagctattacgaaggtactgaattgaaagctaatcacaacatgttcaagcgtctcccacgcccattctctgttgtactagctattacgaaggtactgaattgaaagctaatcacaaccacgaagcctattgtaaaggatgtatttacgttgtactagctattacgaaggtactgaattgaaagctaatcacaactatcttttgcgtcttgtttgcgagcaaaatgttgtactagctattacgaaggtactgaattgaaagctaatcacaacctcgactcagcgtgcacattaccatgcggtgttgtactagctattacgaaggtactgaattgaaagctaatcacaacagcgacatcataatctatatagtatgtatcgttgtactagctattacgaaggtactgaattgaaagctaatcacaactacacggcgttgttgcctcgcgctcgagcggttgtactagctattacgaaggtactgaattgaaagctaatcacaaccgcagtgtggctcaggcgttcagcttctcgttgtactagctattacgaaggtactgaattgaaagctaatcacaacaaatgttcaaaaataatccaactttgaatgttgtactagctattacgaaggtactgaattgaaagctaatcacaacgaagtttaactaattaatttccagcaaaagttgtactagctattacgaaggtactgaattgaaagctaatcacaaccgtgcgtatagtcactatttctttgtgcccgttgtactagctattacgaaggtactgaattgaaagctaatcacaacctgagtactttaaacgcaagtacaatgtgcgttgtactagctattacgaaggtactgaattgaaagctaatcacaactagaagctctacctgtgttgcatcaatcaagttgtactagctattacgaaggtactgaattgaaagctaatcacaacacaacagcttctggtgtcgtggaaactgcgttgtactagctattacgaaggtactgaattgaaagctaatcacaacgcattgagttgagaaagtgtaacattcctagttgtactagctattacgaaggtactgaattgaaagctaatcacaacctacaccgcgcaaagattcgcgacggcaatgttgtactagctattacgaaggtactgaattgaaagctaatcacaactagtcttttacaatccgccgtccttcttcagttgtactagctattacgaaggtactgaattgaaagctaatcacaacgattggttgctctattatcctatctttgctgttgtactagctattacgaaggtactgaattgaaagctaatcacaacttacccgtcgcctcatcgaggtagatgtttgttgtactagctattacgaaggtactgaattgaaagctaatcacaacggatccttttgcgtggagacatagctaagagttgtactagctattacgaaggtactgaattgaaagctaatcacaaccgctacgaggaggtctatgcagaccttgtggttgtactagctattacgaaggtactgaattgaaagctaatcacaacaagctcctatctaagagtgaaccacaagaggttgtactagctattacgaaggtactgagttgaaggttaattattaatgttcagtcttggaaatagggctagcgggaaatatggattgggattgggttggcgaaggtctataggagagaagggtgtatcctagttgggaggagaatagccatgcgaggcttatgctatttatggcgggataaagtgtcccttacgctatggttttcacggtaggtctttgtacctttgccttgggggtacactgggggtagagtgatttgccctctagactgcccggcaaagtgataacatattacacttcattatcaggatgaaaagaactactatctgcttcactctcgcagccttgtttatggggagcttgtgtacccaggcacaagtactgacccgagggaaaagctatggaacacacccgcttactactccagtccttattgattctgtcaatctaagtaagacgagctttgaactgacgagtttcattaaacgtccttatgagattgaaggaagacgctctacctctgtagctgcttcgtcaaaggggatatttgccgtacctcagggagctaaccccggtgtagcttcactctcggtgtactcatttagtgctgtttctcctacatacacaaaggggaatctgcgtctctatggacgaggtcgctatgcgatctatgccgatggtacgctccttagctcgaatgagaagaccccagtatctagcgacacagtcccagccatcacggctcctcttacgctagaggctacgcataaggagctggttgtaaaggtgcttcgtatgcccaaggatagcgtgaaagccgacttcaaacttgtttttgtgcccgaggagaagtttactccgctagactcagtagcctcgatgaatggtactcacttcatcgactggaagtatattacacatggcaagcgtatttactcggtatcggtatctccctctggcaagtatgcgttcgtggtatgggcagatcgtgtgccgaagaagggtgcgacctatgtggatattcgtgatgcatcaggcaaggtacttcgctcgacacaagggctatatggtgcacgttggatgccaaagcaggattacctcatcctagagcgagggaatgggaacaagcgtcagcttttaaagattcatcccgtgacgggagagcagagtgtgtgggtcgataatctgcctggctctagctatacgattagccctgatgagaagacgatttacttctacgagcaaggaaagggcccagggaaaaatccacttgctatacgccgtatttctcctgatgataggcagcccggctggcgtgatcgtacagagatttatcagtatgacattgcctcgggggtatatacgcctttgacctatggtgtacgcagcaataatatctatgatatttcagaggatggctcgaagctcctactcggtgtacacgggatggattggacgaagacgccctatggacacaccaccatcctactctatacccctgctacgtctcgggtagacacgctgattaaggatgaaatagagatagctgacgtttcctttatcccggggacgaaggagttactcatcactgcttcacccaatagctttaattccgcaggtagcaccttgccggaaggggagtggggaaatggatatgagcgagagcttctccgcttcaacatggagactaagcaagtagtacctctgaccaaggacttcgcacctagcattgcagatgtgaagggatatgtcgccaagcagaaggcgttctacttctctgcggataatgggagtcgtaaatccctttaccgtctagatattaccacgaataagattactccgctcaatgctagcgaggaggttgtgcgaagctttagcctctcgagtacagggaatgcactttggtatgtagggcagagcctcaacaatgccgatcgtctctatcgactagaggctcctggtaagagtcgccttgtctgggatctctctagcgagaagctccgtgatgtgcgttttactccagctaagagctttgtctaccgtactcccgacgaagttagtatcgatggctggtactacctccccccgaactttgatccaaagaagaagtaccccatgattgtctattactatggcggtacgattcctctgactcgcgagctggagacaacctacgatttggcgatgtttgcctctcagggctatgtggcactctctctgaacccaagaggctgtactggctatgggcaggcattcgctgctgaccatctgaatgcctggggcacaaagactgcagatgatatcattggagctgtgaaagccttcactgaggagcatggcttcgttgatgaaaagaaaattgggtgctgtggcgcaagctacgggggcttcatgacgcagtatctgcagacgaagaccgacatttttgctgcagccatcagtcacgctggcattagttccatctcgagctactgggcaggaggctactggggtattgcatacagctcggtggcttctgcagggagctatccgtggaataacccagagctctatacgaagcatagcccgcttttcaatgcagataagatccacacaccgctcctgctcttgcatggtacctccgatgtgaatgtaccgcctagtgagagtacggcactctataactcgctgaagatcctcgggcgtaccgtagagctggtcgagtttacaggtgaagaccaccatatcctagagcctgagcggaaagacatttggatgaagaccatgtttgcgtggttcgctaagtaccttcaggataagccccagtggtgggatgctttgtatcccaagacggtgtacgagcagtaaatagtcgcttgttcccctaaaaaagaggtgataagatgtctagtccatccgccacagttgatgtggtggatggactagactctttttcgtctcttatggatatgtactaggtgcactatctcgctgtttgatagtaggctacaaagaactttacgtatatttgtcgtacactgttcccttgacctaccgaggggataagcaaaacaacagacattatggaaccgatcatcccacacgtcaccaacgagaccgaccctctgaaggtcgtggtactcggtctgcctcacagcctcggaggagtgcccaagctcaccgagacctacgacgccaagagctacgaggcagttaataaaggtttttatccgagagagagcgacgtcatacatgagatgaatgaggtgcttgctattctccagcgctatggggtagaggtgcttcgccctgcacccctagagaactataatcagatttttgcccgtgatgtgggcttcacgattgataataccttcttcatctctaacctcattcccgaccgagccttagagacggatgcctttgctacttcgatcttgcctcgcatagcacaagaccatatagagcgtttgcccgaagaggtgcatactgagggtggggatatcctactctatgatgatgtgctcttcgtggggacctatttggggccggattatcctgacttcaagactgcccgcaccaatcgctatgctattgactacctgcgagagcgattcccccgtaagcatattgtcccactagagctgaggaagcatgaccaagatccacgtaagtcggtcttgcatcttgactgtgccttccagcctatatcgaagggaagggctcttatttataaggagggcttcctacataagaaagatgtaggcctcttggaggaagtctttggacgtgataacctctttgctgttaccccagaggaggcctattacatgaatacgaatatcttctccctaggcccagaggcgatcattagtgaccaacacttcattcgtctgaaccagttcctgcgctcagcctggggaatgactgtcgaggaagctccctatcaagaaatctcgaagatggggggactcctacgctgttccactatgccacttgtgcgtggggcaaagtaagagactgctcagctatttgtgtgtagcccctgcatccttccctagcgagcctagggggaggtgtgggggcttctccgtctgtcgttctacgctctgctgtatctttgtagccatataaagcggaaagagatgctagtaaatgagatattctacagcctacagggagaggggctgaatatggggcgagcctcgatattcattcgcctgagtaaatgtaatctgagctgtagcttctgtgatacggagtttgagagcggcgtggagatgacgctggaggaggtgagggatcggatagcccagtggcccggtaagcgtattatctggacggggggagagcctaccctgcagctgacggaggagattgtggattacttcaaggctcttggctaccatcagtccattgagaccaatggtacacgtcgcccccctcgtgggctagactatatcacgtgtagcccgaagaaggaggcgatgcgcctgctctcccgtaatttccctgatggcgtaaatgagttccgctttcctatagggaaggatatagacttgcctccaaatatcagtgaccttccgcctgcggaggcctatctgcttagtcccatcttcgtaggggagactcagggggaagtagatggctctgccgtagagctctgtgtggattatatcctcaagcatcccgaatggaggctcagcatccagatgcataaactgattcacatcccctagggccttatgcgcttccctctctccctttaccttgctatccttaccctgtctctccttctccctgcctgtacgtctcgtcttttgagggaggcagagactgcggaggctcgtggggaatatcaccaagctatggggctgtataaacagctctaccagcgtacacctagggagcaaagggcagagaaggcacgcctagcgtttcgctcgggggagaatgctcggtgtctcagagcttttgcctctgcccgcacgagctatcactcagctctaaagtatcaatatcccgatagcctactcctcattcgtcttgcggaggtcgctttggctacgggggcatatcaggaggccttgaccttcgctcggcgttaccttcgctatgattctgctagccgagaggctcgtctgctggaggaaagtgctggcttcgccctccgcacggctcaccccagtttcccctctgtgttgcgctataaggtcacccgatcggggcacttgtcctcctcccggagtgactatggtgtcgcctactcgcctgaggggaaaacgatttatttcactagtcataggcgcccctcggcaggggctagtacccagagtccgatcacgggtgaaggtctaggacgtatctacgccctgcatcagggagcgaatgcctcttggtcgggtaaggtagatacactcgcagggctagcttcacctcagagtgacataggcacccctacctttacccccgatgggcggacaatgtattatacacgctcagagcaggggaaagagggggtacacactgctcagatttatatggcatcacaggggggagatgggacatggagtgaggggaagccgttctctatctttgaggatagtacgatactagttgcccatccttcgttaagcccctcggggaagacccttttttttgtctctgatgtagctgggggtaggggaggcaaagatctctatcgtatgagcctagaggatggagtgccaggagtgatctataacctcggtgagcaagtgaatagtcctcgggacgagctcttcccctatgctgtctccgatagcgtagtttactttgcttcagagggctggatgggctatgggggactagatgtctaccgtgctacgctcctgcctgatggaggctatgaactccaccatctaccttatcccatcaatacccatgcggacgactatggctttgccccagctcccatcgtggacgagctgtctggagggaagagcttccgagaggtaggtttcctagcctcctcccgtgatgacctaaggggggtaccgcatctctatcgctttgagttggagaaggtcgagaccattattgagggaattgtctctgaccgagaggggtaccctctctctggggtaaccctaagcctcgtaggcaatcgccgtgaggggcagatgcaggccgtgacaacagaccaacaagggggctatcgtctcccagcctcagctgatacggactatgtgatgctggcctcggcgcagggttacctcaaccagtacgtgcgtctacataccgatccctcagacagctccgaggtctatacggtggacttttatctagctcaggagggacg

SEQ ID NO: 3310 - DNA, 23522 bp, synthetic construct
  source 1..23522: mol_type = other DNA
  misc_feature 1..23522: note = Synthetic
gcctgctggggctgaggagggccaaggaggatgtcgttgcctgccagcagcgctgcgacgatgagggattcccctggcttcacctgtgcgcccttcatctcgagggcatcggtgaagatcagtcccttgaagcccatctgcttctggagcagctccgtggtgatcgggcggctgagggaggcgggtcgtcccgtagggtcataggcggggacacgtaggtgggctgtcatcacactgccatagccagcggcgaagtagctacggaagggtgcgagctcgagtgcctccatccttgccttgctggcgcccacgctcgggagcgtcttgtgtgagtcctcggaggtgtcgccatggccagggaagtgcttggctacggagaggacgccgcccgactcgagcccttgggcgtaggccagtgctccacgcttgacctcttccacagtgctgccgaagctacgcgtgccgatgacaggattgcgcggattgctgttgacgtccagcacaggggcgaagttgatgtgtatccccatgaggcggcattggcgggcaacctcacggccgtaggcctcgaggagctggggggaggcggctgctatctgctggctgcgtggatagcgcggggcatccttgaggcgcatatagagcccccattcgccgtcgagggcgatgagcagtggagtacgggctgcctgctggaggcggagggtaagctggcgctgctctgccagcagtcccttctggaaaaggatgccgccccactgctcccgcttcaggcgctccagcagctgtgtgctgtctgcggggacggggtagatgatgggcatgatgagctgcccgaggcgctcgcgggggctgagctcccgatagacactatcgacccagcgctccataggacgctgggggacgccctctaggacgcgtagggatctagaggcagtggggcgctgggctgctagtgggagcgtcgcgagtagtaggagggtgcagcggagaagaggagtgatcatctcgggatcatgcagttacttaggcgcgcggcggaagacccagaagcgctgtagcgtgtagttgaagaggacggagacgacgaggtcggctgctagcttacccagcttgtagtcgacaccagcatagcgctgcagtgcataggtgcctaggtacttgagcaggatgctgcctgcgacggtgagggtaaagcggaggagctgccccttgagactgctcgtatagcccgccttagggtcgctgctgcggaaggtccagtagcgattgagcgtgaagttgatgatcgcccccacgacacctccgatcgcgatggcccagaagagggggaggcccaggagctgacggcagcagaccatcagcccatagtccacgacagagccagcaccggccgagacctgcgctagggagaaggtgagcacgagggctcggagacgagcgcggattcccaaggggctcctaggactcggatgagtgctccaccttctgctccaggcgtgccgcggcatcacgctcgttggccagtgccaagagacctgcgaagtccgtgaagaaggctatgagcaggacgacggagatggcgaggcctatccactggatgctgcctgagaagaagtactcgctagagaagagtagggcgaggatgatacgcacctccgtcgggccaaggaggcccgagtcgatggagtagcggtcggtgaccttgtagcggagctgtgagatgatcatctctgcaccgtagagggcgacgaagatgaagccgacgagcttccactcaggtgctacgtagctgtagtagccgagcccgatagctacgatgcctatccagtcgacgacgatgtcgaggcagaagccgaaccacttgcgcggcttacctcggtagtaagcgaggcgtccatcgagcgagtcgccgaaccagttgatggcgaagcccaggggcgtgagtaggagccaccagctctcacccgtcagtgccccgaggagcatgaagagagctacgaggaggttaccacagagcccgatggtggtgagcatattggaggtgacccaccgcggcatacgctcgacgaggtaggcgatgagggcgagctcctgggtgtggagcacgttggtgcgcttgcgatcttggctgatcgacttctttgtatccgacatagggtatgatgtctttgtgctggctggccccaagcggggaggggcgaggctgctgttcttattctcttttgagtaccaacgaggaccaaggcttagtcgctacctcgagtggcaggctagcgtggctgggctagctggggctgtgaggcggctttgccgcccttaccccagcgcttgtagtactcgatgttcttatctatgcgctgcttcttagccgtgtcgggcttgaccttgcgcagttcttggggcttggactccataggatctgtggcacggatgtcccactgctcttcggtagtgaagcccttcttgatggcgaaggtctgggggcagtagtagacctcctcgggctgtcggggatagtccccaggggtgaaggcgccattgtcgtctgcgtctacgatgaggcgcaggtagtactccccgggcttgaggtccttgaagcgcacctcgaggtgaccaaggctatcggaagctgctggcttcgcgctgggctggcttaggctatcgcgagcggcttccttggggcgttggatgaggctgtccactgctccacgtgcctgctggcgctgcttgctgagcagctgctggaggacggcatcggaggcttcggactggggagcggggctggccttgggttgagctgcagcacgctgcgtgctgtccttagcgatggggagcgccttagtctgggcgatgacagcgtcgctcttgtcgaggagctgcacaagggcgtgctcccgtatgcccttgagctggacggagagttgacctagctcctgttccgcaagggtgctttggctgaagctcagcgagtcggctgccgccccgtagatgtcccgtacggcggcggagtcgagcttcagctgatactgctgcccatagcctcggatgaagtgtaggctgtagctgaggcggtcgagactgtcctgcacgagggtgaagtcaaggggcttcgtcgtggagtccaccgtcaccgtcagccgcagcgcctccttgggtagccgagcgaggggacggcttgcggtgatcttgaggctatcctctagactctgggcgcgtagcccagtggcgccgctggccagtagctgcaagggggacttctctacctcgcctctcttggtacgcggtgtccgtagacggggcttgaggaagctgagggtatcggtatgcagggctacacgctgtagggagtcactgcgctcgtagctgagggcaaagcgtaccgagtccccagcgatgagctcggcatcacgtagccataggtctagggtgcgtcccttcatgctcgccagatacagctgggcggcgggagcgctgggcttgtcgatggagcggatgacggggaagctacccgtcggggagaggaactcgatgcggcagaggaggctatccacgcggctgtggcgctctatgcccttgcggatgatggtcggcacggagtagcgcagggctacatcctgggggtagtaataggtataggggcgcgtgatgaggctgtcgcggtggagcgtgtcacgccgcacgatggagtcgatgcgtagcgtgtcggtgcgaaggctgtccttgagcgaggtgcggtagctgcgcgggctgaaggcgagcccttcgctgggctcgttgtagcggtagttcctatcgttgtccttcgtggcgaagacgaggtaggtggagtcggggaggcctctcagggtgaagcgccccatcttgttgctcttcgatacgtaggggaaggtacgctgggccagcgtgctgtcgctcatctgcgctgggtgataggcgccgatgaggaggtcaccgatgggctcataggtgagggcatcgacgacgcgccccgagacctgcatggagtctaccttgtcccccgtggagaagaggtaggagaagtcctcgagggcgttgtcctcattgttgtccatgatcgcgtcatcgaagtagaagctgtaggtggtcgctgggcgcaggctatcctctagatagatgatgacgctgtgcccgctcgtggtgatgcgcgcgggcttgagctgggcgggggatacgatgatcttatcctggtcgctggagagcttgatatactcgtcgaagttgaggacgagccgtcggctacgtacccccgtggccttgtttgaggggttggcctgcaggaggcgtggaggctgggtatcgtaggggcctccctctggggcaccttggttcgcacagctgccgatgaagagggcgctgaggaggaaggcaaggacgaagcagagggtatgcttgggataggtcatctaggaggtctgtcgttgggagtctttagtgagcagcggccttggccttcttgctcgtcatgatcttgaggacgtgctggtcggtcagagccataccctcacgccctagctcggcgaggttgctgatgcagcggtctatgtcctcatcgacgatcccctcgttgcccgtcacgacctgtccctgcatggacagcagggcggcgatcatcgcagagcccacgcctgtggaggccttgaggctgcagctgggcttggcgccatcgcagatcatccctgcgacattgcctatcatgttcttgatcgcgccgatggcctgctctcgtgtgccaccgaggaggtaggtcagggcgcaggctgtgcctacacccgagacgaccatgccgcagaggcaggacagacgtcccagctgctgcttgatgtggatgacgatgaggctgctgagcatcagcgctcgggtggcctgctctcgggtagccccctggtgctcggcgaaggtgaggacggggagcatggaggagatcccttggttgccgctgcccgagttgctcatcaccgtcacgggtgctccgtccatacgggcgtcgcaggccgagctcgtgtaggtgagcatctgcgagaggacggtgttgccgaagaactgcttcccgaggtcgctctgcatcatcttcccgagctggtgcccgcagctgtgctcgagggagtactcgctggcacgcttgttctgctgggccgcctcgtagatgaagtccatgtcctcgatagggcccgtgagggagtattcgtagacgaggtcgaagttgaggcggatgtccgtgtcctgctccgggcaaggagcaccctcacgctctgtctcgaccttctgtctcgaggcttgctgggggacgccatctagctccagttccgtaaggcccgtgtgtgtacgacagaggacggcacgtgcgcagtgccccgcagtgtcctccaggagcgcctctacgtagagcttgtcgatgccctcgccctccttgagcccgatggtgatgagaccactgtctacgagctgcttggcgcgttggagctcctcgcagctgaagcagtcgaggagctccagctgcttctcaggacgcgctaggataaccccgagggcgatagcgatggggatgccgaacatgctcgtccctgggatgccgaccccgagggcgttcttcagcatgttggcgctgagtagtacctcgacgcgggagagctggtctctatccttgaggagagaggctgcataggctacggtcagtgccacggcggccggctctgtacagcccgtagctggtacgacctcgcggtgcaccagctcggcgatctgcttcagctgacagggggtaagcataggacgggctgcttaggggtggctacgaaggagctgggggagcttcttgtcgcgctccttgaggggaaggtaaccgccgttcatagcgggctcccaggtgccgtagttggggttgggcagcacgatgaagcgtcggccgaactcgcgggagagcttcgccacagctgcctcacgcgtctgctcctgcttgctgtcgaagacgtgatcgaagtccccgaggttgtctccaaggagcatcaggatctcgtactgctggagtacggcgctgcggcgtgccgtcttgtccgaattgcgggaggcatcgcgtagcatcaagtgctggtcgtcagcctgcggtagcccgaggctgcggaggttgcgcagcgtgcccgcgcggttgacctcatcacggttggagatgtagaagatctgtaccccgagggagtccgccttgcggaagaagtcgacggcgccagccagcgcgatggcggaggcctggtcgcaccacttgtcccaggaggcctgggtgaagtcctcgcccttgagggcctggtgtacggagttggcgctgttgtctacgatcgtctcgtcgatgtcggtgacgatagcccagcggtgcccgcctcgggctgtggcggccaggagtcgctcagtggcgatgttgtaggcctgatggcagagggccttgtattcggcggagcgctggatccaggccgaggtatagagcttgcctcctagcgtggggctcatagcctcggggctggccttgggcgtcatgacgctgcggtcattacccacggcgatgatgcagctggaggtggtcgctagggcgagggagctagctagcgccatggtgaggtaggtacggcggatcataggttcttgctttcgtgtgatgtatgctggtgattgaggtagcacttgcgacagagcgggctgtactcctgggcttccccgagcatgacctgctggtcgcccgctaccaggcggtaggaatagttggcccagctgccgcactcgacgcagatggcgtgtatcttgtctacattgtcggcgatgcagcagagctcggccataggaccgaaggggcgccgctggaagtccatgtccagccctgcgatgatgacgcgcacgccttggtcggcgagctgctcgactacggagatcagcccctcgtcgaagaactgtgcctcgtcaatcccgatgacatccacgtcggaggccatcagcaggatgctagaggagcccgatacggggctggaggggatggcattctggtcgtgggagacgacctgctctacatcgtagcgggtgtccaggctgggcttgaagatttccacgcgcagccctgcgatcttggctctgcggaggcggcgcagcagctcctccgtcttgccgctgaacatcgagccgcagatgagctcgatgctcccgcgctcgcgtgcgtggcctgtctcgaagaggttcatcatcgtcccgcccctccctcggcgcgtacgcggagctcgcgcgtgccgtcagccagctcacgcagctctatatataatgtatcctcggggagtaggggctcgaggacctcgggccactcgatgaggcagatcgcgccgctctggaggtagtcgtcggcgccaaggttcagcgcgtcctccagccgctccagtcggtagcagtcgaagtgatagatcacttgccccgagggctcagcctggtactcgttgatgatggagaaggtggggctattgatcacatccttcactcctaggcgctcacagagggctttgatgaaggtggtcttcccagtccccatgggagctaggaaggcaaagactctgctctggggcagcacctcgcggatgaagcgatcggcgacatcgccaagcgcctcaggggagggaagtagatagctggtgtctaagtccatttgttcgttgcctcgcagggtaagctataccctacatataggatattacaaatttaggacattcggcgcacatcaccgcatcccgagctgcgggcagagggctgatctcttgctaaggctcaaggtaggctgctcttgctccctgccctgggatggtggagcgataggcggtgcgggaggccttgtccttagcctttgtagcctcacgagtaggctgcgaaggtagctacaagagctcctggcaaagggcataaggagggcaccgcagggtgaggccttggtctcagctctgtgagggatatccctcggcctgctgacggctacccctcgcgctcgtgatggacgcccctcagcgctctgactgatatccctcacgagggctccctctatgggtgcagctcacggcgacttggctgtcctcccttcgattatataggaagggtaggggaagagatgctgcttagtctcgatagaagcagctagccccgatagcgtggcaggtgccgtctatcggggctagtagaggttgtgcttagctcctaagagggagctggagctgctaggcctggatgccgaaggcctcgcgcacctgatctacgtagtcgaggcgctcccaggtgaagagctcgacgtcgaggctcagcgtgctaccgtcgtagttattgaccgtgcgggtcacgtggcggggctcacggccgaagtgtccgtagctcgccgtagcctggtagataggcttgcgcagctgcagacgctgctcgatggcgtaggggcgtaggtcgaagagctgctggatacgcgtagcgatctcgctatcgctcagccctacgtgggacgtgccgtagctgttgacgaagatgctgatgggctcggccaccccgatggcgtaggccagctgcacgaggaggcgatctgcgacaccagcggcgacgaggttcttggcgatgtggcgcgcggcgtaggctgccgagcggtctaccttggagggatccttgcccgagaaggcgcccccaccgtgcgccgcacgaccgccgtaggtgtcgacgatgatcttgcgccccgtgaggcctgtgtctccgtgggggcctccgatgacgaacttacccgtggggttgacgtagagcttgaagtccgtgtgctcgatctgctcgaactcagctgcgtagccagcaaagactcggggcaggaggtgctggcggatgtcagctgtgatcttggcctgcatcgcggcgtccgctgccgcctgtgcctcggggctcttgtcctcgggctggatgaactcatcgtgctgcgtgctgatgacgatggtgtcgatgcgcagaggcttaccctcctggctgtactcgaccgtgacctggctcttggcatcggggcgcaggtagggcatcagctcgggctcctccttgcggatgtgagctagctcctccagcagcgcgtgtgagaggtcaagggtcaggggcatataggagggggtctcacggcaggcgtagccgaacatgatcccctggtctccagcgccctgctcctcagggcgtgtacggtctaccccacggttgatgtcggcgctctgctcgtggatggaggagagcacggcgcagctattgccgtcgaagcagtagtcactcttgttgtagccgatctggcgtatgacctcgcgggtgatctcctggaggtctatgtaggccttgctcttgacttcgccagcgaggatcacctgccccgtcgtgacgagggtctcacaggcgaccttggactgtgggtcgagggcgaggaagtggtcgaggatggcgtcggagatctggtcggcgactttgtcgggatgtccttcggagacggactccgaggtgaagaggtagctcatagctatatatcttgtagttatttggttgataggaggctgagcgcctataacgtaaaaagccttggctgcagtggggcaaccaaggcgcgataagggcgttcactctgtcctgccgcagcgctcgagccgctaggctactgggggcggcgtgacgggtttagcattttttcgcgtggttgcaagcatcacaaatctgtccacgtactggtctcttagccgctgcaaaggtacgaaaaaaagcgatgtagctcatctcgccccttgtggagcgccctagggagtggggcggtgcgctaagtgcctcgcttcccttagggcgcttcggcttggggacgggggctcgggggcgctactctttggcctagtgggggctaagttatttggcttattccttgattttggctacgtttgtaccaagccttcgacgtgtaaggtactaataacagtatagcatgaaaaaagtcttaggtctcgacctcggggtcggatccatagggtggtccctcatcgccctcgacgaagacgagcgccccgccgagatcctcggtatgggctgccgcatcgtccccctctcgactgaagaaagtaagttcgccagtggcgaaggtatcagcaagaatgccgaacgcacccagatgcgcaccatgcgcaagatgctcgaccgctaccagcagcgccgcaccaaactcgccaacatccttcgcgagcaccagatgtaccccgacgaggcgctcatgcagctccccctcatgcagctctggcagctgcgtgccgatgctgcgacccctgggcgacagctcagcctgcccgagctggggcgcgtcctctaccatctgagtcataagcgtggctaccgacacagcaagagcgacgagagcggagagaaaaaggacacggagtacgtcgccgaggtcaagagtcgctaccagcagatccaggaggagggcctcactgtggggcagcactttgccaagcagctcaaggaccaagagcagcgcagcgagcgcggcggcgtgtactacaactaccgtacgaaggatcaggtcttcccccgtgaggcctatgccgaggagttcgatcgcattatgtccgtgcagcgcggcttccaccctagcctgacggatcgccttatcgcgaagctaagggactgcatcttctaccagcgtccgctcaagtcctgcaagcacttggtgtcttactgcgagttcgagcgcaagcaggtcgagtgttccgtgaagcaagtcgagcgcgatggtactatttcctacaggacacagctcgtagacgtcggccccaaggtggcgcccaagtcctcgcctctggccgaagtttgtcgcatctgggagacgctcaataaccttcgcctctacttccccgacggcagtgagcgccccatcacacaagaggagcgccagcggctcttcgattacctacaggagaacgatacgctgagcttcactcagacgaagaagctccttaagatcaaacctaaggatcaggtctggtgcaacgatctactcactagtaaggtgaaggggaatcgtaccatagccccgctcctcaaggccttcgccgattacccccagtaccttgagctcttgaccttcgagctctccgaggaggagaaggtcgaccacgagacgggcgagctgcggcctgtcatcagcgagcgctatcaccaggagcctctctataagctatggcatatcctctactccatcgaggacaaggaggctatgagacgagcgctgaccaaacagcttggtatctccgaggctgatctcgacgcagggctcctcaatcagctcttcaaggtagacttcgtcaagcagggctacgccaataagtccatcaagttcatcagcaagctcctcccgcatctcatgcaggggcatatgtatagtgaggcagccaagctagcaggcaagcgccattccgatagcccagactcagacgaactccagaaccgtccacttctcgataagatccccgtgctgcagcgcaactcgctccgtcagcccgttgtggagaagatcctcaaccagatgatcaacctcgtgaaccagctcaaggtagactacggagagatcgacgaggtacgcgtagagctagctcgcgagctcaagatgagccgtgaggagcgcgagcgcaccgcgaagaatcagcgtaggaacgagaaggagaacaaacagatcgccgagcgcatcgccgagctaggactttacccgacacgagctaggatacagaagtacaagctgtgggaggagagccaggagcgctgtatgtactgtggccaaatgatgaacctctcccacttcctctccgggaacgacgtggaggtagagcacatcatcccgcgctccatactctatgatgactcgctgtcgaataagacttgcgcttgtcgccgatgcaaccaagagaagggaaaccgtaccgccaaggagtacatcctaagcaaggatcaggctactcaggaggcctataatgcgcgagtgcaggagctctttgagctgcataagatcagtgcagccaagcgtagccgcctacacatgaccctttccgatatccccgaggacttcatcgagcggcacctgcgcttgacgcagtatatctcgcgcgaagcgcagagcatcctcgctaaggggatacgctatgtgcgtgcctccgaggggacggtcacggcgacccttcgccgtctgtggggctacgatgagatccttaagaggctgaactttgagatctacaagtctcgaggggagacggagacggtaagtgtcgggggcgtagctaccgagcgcctcgcgaactggtccaagcgcaatgaccaccgtcaccatgccctagatgccctcgtcgtggcctgtacgcgtcagggctatatccagcggctgaatcgactgaatacagaagaggacaagcagagcatgcgagatgagcttcccgcccaagaggagcagcgcggagagcggctgcagctgctagagcgctggctgatcgcgcagcctcacttcgctccacatattgtacaggggaaggtagcagagattctcgtctccctccatcctggaggaaagacctattcaagaggacggaatataatcaagcggaagggacaacggtttgtccaggagggtatcctagtgccacgtggtgccctctcagctgagaccgtctatggcagcatacagcagggagaccacagagaaatcgtctgcaagtatgctctgcatgcgataacaggaaaggatacgccccacattgtagaccagcgtctcaggagcatcattgcccagcgtctcgccgagtacggcggtgaccccaagaaggccttcgccgagccgctgtactcagaccgagctaagacgcagcaggtacgctctgtgcgctgctttacgggtctactcaaggagaagctggccccactgcatcgggatgcggaggggcaggtcacagcctttgtctcgccgagcaataaccatcatgtcgccctctatcgagacgcagcggggcagctgcaggagtgtatctctagtttctggcaggttatagagcgtgtgcgctttggcctaccccccatcatctacgaccctcgcgctacgatggagcaagccctttccatcgctgagctccctgaatctgtgctcaaggtgctcccgccttcggattggcgccgcctcgaggtgacgctgcgtcgtaatgatctcttcctcctggggatgagcgatgaggagatcgccgcagcactagaggcacagaactacagccttcttagtcggcacctttatcgcgtccagaagttggcaacaaagaattactggttccgccaccacctagagacaagtgtgacggataagacgaactcaagcggagatacccccaagttctattgtgtaactagtattaagacctatgttagactcaatcccaggaaggtaaaggtcgaccgcctcggtaagatcagcctcctctaaaccatcaaagcttgtatcatgataaaacgcacgctttactttgggaatcctgcttatctgtcgcttagggacagacagcttgaggtacacctaagacaggattcccctagtaaagtaccatcacggacgatcccgatagaagatatcggggtcgtcctccttgatgatcctcagatcaccattacccacggcgccctgaatgccctgctggagcagaactgcgctctcatcacctgcggggcgagccacctgccctcgggcttgatgctccccttggatggacacagtctacagaatgagcgcttccgaagtcagcttgatgcctcgctgccgctccgtaagcagctgtggcagcagacggtgcaagccaagattcgtaaccaagcaacgcttctggcctatgtgctgcaggagcccgtccccaatatgcttgcttgggctcgacaggtaaagagtggggatagtgaaaacctcgaggcacgtgcagcagctttctactggcgtaacctctttattccacttcctgattttactcgtgagcgagagggctcggctcctaattcgctgctgaattacggctacgctatcctccgcgctgtcattgctcgcgccctggtgagtgctggcctactacccacccttgggatacatcaccacaataagtataatgcctactgccttgccgatgacatcatggagccttaccgtccctacgtggatcagctcgtggtggagctatgtcaggacgggtattccagtgagttgacgaaggagctaaaggcagagctgctgacgatcccgacgctcgatgtggagctagaggggcaacggcgtcccttgatggtcgccgccgctcagacagcgagttcgttgcagcagtgctttgctggcaagctccgcactctagcttatcccttactgcgatgcgacgacgtagactaagtgaatatcgtattatgtgggtgtttgttctcttcgatctcccgacctatacagcctccgagcgtaaggcggcctcgggctttagacgcgaactgctcaaggatggcttcatcatgttccaatactcggtctatatacgacattgctccagtgtggagaatgctgccgtacatattcggcgcatcaagaatatgctcccagaggaaggcgaggtcattatcatgcaggttacggacaagcagtttgggatgatagagcatttctcctcgcatcagatcgagcctccacccgccccttctcccagcatagagatgctctaggttcagaaaaaatgggcttagacgcgaaaaagccagtggtcacccactggctttttctttcttcgcattcctcgctaagtggctggtcctgttcgacttgttgaggtcgtgttggattgctactgcgaaggtacataaacgggaagccaatcacaactacactgagcctgctgtacgcacataaattgttggattgctactgcgaaggtacataaacgggaagccaatcacaaccaaccccgtaaagtactatcgcattaaagggttggattgctactgcgaaggtacataaacgggaagccaatcacaacgtatttctcacacatttcgatgagtttcgagttggattgctactgcgaaggtacataaacgggaagccaatcacaacgcgcgaccaggagagtacctcgtaccactcgttggattgctactgcgaaggtacataaacgggaagccaatcacaacagccgacctatgcgacattcaacgctaatggttggattgctactgcgaaggtacataaacgggaagccaatcacaacgatgtagtacctatcgtctacctcctcctcgttggattgctactgcgaaggtacataaacgggaagccaatcacaactgctggagtagcgtcgcgcgagccttgtccgttggattgctactgcgaaggtacataaacgggaagccaatcacaacattacgatttttaccgcaggcaggactatggttggattgctactgcgaaggtacataaacgggaagccaatcacaactgctattagtaaggggattcttattcctatgttggattgctactgcgaaggtacataaacgggaagccaatcacaacacgcattgtcgctacgagatatccagttccgttggattgctactgcgaaggtacataaacgggaagccaatcacaactcacagaatgctttgaagcgttcacctaatgttggattgctactgcgaaggtacataaacgggaagccaatcacaacctggagagcacgctgtgcacctgtcttttggttggattgctactgcgaaggtacataaacgggaagccaatcacaactaacagcactacagaaatggacaagtcagtgttggattgctactgcgaaggtacataaacgggaagccaatcacaacgtccactcgcttatatatactgcctatggtgttggattgctactgcgaaggtacataaacgggaagccaatcacaacagtaggagaaacaagcaggcgagagggcaagttggattgctactgcgaaggtacataaacgggaagccaatcacaacaagagcaaagagctcaagcgcaccatctacgttggattgctactgcgaaggtacataaacgggaagccaatcacaacacgcaagctggcggcaatggcttattagtagttggattgctactgcgaaggtacataaacgggaagccaatcacaacggcacgaccgaggagcccgtctatcgcgaggttggattgctactgcgaaggtacataaacgggaagccaatcacaacagggcggctattttgctgatatcgtcgcgcgttggattgctactgcgaaggtacataaacgggaagccaatcacaacaacatttttggagttgtctttgtccgaaatgttggattgctactgcgaaggtacataaacgggaagccaatcacaaccaacaaggggactgagtatggcgatcacctgttggattgctactgcgaaggtacataaacgggaagccaatcacaacacccacaaaagccttgatgacattcacacggttggattgctactgcgaaggtacataaacgggaagccaatcacaacattgttgtagtgcttattagtgagttactgttggattgctactgcgaaggtacataaacgggaagccaatcacaacgcacgaagaccacacgaatagcattatagcgttggattgctactgcgaaggtacataaacgggaagccaatcacaaccgccctcgctctgtcgcagattaccccagggttggattgctactgcgaaggtacataaacgggaagccaatcacaacatggctggtcttcatcatcagctttaccaagttggatcgccactgcgaaggtacataaacgggaagctaatcacaactaagtacgatggagccccctcgtcgctggcgtaggatcgccactgcgaaggtatataaacggggagctaattacaaaccttagggagaggcgaggaaggacgatcgggggcgtttgggtagcccttagggctgctgactgatatccctcagcgctttgatgggcagccctcaggcggctgactggtatcagtcagaggactgggggataggtcgtagggaagggaagcatagctccgaggtgggggatcgggctaccgaggagggcgcggctgccattctatgggggagctgcggctgggtacaggctggggcattcccctcagtatttgtatctttgctctaggctcgcgctgcgttagggctggagcttgccctcgcgcgcgtaccattttagtattcgcgcatggccgcctggcagcgctctagtgagcctgtttgctcccgcgcgcgtacttagttattagtatagactagtcaaggatgaaacaactcaagatagtactcatcggctacggcaagatgggacgcatcatcgagcgcattgctcaggagcgtggccaccaggtcgtgctcaggatagaccgaggcgaggaggcgctcttcgacgatccgcgcttcgcttcggcggacgtagccatcgagttcacctccccccaagcagcttatgccaactgcttgaagaccttagagcgcggcctacccttggtctctggctctacgggctggagtgagcgcctgcccgagctcagggaactctgcgagcgggaggggaagaccttcttctggtcctccaacttcagtatcggcgtctacctcttccgtcagctcgtggctcaggcctcgcggctgatgaagctggcccctgactatcagctcagcatgagcgagacgcaccacgtgcacaagctggatgcccccagcggtacggccatcacgttggccgagacggtgctggccgagcgccccgagctcgagcgctggacgctcgggacggctgcggaggacgagctgcccgtcgtggcctaccgtgagggcgaagtcccagggacgcatagcctgagcttcacctccggggtagatcgcatcgagctgacgcacgaggcctttggacgcgaaggctttgcccacggcgctgtccttgcagccgaatatgccgccacgcatagcggttggctgacgatggaggatctcgtgcagtctcgttaatcctaagtatattcctctccctatgaatagatacccgctctcggggctcagtcctcgtcagctcctcatccgccgcatcaagggcgggattatgatcgtcctgctcctgctcttcgccctctgggcgggctggtgctggctcttgctgctgcctttcttggtagacttctacttcacgcgcttcatcccctggcgttacctcaaggagcaccccaatggtatggtacgcctgctgggagggctgctggaggatatcgtcttcgttgtggtgaccgtctcgatcatcttcacctacttcttccagaactttgccatcccctcctcctcgctggagaagacgctcttgatcggggactatctctttgtcaataagctcagctacgggccgcgcgtaccgatgacgccgctggcgctaccgctagctcacaatacggccttcgggcacaagtcctacctcgatagcccttcactgccttaccgtagactcaagggactgggtaaggtggagcgtaatgaccttgtggtcttcaacttccctgcaggcgatacggtggcgctctcgatgccgaaccccgactactatacgctgtgcgcgcagtatgggcgtgagcaggtatggagcgatcgccagcagttcggcgaggtcgtcgcccgtcctgtagaccgccgcgaccactatgtcaagcgctgtgtcgggctgcccggggagacggtagagctacgtgccaatcagctgtacatcaatggtaaggctatggccaatccgcgtcagatgcagctcaactacttcgtccagaccgacgggacgccgctgccgcaggagctcctcgaccagctggagatcaacgacagagatgtgcagctcatctacgactatcgtacgagcgatgggggagacctctctcccttccttgcacagatgaagctggccttccagtccgagggttcgcgtggctacggccttatctatcacctgcctctgacggctgagatggtgcgcgtactgcaggctgagccttatgtcaagggccttggggtggagcgcacgacgactgagctcagcgggcaagtctacccactgggctacgctacgggctggacgcgtgatgactacgggccgctcctcatcccccgtaaggggctgacggtcgagctcaccccagcgacgctcgcctactatgcccgctgcatccgtgcctacgaagggcaccagctggagcagcgccccgatggggtgatcctcatcgatggtcgtcccgcgacgcactataccttcgcgatggactactacttcatgctaggggacaataggcacatgtctgccgacagccgctactggggcttcgtgcccgaggatcatatcgtgggtaagcccgccttcctctggctctccatcaatagcgagcgtccgctcttctctggcgggatccgctgggggcggatgatgcgtctcatcaatgggaagtaagcaccgccatattcctagcctactgcgctacggagccttaccgctgggagtcgtcctcctggtgctgctcctacgcgccttcctcttcatgccgctgacgctgcagaccagcgctctgtcgccgagctacccccgtggggcgtgggtgctggtgctcaagagcttcgagcctgagtacggtgactgcgtcctcatcgacctaggccgcctaggactagcgaagccctcagagcctagcctcgtggcgggacgtgtcgtcggtctgcctggcgacagcctcgagctgcgacagggactgctctatgtcaatggccgccgtgcgctcgatcatcgccgtgcgctgaacgtgagcgagcactacgcgctgcgtctgccgcgcgcccagggcgtctatcccctgagtcccgtgagcctcgtggcctatcgccaggcccttatccaggagcagcgcaccgaggagcgcctgcacccagggcgtggtcagctcgggctggactccgcccgatggatggagcgtatcgcctcgcgagcgctctacaccttcgcccaggactactactgggtgctggcggacgataccagctcggggcctgactcacgtcacctagggattatcccgcgtgaggccatcgtggggcgtctgctcttcggcctcggcacgcgcagccccttcgtctatccttgatgcactacgacctcctgctctctacggcgctggcgcctcccatcagctacttcaccctcctctatcatcaccagtcgggtagggtaggcctcgaagctgccgagcactacatcaagcagagctaccgcaatcgctgctacatcctcgggcctaacggcgtgcagccgctgagcattcccgtggagctccctgaggggacgaagacccccatcaccgaggtgcgcctctcgacgcacggccagtggcgctccgtctggcatcagacgctcgctacggcctacggcgctagtccctactacgagtactatatcgacgaactggaggcgctgtggagcgcccccgaggatgatagcctctgggggctgaacctcaggctactgctgcacctctgtcccctgctcgagatcgacacggcctgcatctgcccaaccgagaccttcattccgctggactgccacgaggccgactaccgctatagcctgcgccctaagcagggcacactgccccctgccttcgttccccaagcctatcatcagcttgatcgacccgctcgtggcttcgtccctgagctcagtatcctcgatctcctcttcaatatggggcccgagagtccccttattctccaagctagctatcatccctatcctcatgaataagcctaagcaatctgccttcggtccagcccctcgtgtggctccgcgccctgaggagctgcatcacctcgatgacctacgtatcgacccctactactacctgcgggacaaggagctccacgagctgcaagactacctccgtgcagagaatgcctacaccgagcaggtgatggcctcgacccaggagctgcaggaggagatctatcaggagatcgtggggcgcatcaaggagaccgaccagagctatcctacactgcgccgtggctactactactatacccgtaccgagcagggcaagcagtacccgagctattaccgctacgaggaagaggccttcgatgagcgctggagtgagcgcccgcaggaggtagagggcggcgaactgatcttcgacgtcaacctcatggccgaggggcagcccgcctatatcttcgctggctacagcgtcagccccgataatcgttgggtggcctatatgtccaatgcgacgggctcctatgcagagttcgaccttaggatcaagagcctcgagacggggcaggagctgccgctgtgcatcgcgggcgtcgcttcgctggcctgggctgaggatagtgagactatctactacagcttgatcgacgagacactgcgctctagccgtgtccttcgtcagcgcctcgacgaggccgaggggcagctgatctacgaggagctggatagccgcttctcctgcagcgtcagcgagaccaagacgcacgaataccttttcatctcctgttcgagtagcaccagtagtgaggagtactacctcgctacggacggtcgggacacggagcccaagctgctgctagctcgccagcccgacgtgcgctactcggtgctgacgcaccgcgatcgcctctacctatactataaggataaggagcagctcaacggcgccctctacgcgacgagcctcgaggggatcgctgaccgctcctcctggcgtacgatcctcgcgcatcgccccgaggtgcgcctcgagagtctcggtatctacgagcactatgtggtgactgaggagcgcgtcgaggggctctcgcagattcgcatcctcgacccgctgggacaaccactgcgagaggttgccttccccgagcccgtctatacgctggctctgagaggtagcagccagtacactgcgcgcaaggtgcgctacacctattcctcgcccaatagacccagcagcctctatgagtacgacctcgagacgggtgagagtcggctgctcaagcagcaggaggtaggtggtggctaccagccagaggactacgtcgtggagcgtcgctgggcgctcggcgaggatgggacgacgcgcatccctatggccttgctctatcgtaaggggctgacgcgcgatggctcggcccctgccctaatctgtggctacgggagctatgggatctcgatggaggcgcagttcagcgtctctatccttagcctcgtggatcgtggcttcgtctacgcgttggctcaggtgcgtggcgggagcgaactcggggagcagtggtatgaagatggcaagtttctcaagaaggagcataccttcactgacttcgctgcctgcgctcgcctcctcctggatgagggttatacctcccccgagcgcttagcagctatgggcggcagtgcgggcggtatgctgatgggggtcgtggccaatcgctggcccgagctcttcggctgtatcgtcgcccaggtgcccttcgtggacgttgtgacgacgatgctcgacgatagtctacctctgacgacaggggagtacgaggagtggggcaatcccaatgagcccgagtactaccactatatgaagggctattccccctacgacaacctccgtgcgcagcgctatcctgccatgctcgtcacgggcgggatcaatgactcgcaggtgctcttccatgagccgaccaagtatgtggcgaagctccgcagcctcaagacggacgatgagctcctcttgctgcacatgaatatggactcgggccatggtggtgctacggggcgctacagcgggatacgcgatacggcctttgagtacgccttcatcctctacgccctagggctcgtctcctaaggagcggggagtcggctcgggggaatgttgccgagcggcgggcttagcccagcctccccggtatagtcccagaggggacggagcgcactcatagcctgcttctagcttcgtgagggatatcagtcagccttctgactggtatccctcgcgctctttagggacgtccctcagcgcactgactgatatccctcagcagccctccaccttagacccgcgctgtggcgtgggcttggtgcacctttgtttcgtcctaagttagggtggggggaggggctgctgcctccgccctgaggcgcttggcgcagcctctagtgtagtgcagtaaaattcattacctttgtctccgtattatcccagtctctgtggtgcgggctcttgcctcgcccttcgtagggctgcggacacactaggtacattatatacaaaggatatgaacaaggtaagctatgccctagggctaagcatcggg

SEQ ID NO: 3311 - DNA, 23030 bp, synthetic construct
  misc_feature 1..23030: note = Synthetic
  source 1..23030: mol_type = other DNA
tgtggccatcgccctggacgcgcaggatgagccagatgccaccgagggtatcgttgctgatatcctctcggctatccccaaggcacaggagaccgcggtgtacgccaccgacgtgctctacgcccccctcttcgtcatccttgaaggtcgaggcttcaagcgtcaagggctgaaagacctcaccgagctcgggtgtaaccgtgtgggggtgttcgttggggatacccgtgcggaaggcaagggtgcagcgatcggcttgctcacagggcgcatcgccaagagtgccatccagcgcaatgtgggtagggtgagtgatggcaagatcgcggccgacgctctctacctctccggacaacctctcgagacccagacgggcgcggttgccgacctctacagcaagggctacatctgcccccggcagtatgtcggtcgtgtgggcttctacttctgcgatgatcgcctagcgacaagccaggcagatgactacgcacacatcaccgcccgtcgcaccatcgacaaggcctaccgcatcgcctacgatgctctgctgggcttcctgctcgacgagctcgaactacagagcgatggcacgcttcatcctgcggtggtacgtagctgggagcaggagatcacaggcgcgatcgaccgggcgatgaccgctaagggtgagctctcctccgatgagacctcgggtagtggctgtcgcttcgagatagtacctggtaatgtcctcgccacctcaatggtgaaggcgaagctctcggtgcgtcccttcggatacgctcgctacatcgatgtagagctgggcttcaccgctgtatcatctaagtaattctacccctatgaacatctacaacggaagagagtacgagtggatgagcatcacgctgctccttggcggtcgtcgtgtcacgggtattcgtggcatcgagtacaccgccgagcaggagcaggaggctctctacggagctggcagtcagcccatggccgtgcagcgcggtaacatcaagtactccggaacaatcaccctaacgggtagcgagtttcacctcctacagaaggcttgcgggggaagcatcctcggcgcttcgacgaccatcgtcgtgtgctacggtgacccctcccagggcgatgtcgtacataccgataccctcattggctgcaccttctccaaggaggaggacaagtggaaacaaggtgacaagttcaccgagttcgccatccccttcctcttcctgcgcaaggagagcatctaacagcattcaaacaaccattcaatagcattcaaatggaattcaagaaagagcagattgacgcttggaaaaagcaacatggcgatatctacctcatcacggtggaggataagagctgcgtgctgcgcaagcctacccgccaagagctgagcttcgtatcagggatcaccgacccgatgcagttcaccgagactttgctcaagcagctgtggctcggcggtgacgaggacatgcaagagcgcgatgagtacttcctcgccatctcgagcaagctagacaccgtgcttaaactcaaggaggcagaggtaaaaaagctctaaggggtgcgggtgtcctggagagcgaccttgaggagcgcaaaaccacgtgggagtcattcatcttctacgacacctacctcaggtactacctgcatctcaaccccgacaccctccccgataaccaatgggcagcatccattgcctgcctcaatgagatccgcaaactagaaagcaacagcaatgcataacgccgtagagtttcttattgtcctcagcggaaagcagcgagggctacagacgatgctcctcagggcgcgccacgacctcgacgaggtcgagcggcgagccaagcaggtaagtcgcagtgtggctcaggcgttcagcttctccagcttgcgtaactcgctcagctccatccctggctttgccctactcaccaacccttatgctctgacggcaggggcggtgacaggcattgccaaggtgggcatggaggcagagtctacggcggtgtccttccgcacgcttgtcggtgatatagatctggcaaataaaaagctggaggagctctatgactacgccacccgtagcaccttctcccggcagcaggtgacggataatgccaagctcctgatgaactacggtattgccactgagcaggtcgttccgctgcttaagcagttgggcgatatctcaggggggaatgccgagcgcttgcgctcgcttgccctcgccttcgggcaggtcagctctaagggtaggcttatggggcaagaggtcatccagctcaccgaggcgggcttcaacccgctgcaggagcttgtgaagatgacgggcaagagctaccaggagctccaggagatgagcgagaaggggatgatcaccgcgcaaaacgtagcgcaggcaatcgcccacgccacaagcgagggggggcgctttcacgggatgatggacaacctctctgagacggctggtggtcagtggaataagatggtcggcgaaatcatcaatgaggcgaccaagctctacgacgagatccgcccgatgatcatggagctatttcaaggaattcgggagcatctgcctactatcttcaactacatcggtcagttcatcagcttcgtcgccggggtgattaagttcgtcacaaagtggcgcgatgagatcctcttgatggcaggggcaatcctgattgtaaacatagccgtcaaggccaacaggatcctcgccataggctcgcttgtcgtctatcgcctcctgcgagtggtactcattggcgttaaggtagcctccctcttatatgcagccgcatgtggcattctgaccggcacgatgacaccgcttacggcagcacaatggctgcttaatacggctatggccgctaaccctatcggtgttgttatcatcctcatcggagcgctcgtggccgccgtcatctattgctgggtgaagttcgcggagttccgcgccttcctcatcacaatgtgggatgtcatgaagcagttcggcactatcatccgcgactatgtcgtcaacgctgtcaatgagctcctcgacgccattggtaacgtggggcgcgccataaagctcctcttctcgggtgacttctcgggagctgctgaagcagttggcagggcggctgacggcttcaccctcaccgacacgaggcgcaaggatgctgaggcgtgggctggctttaagggctggtcagagacgtataacgctaacctcgtcattgagcaggcaaagcaggcgacgttaagtgatgatctgagcgagttggccaatgggcttagcctccccaagctgctaggaattgacacgggtcaagggggaggaggctctgtcatatttggatcacctagatcgaagggcggcaaaggtaagggtaacgggcgaggcaagacgggcgatgccatcgccacaggtggcactcgcaatacccagatcacaatgaacataggtaagctcgtggagcgcatcaacgtctcgatgatggacaaaaccgacacgtcagagctagagcgtgttgtcctctcttccgtgaaccgcgcactggctatcgcaacaagcactgaccgatgaccacttttgaactggacgagctgatacgtcgcctccccttccctccgcccttcctcttcgatcacccgcgggtgcagggcgctgagggggcttcccccgaggtagcccctgccctcacggcagatgagctggaggaggtgcagaataacgtgctggggcttcctatggtgtttcctctctccctcgccctggaggggggagagccgtggctactcccccacgaggcacagatcacgctgacaggacaacatgtgctcgtcaagcgccaagtggccaagggcaagatccgcggtagcatcaaggaacgctggtcactcgatgactacatcatccagatcgacggggtactcatcggcgctgatgggcgctatcccaaggatgacgtacagcgcctgaggggctacttcgaggcagctaaggtgtcagcctactgccccctcttggagctctttggcatcacccgcatcgtatttgagtcatgggagttcccgcacaccccgggggaggcaaaccaggcgttcagcgcccaggccgtcagtgacgatatgtacaagctcctccttactcgtcgggatctaacaaagtagcgcgctatgtacacaatggcttatgacattcaggtgggtggctatcagctcggcatgctcgacaaagtggagatacactcctcggtagagctactcgccgatacggccaagatcacgctccccgctgccgagtacaacaaggcgctcgacgtcgaggaggcgatccaccgaggagatgaggtgacgatccgcctgggctacgaggagacggggcttgtcaccgagttccggggctatctgcagcgcatcgacacggataacggcgacctcaccctcacctgcgaggatgacctcttcctcttccgcaagcccctgaaggatgcggtactctccaaggtgactctctcgagcttgctctcgcgtatcatcagggagattgggctgagtgttaaggtctcctgcacctattcctggacgtatagcaagtttgtcatcaaatcggctacagcgttcgacgtgctcaaaaaggtgcaggaggaatgcggtgcggacatctacctcaaggatggcgtgctgcatctgcacgctccgggggaacatataggcaaggagcgcctctacgacttccgctacaacattgaggcggccgatctcacctaccgtaaggcggaagataagaagtacctcatcaccgtgcgtgcgcttcttcccgacggcaaggtgcgggagtttgaggtaggtactcctgggggagacaagatcaccattaagtgcccttcctccgacgaggtaagcatgcgcctgcgtgccgagactgagctccgccgacgcaccttcgatggttacgacggaagcatcgacacgtggctcatccccgagtgtcaggcgggtgactccgtcgagctccacgaccccgactacccccacaaagagggtaattatttcgtgcgctcagtcacaacggagttctctgaagaggggggcaagcgtaaggtgcagctgggctttagactaagctagagcaatggatcagtatagagagcttctggagcgtctcgcccacgctggtggaggtaagcccaccatcctctatcagggagttgtggcggaggtcgccgacatcacctgcacagttgacatcgatggactgagcgtacctgacgtgcgcctacgggcatccaccgaggtggatggagcgcaaatactcctgcgccccgctgtcggctcagtcgtcattgtcggctccctcacgggtgatctcgaccacctcgtggtgctctccatggatagagccgaggaggtgatcatcaatggaggctcgctcggagggatcgtcaaggtcaaggagctcacaagcaagctcaacaccctcgagagggagatcaacgacatcaagcagctgctctcaagctggactcccatgcctaatgatggtgcagcatcgctgaaggcagccgttgcctcctgggcaggtaagccgatcaccctaacgaggagagaggactacgaagacactaaagtgaagcattgatatgataggcatcacgctcaccgccgactacgaacctcacatccgccttgtgcgcgacgaggaggggcacatcatcgaggggctcgccctcggtgagacgctcccgcaaaaccaagccctgatcctcaccctccaccagggagagctgaaggaggcgcctgccgtcgggtgtggcatctccgacatgctcctcgatcatcgccctttattctggcgtgcgcgcattcgggagcaactcgagatggacgggcagacagtaacttctattaagataacaactacgggcatccacatcgacgcccgctattaaccaagactacagctatgcgtaagcgtattactctccagctatggatggcctccatcctaacgatcgcagggatcgtgctcatttggacggcctttctcatcgtcccgaggggcgagatccacaactcggtgctgctagccttcggagagatgagcaccttcgctggtgcgctcttcggcatagactacaagcatcgattagacagatacatccaccaacctaagccacccaaacaagaacaagaagaagatgaggacaattagctacatcgccgtacactgcacggcatcaccccaaagctggggagtgaaagagctccagaaggtctttgagcaacgaggcttcctccgcccaggctatcactatgtgatcaccgccgatggggaggttcacctcatgcagcccgaggggctcatcagtaacggggtgaagggcttcaataaggagactatcaacgtggcctacgtaggaggcatcgatgccaagggcaagggcattgataaccgaacagatgcccagaaggtgtcgatgcgcaagctcctctccgagctacacacccgttaccctcatgctaagatccaagggcatcgggacttctctcccgacaccaaccacaacggtgttgtcgacccgtgggagcgcatcaaggagtgcccctgcttcgacgtgatccctgaatatgcagacctatgagacgtataaccatctatagagtgctcgccgtgcttgccttggttgccttctttgcctttgtctttgccctctcctcctgtggtacggcaaagactatcgtcaaggagggagaggtgcgcacggagtatgtcgatcgcttccgagagcaccgagacagcatctatctacacgacagcgtgtacattcactccaagggcgacaccgtctatcaagagcggtggcacacccgcatccgagatcgcacgctgcgagacaccgtatatattcaaaaagtagatagcatctatgtagacaggcaggtgaagaagacttctggcatcaccgagattagctacacgcttaggctactcggttgcgcagcggtcgtcatcgctgtactactattcatactcaaaatgcgcgggaaatggaagtaaaggtgctttcagggcagacgctctgggatgtggccgtagccactaaaggctcctggcagtcaggtatcgatatggctcgctctgcgggcgtatcgatgaccgacctgccgaagtcgggcactctactccctgtgcctgcaaatacctacgatagggcgcttgagcgatacgctcaggcgcatcgcctggagcctgccaccgctacggcgcacaaggcaggtgtgcacacccgcatctttacctccgcattcagtgaggtattctcttaaaaacgataagatatgacagacaacaaagtgaacggttgcggtgcatgctcggggtggctcaagtggctacgacctccgcatcatgagttcttcaagaaagagtgcgccctgcacgatgagctctacaacatgggcggaacggagaaggatcgccaaaaggcagacttctccctcttccaagacatggtagcacattcccttgaatacttcaaggggagaaaggctggatcacagacgtggttcgtcctactggcatacgcctactacaaggcggtgcgagtcttcggacgtaagcagttcaattatcatggatagagctctgtggatgggggggggtaaatgaagcccccacccactctatattagactctcacatcgtaataatagcgcacctaggcgtgtggatgggggcttatgccttcttccacgcctaggtgcgtattttatatccgatgtgagatgatacaaaaatacaacgatttatcagcttgtgaaaactcctatcacctactacggaggtaagcagacgatgcttaagcacattctgccgatcattccacagcacacgctctacactgaagccttctgtggaggtgcagcagtattctttgccaagcctccctccgagggtgaggtcatcaacgacctcaaccagcaaatgaccaacttctacgaggtgctcaaggcggactacggcctcctcaaggctcgtgtagacgtcacagtgcattcacgtgatgtccacgcacacgcagcgcacatccttgagttccctcaattcttcgaccgtgtagataaggcttgggcggtttgggcgctctctaagatgagctttgcctccatgctggacggtaccttcgggtatgactttgggggtactatgcccaaaaagctgcgcaacgccaaggaggagttcggggagcatctagctaagaggatggataacgtcaccatagaaaatcgggatgcccttgaggtcatccgatgctatgatacgcccgataccttccacttcgtagacccgccctacgtggggagtgactgtggccactatgagggcgtcttcggcgagagccacctgttggctctccttgacctccttgcagaggtcaagggtaagttcatgctaacgatgttccccgatgaaaatatcgagcgatatgcgaaggagcacgggtggcacatccatcgtatcgagcgcacaatctccgcctctaagacctccaggcgcaagcaagaggaatggatggtgtgcaactacgtgaaggaggaagagccgtcactattcgattgaccatcgaatgctattcgcagggcattaaataaagagagggaggcgggtaactgcctccctctctcattaagaagtaatagaattgacgatgtccaccatgttggtaagacaccgcaaaggtagcgagaattcgccattcggcaaatactacagatgctcggagagcttctctgtcaggtgcttgatatgccgcccttgtgcttcgatgatgtcatccttctgtgcgatgagctcctcgagtgtctgaaccttgagggtgagctgggcttccttgctgctcatttcgccctcgcccctttccacccatgactcgcgcagggcggggaaggctgcaagtacagtgggcgcatcccacctatctcgcttcctccagttgtatactcgctgttttgagatgccgagcatccgcgaaagctcggcatcgttgcttatgccaatgagcgatttaatggcgtccaggcgctcggcaatgcttaatgtcttgtccatatcgtgtttactattatccgttgcaaaggtaaaaataatatgcggaatacaaactatccatattgcataaaaggtttatatagctgtattttgattgcctcaaaagtttttactcaaaaatttggtggagtaaaaactttgccgtacctttgtagtgtcaaaggggatgagccccggcgacactaactcatataataagtaatagaattatgacgacgaacgaaaagaagacctaccactacaacgtgctaggaggtgttacaccagcagatcacaacatccaatacgacctcgacgtgatcgtatcggacaccgatcgaggagactatcaccgaggtgttgctcgccttgaaatcgagaaccagaagtccttcaacgagtatctcgaagatatctcaggccactatgtagagggtgtgggtagctggcaggaagctcatgaataccttgttgacctcctgcaggcgatgatggtggagctcgttgatagggctggcatcgagcctcccaaagagtatacagctataatcaacgagagctacgcagatggtgcatacatcgactactacatagactatgaccctgagggtggatgcgtacgaattgggcgcgacgcgtctaaagaaatcgaagacaaggtgctaagccgtgaagccctacagcaaatgctctccatcagagctgaagacctcctgggatagccccacgaagataaaaaagctccctcgacgctcaggtgtcgggggagctttttttgtgtctctggtggtagggctacgtggtgagtgcgcctcaaaaaaatgttacgcttcgtttcttcccagagggtagccctggggtacgcttcgtttagaaggggctgaacggttcgttttgcggattatacgtgaggcctacatcgaggagtatgaccgcatcatggcggtgcagagggtgttctacccagagctccttacagacgcactaatcggtaggatacgagaccgcattatcttctatcagcgtcctctgaagtcgtgcaaacagttggtctccttctgtgagtttgagaagaaggagaaggtcatacgagtaaaacacaccaacaaggagggcgtccaagagcttgttgagaagaccataaccattggtcccaaggtagctccgaaatcgtccccaatcttccaggtctgtaaggtatgggagtccatacataacatacgcctttaccatcctgatggcacagagcgaaagctggagcaagaggagaagcaaaagctcttcgactacctccaaaggaacgataagcttagccttacgacacttcgtaaggagcttaaaattaagccgaaggataagctctggtgtgataagctactcgagaaggggatcgcagggaatactactgcagctatcctgcgcaaggccttcaagggctatgagcactatgagaggctattccgatttgacttggttcgtagggattctcacgaggctgatgaggatggtgttattcgtccaatcattgacgagtcttatcaaaacgaaccgctctacaagctctggcacatcctttattccatagaggatagggcagagatgcgcagtgccttgattgggcaactaggcattaaggctgaggatctagacaatgggctgatggatgctctctataagatagactttgtcaagcagggctacgggaacaagtctgctaagtttatctgtaagctccttcctcatctacaagagggtaagatgtatagtgaggcggcggaggctgctgggatgcgacactcggatagtatgactgcccaggagcgagatgagcgcaacctgttggaggaaattcccctcctgcagaagaatgccctacgtcagcctgtggtcgagaaggtccttaaccagatgattaatctcgtcaatgcgcttaagagagaacatggagagattgatgaagtgcgtgtagagctagctcgcgagctaaagatgagtcgtgaggagcgagagaaggctacaaagaataatagctcacgagagaaagaaaacaaggctatcgccgagcgtataacggagtatggccttacccccacgaagtcacgcatccagaagtatcgcttgtggcaagagtctgccgaaagctgtatctactgtggtaagcgtgtggatgtcgtgcaattcctcagaggtgaggagactgaggtagagcatattattccgaagtcaattctctttgatgactctctgtcgaataaggcctgtgcctgtcgctcttgtaaccaagagaaaggtaatcgctttgcgatggagtacatccaggctaagggttgggagcaggactacatcgagcgagtggatagcctcttccatgataagaagatatcctactctaagcgtcagcatctcttgatgctacctaaggatctgcccgaagacttcattgagcgtcatctacgactctctcagtatatctcccgtgaggcacagggcattctccgtaaggggatacgactggtgagtgcctccgagggcggtgtcactgctaagcttcgtcagctgtggggctatgacaacattctgcgagacctcaacctagagcgatacaaatctatgggtgagacagaggtcgttacggtagagcatcgggatggtcagcgtacggatgaacgtatcaaggactggtccaagcgaaaagatcatcgccatcacgctatcgatgccctcgtcgtcgcttgtactcggcagagctacatacagcgactcaatagggtgaatgcagaggctgatcgtcaggagatggatgcattcatcaaggagcagcaacaagagcataaactttctaagaaagagaaactatccctactggaaaattggctcaaagaacagccgcacttcacgactggagaggtgaaggagcatgccgaaggcatccttatctccttccgcccaggtaagcgtacggtgagtcgaggacgtaatatctacaagcgctcaggtaagaccgatgtgcagaggaatgtgcttatcccacgaggtgcactctccgaggagactgtctatggtgtgatcagtgtcgatggagagaataaggttgtgtgtaaatatccgcttcagaagtttctagacaccaaagaaacgaatgtggataaaattgcagatcaagctgcagagaaaattgtagataaagtgttacgagaaaagattcgagagcgtatcaagcgatatggcaagaaggaagcctttgcagaaccgctttatctcgatgaggcacagactcaagtagtgcgtagtgtccgatgctttataagtaaggatcaggccaagctcataccccttagatacaacgacgagagcgaggcggtcggctttgtggctccagggaataaccaccacctagccctatatcgggatgcttcagggaagatgagagcttctgttgtgtctttctttgctgcagttgagcgtgctcgctatggtattcctatgattgttttaaatccaagagaaacaagagagaaggcacggataattcccgatctgccagaatctattttctcaaaattacctgaggaggattgggttttggaagagacccttcaggaaggagaaatggtgctgttgggtatggagaacgacgcaattgaagaggcaataaagaagaaggactattcaaaactaagtcgctatctctatagggtgcaatccttatcttataacgactataagttctgcttccatctggaaacagagtcagagaagaaggagaagaaaaagggggaggataaaaagaggggtgagaaggccaagaatacagctgtgatgccccccaagcgttataggatcaggtgtttggctacttatcaggaggatcttaaccctcgcaaggtgaagatagacctcctgggtagaatatcccttgcctaagtcaataggctagtatcatgatgaagcataccctttacttcgggagccctgcctacctcgcccttaggaataagcagatcgaggtgcgtcagccctctgagggggaagctaagcgtcctgtacggacgatcccaatagaagatattggggtcgtcctactcgaccatcagcagatcaccatcacccatgggctactgaatgcacttctagagaataactgcgccgtagtaacgtgttctcctagtcacctacctgcaggacttctacttccccttgatgggcacacgctccagaatgagcgattccgtacgcagctggaggcctcccttcccctacggaagcaactctggcaacaagccgtgcaggctaagatcctcaatcaagccacgctcctcgggcaagtccttggagaacctgcgaagaacctacttgcctggggcaagcaggtgaagagtggcgactcggagaacctagaggctcgagctgcggccttttattggcgcaacctcttcatctctctgcctggcttcgtccgagagcgtgaggaggcagctcctaacgctcttctcaactacggttacgcaatcctgagggccatcgtcgcccgtgcactcgtcagctgcggtctactcccgacgctgggtatccaccatcataacaagtacaatgcctactgcctagcggatgatatcatggagccctaccgcccctatgtggatcagttagtcgtcgaaatgtgtgaggaagagattccaactactcttacgaaggatctgaaagttcagctactttctatcccttccttggatgtcgagatagagggacagcgtcatcctcttatggtcgctgtatccctaacagcaggctctctactacgctgctttcaaggtgaaattcgtaagatatcatatcctctacttcgatgaaagcaagtcgcctaagtgaatatcgtgttatgtgggtccttgtcttttttgatcttcctacttatactgcactagagcgtaaagtagcctcaggctttcggcaaagtcttctcaaggagggcttttcgatgtttcaatactctatctacatgcgccattgtgcgagtgcggagaatgcagctgtacatgtacgacgagtgaagaatatgctccccgaagaaggagatgtagtgattatgacaatcacagataagcagtttgggatgatggagcacttctcttcgcatattccaactaagccgccagtagctcctccccctcttgatctatttggattttaggaaattcatttctctgatacatagaaaaagccgatggaacaccatcggctttttcttttctataaatcctcgtaaggtgctagtgcatagctgaatatttatggttcgttgtactagctattacgaaggtactgaattgaaagctaatcacaacaattagattgaactgaaaatcattgcccgcgttgtactagctattacgaaggtactgaattgaaagctaatcacaacggtcgagaaggagatcaacgaacgacttccgttgtactagctattacgaaggtactgaattgaaagctaatcacaactaccatagtgaactacttgttcaacattgggttgtactagctattacgaaggtactgaattgaaagctaatcacaacgaggaggtcttcggcttcgtcaaggatgaggttgtactagctattacgaaggtattgaattgaaagctaatcacaacacgtggaatgccccgtgcttgtgaggtgcgttgtactagctattacgaaggtactgaattgaaagctaatcacaacgccaccatcttccgcaacttcgactgggcggttgtactagctattacgaaggtactgaattgaaagctaatcacaacacacatctcccctcatatatagaacgggaggttgtactagctattacgaaggtactgaattgaaagctaatcacaactactccaccggagctttatcgtctgttgcgttgtactagctattacgaaggtactgaatgcttagcctcgggaatagggctagcgggaaatgtgcattggagcagggatggtagaggtaggataagagggggtatcccagttgggaggagaatagccatgcgaggcttatgctatttatggcgggataaagtgtcccttactctatggttttcacggtaggtctttgtacctttgccttgggggtacactgggggtagagcgatttgccctctagactgcccggcaaagtgataacatattacacttcattatcaggatgaaaagaactactatctgcttcactctcgcagccttgtttatggggagcttgtgtagtacccaagcacaagtactgacccgaggcaaaagctatggaacacacccgcttactactccagtccttattgattctgtcaatctaagtaagacgagctttgagctgacgagtttcattaaacgtccttatgagattgaaggaaggcgctctacctccattgctgcttcgtcaaaggggatatttgccgtacctcagggagctaaccccggtgtagcttcactctcggtgtactcatttagtgctgtttctcctacatacacaaagggaaatctgcgtctctatggacgaggtcgctatgcgatctatgccgatggtgcactccttagctcgaatgagaaggcacctgtgtctagcgatacggttccggctgttacagcacctcttacactagaggctacgcataaggagctggttgtaaaggtgcttcgtatgcccaaggatagcgtgcaggctgacttcaaactagtttttgtgcccgaggagaagtttacaccgctagactcagttgcctcgatgaatggtacccacttcatcgactggaagtatatcacacatggcaagcgcatttactcagtatcggtatctccctctggcaagtatgcgttcgtggtatgggcagatcgtgtgccgaagaagggtgcgacctatgtggacattcgtgatgcatcaggcaaggtacttcgctcgacacaagggctatatggtgcacgttggatgccaaagcaggattacctcatcctagagcgagggaatgggaacaagcgtcagcttttaaagatccatcccgtgacgggagagcagagtgtgtgggtcgataatctgcctggctctagctatacgattagccctgatgagaagacgatttacttctacgagcaaggaaagggcccagggaaaaatccacttgctatacgccgtatttctcctgatgataggcagcccggctggcgtgatcgtacagagatttatcagtatgacattgcctcggggatatatatgcctttgacctatggtgtacgaagcaataatatctatgatatttctggggatggctcgaagctcctactcggtgtacacgggatggattggacgaagacgccctatggacacacgacgatcctgctctatacccctgctacgtctcgggtagataccttgattaaggacgagatagagatcgcagatgtttcctttatcccagggacgaaggagttactcatcactgcttcacccaatagctttaattccgcaggtagcaccttgccggaaggggagtggggaaatggatatgagcgagagcttcttcgcttcaacatggagaccaagcaagtagtacctctaaccaaagacttcgctcctagtattgcagatgtgaagggatatgttgccaagcagaaggcgttctacttctcagcggataatgggagtcgtaagtctctttaccgcctagatattaccacgaataagattactccactcaatgctagtgaggaggttgtgcgaagctttagcctctcgagtacagggaatgcactctggtatgtagggcagagcctcaacaatgccgatcgtctctatcgactagaggctccaggtaagagtcgcctcatctgggatctctctagcgagaaactccgtgatgtgcgttttactccagctaagagctttgtctaccgtactcccgatgaagttagtatcgatggctggtactacctccccccgaactttgatccaaagaagaagtaccccatgattgtctattactatggcggtacgattcctctgactcgtgagctggagacaacctatgatttagcgatgtttgcctctcagggctatgtggcactctctctgaacccaagaggctgtactggctatgggcaggcattcgccgctgaccatctgaatgcctggggtacaaagactgcagatgatatcattggggctgtgaaagctttcactgaggagcatggcttcgttgatgaaaagaaaattgggtgctgtggcgcaagctacgggggcttcatgacgcagtatctgcagacgaagaccgacatttttgctgcagccatcagtcatgctggcattagttccatctcgagctactgggcaggaggctactggggtattgcatacagctcggtagcatctgctgggagctatccgtggaataacccagagctctatacgaagcatagcccgcttttcaatgcagataagatccacacacctctcctgctcttgcatggtacctccgatgtgaatgtaccgcctagtgagagtacggcactctataactcgctgaagatcctcggtcgtaccgtagagctggtcgagtttactggtgaagaccaccatatcctggagcctgagcggaaagacatttggatgaagaccatgtttgcgtggttcgctaagtaccttcaggataagccccagtggtgggatgctttgtatcccaagacggtgtacgagcagtaaatagtcctcgttcccctaaataaggggtgataagatgtctagtccatccgccacagttgatgtagcggatggactagactctttttcgtctcttacggatatgtactaggtgcactatctctctgtttgatagtaggctacaaagaactttacgtatatttgtcgtacactgttcccttgacctaccgaggggataagcaaaacaacagacattatggaaccgatcatcccacacgtcaccaacgagaccgaccctctgaaggtcgtcgtacttggtctgcctcacagcctcggaggagtgccgaagctcaccgagacctacgacgccaagagctacgaggcagttaataaaggtttttatccgagagagagcgacgtcatacatgagatgaatgaggtgcttgctattctccagcgctatggggtagaggtgcttcgccctgcacccctagagaactataatcagatttttgcccgtgatgtgggcttcacgattgataataccttcttcatctctaacctcattcctgaccgagccttagagacggatgcctttgctacttcgatcttgcctcgcatagcacaagaccatatagagcgtttgcccgaagaggtgcatactgagggtggggatatcttgctctatgatgatgtgctctttgttgggacctatttggggccggattatcctgacttcaagactgcccgcaccaatcgctatgctattgactacctgcgagagcggttcccccgtaagcatattgtcccactagagctgaggaagcatgaccaagatccacgtaagtcggtcttgcatcttgactgcgccttccagcctatatcaaaggggagggctcttatttataaggagggcttcctacataagaaagatgtaggtctcttagaggaagtctttgggcgtgataacctctttgctgttaccccagaggaggcctattatatgaatacgaatatcttctccctaggcccagaggcgatcattagtgaccaacacttcatccgtctgaaccagttcctgcgctcagcctggggaatgaccgtcgaggaagctccctatcaagaaatctcgaagatggggggactcctacgctgctccactatgccacttgtgcgtggggcaaagtaagagactgctcagctatttgtgtgtagcccctgcatccttccctagcgagcctagggggaggtgtgggggcttctccgtctgtccttctacgctctgctgtatctttgtagccatataaagcggaaagagatgctagtaaatgagatattctacagcctacagggagagggactgaatatggggcgtgcctcaatattcattcgcctgagtaaatgcaacctgagctgtagcttctgcgatacagagtttgagagtggcgtagagatgacgctggaggaggtgagggatcggatagcccagtggcccggtaagcgcattatctggacggggggagagcctaccctgcagctgacggaggagatcgtggcttacttcaaggctcttggctatcatcagtccattgagaccaatggcacacgtcgtccccctcgtgggctagactacatcacgtgtagcccgaagaaggaagcgatgtgcctgctctcccgtaatttccctgatggcgtaaatgagttccgctttcctatagggaaggatattgacttgcctccaaatatcagtgaccttccgcctgcggaggcctatctgcttagtcccatcttcgtaggggagactcagggagatgtagatagctctgccgtagagctctgtgtggattatatcctcaagcatcccgaatggaggctcagtatccagatgcacaaactgattcatatcccctagggccttatgcgcttccccctgtccctttaccttgctatccttaccctgtccttcgttctccctgcctgtacgtctcgtcttttgagggaggcagagactgcggaggctcgtggggaatatcaccaagctatggggctgtataaacagctctaccagcgtacacctagggagcaaagggcagagaaggcacgcctagcgtttcgctcgggggagaatgctcggtgtctcagggcttttgcctctgctcgcacgagctatcacttagctctaaagtatcagtattccgatagcctgctcctcattcgtcttgctgaggtagccttggccacgggtgagtatcaggaggctttgaccttcgctcggcgttatcttagctatgattctgcgagccgagaggctcgtttgctagaggagagtgctgactttgccctccgtatggctcatcccagttccccgtctgcattacgctataaggtcacacgatcgggccacctgtcctcctcccggagtgactatggtgtcgcctactcgcctgaggggaaaacgatttatttcactagtcataggcgcccctcggcaggggctagtacccagagtccgatcacgggtgaaggtctaggacgtatctacgccctgcatcagggagcgaatgcctcttggtcgggtaaggtagatacactcgcagggctagcttcacctcagagtgacataggcacccctacctttacccccgatgggcgaacaatgtattatacacgctcagagcaggggaaagagggggtacacactgctcagatttatgtggcatcacaggggggagatgggacatggcgtgaggggaggccgttctctatttttgaggatagtacgatactagttgcccatccctcgttaagcccctcagggaagacccttttttttgtctctgatgtagctgggggtaggggaggtaaagatctctatcgtatgagcctagagcatggaggaataggtgctatctataacctcggtgagcaagtaaatagtcctcgggatgagctcttcccctatgccgtctccgatagcgtagtttactttgcctcagagggctggatgggctatgggggactagatgtctaccgtgctgtgctcctgcctcatggaagctatgaactccaccatctaccttatcccatcaacacccatgcggacgactatggctttgccccagctcccattgtggacgagctgtccggggggaagagcctccgagaggtcggtttcctagcctcctctcgtgatgacctaagaggggtaccgcatctctatcgctttgagttggagaaggtcgagaccattattgagggagtagtctctgaccgagagggctatcctctctcgggggtaaccctaagcctcgtaggcaatcgccgtgaggggcagatgcaggcagtgacaacagaccaacaagggagctaccgcctccctgcctcagctgatacggactatgtgatgctggcctcggcgcagggttacctcaaccagtacgtgcgtatacataccgatccctcagacagctccgaggtctatacggtggacttttatctagctcaggagggaaggcttgagcctcttcgcgaggtgtattatgcctttgactcagcagaaatcctgcctgagagtaccccgagtcttgacagtcttctccagctcatgagggacaaccctcaggtgcagcttacgctcttggctcacgcagaccgccatggtacagatgcgtataatgtagctctatcacagaggcgtgcacatgccctcttgcagtggcttgtctcccgaggtgtcgcagagagtcgtcttcgctctgagggctatggtaaggctcgtcccttcgtcgtgacccgtcgcgtggcagaggaatatcccttcctcacagaggggcaggtattggacgaagttttcattgccacactacccgaagaccagcaaaggcaatgtgatgccttgaatagacgcaccgagtttcgtgctgtctcctcgtggtaatacataggctcaaggaagagcacgctaaatagtccctgccagatgcgtgtaggtatcctcatcaaaaggttgtccccgatagctccccgtaggtatcggggataactatacggaggttacagggatacctctcttgggtttacggggatacctctagagggttttcctcgatacctattttaccctctgcggtgtactccagctggttaggtagtataaactatttagtatatttgtggatagcctcaggcaaggaagcccgaggctgtctacccactaattgtcgaagctacagcacaactttcagtacatcatcctcatggagaataatttaccccctaagcagcctctaggcttttggaagacggtccttgcctctttccttggtttccttggtgcgcatatctttttcttcttaatcagtatcttcttcttcattagcctcgttatatcggcggtcttctcctctaatcgtgcaacgactatccgggacaataccatcctgcgtatcgatgtgacgagccttcaggagatcgtgacaacggatgactggcagagtctcttctcctttggtaatcagtctgatcgtcctgtttcgctgacccaagcactgcagggtatacgtaaggcgaaggtgaaccccaatatcaaagggatctacctcaatgtcgaagggctctccgctgggttggcttcgacggaggagctacgggatgcactgagggacttcaagaagagtggtaagttcatcattgcctatgccgacagctattcacaaaaggcgtattacctagcctccgtagccgatcgcgtggtacttaaccccgagggtacgatacccctcgtgggacttgccagtggaagtctcatgatgcatgaggcgctggagaagctcgggattaaggcagaggtctttaaggtcggtacctacaagggggctgtggagccgtacatccttgaccgacttagtgagccgaatagggagcagatacaggcttaccttgatgggacttggcagtatatcctcgaggggatagcaggcgcacgtaaggtgtctgtggatagtctccgccagttcgcctctgaggggcgtgctttcggagaggccaaggtcttcctcgctagtggcctcgtagataccttggcctatcgcctggatatggaggaagtgattgctcagaagatggggctaagttctgctcgggatattcgacaagtgacgctagcagacctcgtagatgtccccgatgatacagctgagccacaaggggagaataagattgccgta

SEQ ID NO: 3312 - DNA, 22841 bp, synthetic construct
  misc_feature 1..22841: note = Synthetic
  source 1..22841: mol_type = other DNA
gaccttctcgatgtcgccttcgcggcggccgacgatcttgtgggggaccttcacgcccgtgacagcctcgaaggtgcggatgagctccagcacgctgacgccacggccggtaccgatgttgaagctctccagaggctcgctgcccttggagtcgtccagcatacgctcgatagcgatgacgtgggccttagccaggtcgacgacattgatgtagtcgcggatgcaagagccgtcgggggtgttgtagtcatcaccgaagacgctgagctgctgacggataccagcggcggtctgcgtcaggtaggggatgaggttctgaggcacaccattggggagctcaccgatgagtgcagaggggtgagcaccgatggggttgaagtagcgcaggcgtatgaccttgtagggtacaccagcatagactacatcgttgaggatctcttcattgatctgcttcgtgttgccgtagggcgagagggctacttggataggagcttcctcggtgacgggcaggatctcgggctggccgtagacggtgcatgacgaggagaagacgatccccttggtgccgtggcgctgcatagcctcgaggaggacgatcagtgagagcaagttattcttgtagtagagcagaggcttctgtacggattcgccgacagccttgctcgcagcgaagtggatcacgccctggatcgaggggtgagccgtgaagatgcgctcgatagctgcttcgtcattgcagtcagcttcgtagaagatggggcgaatgccggtgatcgcttcgatgccatcaaggacctcgatattggagttcgacaggttgtcaatgctgacgacctgatagccagcctggatcagttcgacggtggtgtgagagccgatatagccggtaccgccagtgacgagaatggttcctttcattgtcttactttgtggagtctattataatgtagtgttgatctcttcgatgtagccgaggagctcgtcacgccccatacgctcctctgaggaggtgacgaagatcggggggagttcctcccactcttcgtgaagcttggccttgtaggcctcgacgttggctgcgagacggcccttgctgagcttgtcggcctttgtgaagaccagagcgaaggggacgccttcctcgcccagccattggatgaactccaggtcgatcttctgaggatcgtgtcggcagtcaaggagtacgaagagcagtaccagctccttgcgctccagtacgtagtcctcgatcatgcgtctgaggctatcacggctgtccttgccgaggcgggcatagccgtagccggggaggtcgacgaggtaccatacatcgttgatgatgaagtggttgatgagctgcgtcttcccaggcttctgcgaggtcatagccagccccttgcgtgcggtgagcatattgatgagcgaagacttcccgacattggagcgcccgatgaaggcgtattcggggagtcccgtcgtcgggcacttctccacacgactattgctgatgacaaactctgcagacttgatgatcataggctttattacgcttatctagtggctacaaagatacggctaaagaagcaaatagctacatctcggacagctaccttgtgctgtaggctctaagtcgctcccgtagccactacgtgaggctttccataccccgtactcccatcttcatcgtagagggtggtgcgaacctatattggtcggcgggctgacctatataggtcgctgaatcgaccagtataggttcactctcggaccaatataggtcagcccgccaaccaatataggttcgtcaaggctcctcggtaggagcgatgagcagaccaataagtaaggggcacgaaccgcagtcggttcgtgccccttacttgtgtgactctttttgggagagcctgtgatagggaggcttgtgtatgccttaggccttcttcacgacctccagacgatcgccagcctgcatctggggcaggcgcaggcgaccttggtggaggagtgacttcgcgtctaagagacggccgttgaggcggagcgtgtagccacgaccttcgccaggcagaaggagcgtgtggcgataggcgtggtgtgcttcgaggactaagcggtcgagctcgccagctgaccagctgagtgagcaggtggcattaccgatgacgcgcaggccttggatgctaccggccttccatgccttgggcagtgccggcagcgggatgatgcagcccgtctcactgctgaggagcatctccatgatgcccgatgagccaccgaagttcccgtcgatctggaaaggcggatgtgagctgaagaggttgggctctgtaccactgccgtagggtttattcgtcttggggtcaatggcatctacggggcggaggagcatgttcagcacctcataagcaccctcagcatcgcccagtcgtgcgtggaagtttaccttccagcccatggaccaactggtgctgcttgagccacgtgcgatgagcgtcttcttcgcgccttcagccagctcgggcgtgccgtgtggcgtgatctcgctcccagggaagagcccgtagagatgcgatacatggcggtggtgtggctcgacctccttgtagtcctccatccactccatgatacgcccgtcagggccgagggtagtgggcttgagctggcgcagtgccgtggagagactgtcgacgaaggtgcgatcacgaccgagggacatcgctgcctcgcgcgtcgtggagaagagctcgcgcaggatctgattgtccatcgtcgagcctgctgctacggcgacagccttgccttggggcgtgtagtagctgttctcaggtgaggtcgtggggacgttgacgaggtagccgctcttggggtccttgaccagcgtcgtgaggaagaagcgtgcagctccctgcatcacggggtagatgcgctgcaggtaagcacggtcttggctgtagcgatagtgattgtagaggtgctcacagagccaagcggcggaggtattcgtagcgccccagctgggatgctcgccaggggcagtgaactgccatatgttgccgaggacgtgcgtgacccagcccttagcacggtagaaggtgcgtgctgtacgctcacccgagggtacgatgctctcaacccagtccgtgagcgccccgacggtctcggggagtgcgcccttctcggcaggccagtagttcatctgtaggttgatgttcaggtggtagtccccgttccaaggagcttggatggtttcggtccatatcccctgcaggttggggggcagagcgccagggcgtgtgctggagatcaggaggtagcggcccagctgcatatagagggcggccagtgcagggtcacgctcagggtgctcgtagtaagcgatgagacggcgctggataggcagcgatgagcatgctgggtcggagccgaggaagcgagcctgtacgcggtccatctgttcggtgaagcgctgtacgtgctcagcgaagaggttggcttcgcccacggctttcgcttggagcgtctgttcgatgctgcgtgccatgacgggcaggcgcttgtcgtagtagttggtgttgtgcgcgatatagagctcgatcgtgggggcattgaccacgagtagctcatcgccacgggtgatgagcgtaccgccctgaggcaggacggggcgcacgacgatggcgtagctcaagccacgaccgcccttaccgtcggggagctgacccgagagcgtcaggaagcctgcttcggctgcggggtgcccgttctcggggcgtgagagggagaggcgcagcgtgtcacgacgtgcctcttcgctgtggttcgtcaggtgtacgacctgcatctcacggccgaggacgctgtatagacgcttcgtgcgataggcttgcccgtcgacgacgaggctctctctgctgacgccttcgctgaggctcagccctcggtagtagccgctgagctcgggagccttgtcccaattgaggtgaaggaagccgccgacttggtagctaccgtagggggtgttcgctccttgtccgcgtccgctccctacgccaccgcagacgaaggtgcgatagatgaggtcttcggcttccttagcacgcccagcaaggaggagcttacggatagcggggagttgcttgtaggcctcgacgttccaagccgtggagtcgaccgagccgctccacatagagctttcgttgagggtgatcctctgatgctgtacgccaccatcggagagcatccccagacggccattgccgagggggagtgcctccatcatgctcgtggcggggcgatcgaagaaataggtgaggctctcgcggtaagcctggtctacggaggtcgtcgtcttagcccgcggtgccaccgtcgtggggctggcgaaggcgttgcctgcgctgagggctgctgcgacgagggtgcagcgaagtagggtagtatatgccataggacttgtgcaagcgatatggaagcatcggcgctcccgtttgctcgcaaagataagccattcttccgcccaagcatcagtctcgcctctcagctccctcctctcggccgttcgctggggctataaaaaaggctcagcccgcattccccgagcgtggggaatgcgggctgtaagccttatgaaacttgagggaagggtcgcttcttagatgacgccctgctcgagcattgcctgagctaccttgaggaagccagcaacgttagcacccttgacgtagttgatgtagtctccttcacggccatgagccacgcactgctcgtggatgtcgctcatgatctggtggagcttagcatcgacttcttcgttggtccaatagaggtgcatagcgttctgagtcatttcgagaccagaggtagctacaccaccagcgttgacagccttaccaggagcgaagagcatcttcttttctacgaagtactcagcagcttcggccgtacaacccatgttcgacgtttcagctacgatggttacgccgttagcgtggagcatcttagcatcctcttcgttcatttcgttctgcgtagcgcaaggcatagcgatgtctaccttctgctcccaaggcttcttgccagcgaagaactgagcgttggggaacttcttagcgtagtcagagacgacgtcgttaccgctggagcggaggtcgagcagcgcctggaacttctcgggggtgttgataccgtctgggtcgtagacgtagccgtcaggaccagagatggtgacgaccttagcaccgagctccgtagccttctgagctacaccccaagctacgttaccgaagccggagatagctaccgtcttgcccttgaggtcgatgttgtgctgcttgcagatgtgctgtacgaagtagacagcaccgaagcccgtagattcgggacgcaggcgagagccaccgaaggtgaagcccttaccagtcatcgtacccgtgtgctcgttagcaaggcgcttgtactgaccgtacatataggcgacttcgcgaccacctacgccgatgtcccctgcgggtacgtcggtgtcagggccgatgtggcgccacagctcgcgcatgaagctctggcagaaagtcatgatttcgcggtcgctcttacccttaggagagaagtctgcaccgcccttaccaccgcccataggcaacgtggtgagtgcattcttgaaggtctgttcgaagccgaggaacttcaggatagagaggttgacagagggatggaagcggataccacccttgtatgggccgatagcgttgttgaactgtacgcggtagccaatgtttacatggactttacctgcatcgtcgatccaaggtacacggaaggtgatgatacggtcgggctctacgaggcgttccatgatagctgccttttcaaactcggggtgctggttgtagacttcttctacagagagaagaacttccttcacagcctggaggaattccttttccccagggtgctttgcctcgagcgaggccaaaatctcagcggatttcataactgatcgatctaatagttttgcgtgtacggctcgtgtgggagccttgatttcacagcaaatatatgcaatgatttttaccttgacaaatgtagtagcttcttttaatttcttaggaaagaagcgcatctacacggcttttctgctatgtgtaaatagtggtgtgaaaggcaaaatagctggtgaaaatcgtgtgttatccctcggtatcgtggcaaatcttttgcttttcacttcaccctccttccccgcattcatgagcacagtataccgccctatatataataatgtataggggagaggtgaagacgatggggcggaatgcgcctaaccgcggtggaagaagcgggtggggtagagggagatgaggaaggagagcgccgtcaccgagacgaagatgaggagcatatccagcgggcgtacatccacggggagcgccatcgcttcgataccgctaccagagcggatgatgccgaagcgtgcctgcaggaggcagagtatccagccgaggagcatgccgacgctggtccccgtgagggcgatcagtaggcccacacggcggaagacctgctgcgtgaagctgggtggtgcaccgagggcggtgaagatacggctgtcgtcctgcttctcgatgaggagcatagccagcgagctggcgacgttgaaggccgccaggaggaggatgaagagtaggatgagataggtcatgaccttctccatacggatgaggtaggagaggtctgggtgctgctcttcgcggtcgagggcggtgaggcggtcgccgtagagtgccttcacctgctgcttgaattcggaggtcttgacgcctgagcggaggtggatgccgagagccgatacttcgctctcctcatagtcgagtacgtcctgcaggtcagctaaggggaggtagatcgcagcatccgtctcttggctcgtgggctgatactgcccgatgacccgtgcctcgaggctctggaaggacgaggcaggggctaagggattggtgaagccgaggcgcttggggaagaggacttcggcagcgggaccattgtgctcggtgcggctactatcctgcgggagctgaatcgctgcgccgagctggatgggggtgatgggtgcaccttcggcgtctacgagggtcgtcgccgagtggagctcaggcacatcagctgcacgccccatcgggtagacggaggcaaaggccgagtccaccccgacggcatccacgacccactgctgctcccctacacgtaggagtcccttgctctccaggcgtagggcaatcgcttcggcaccagccttcgtgagcttggtgcggtagtcggggaacttcttcaggtcgaagactccgccctcggtgtctcttaggacgatgtcggcatcgacctgctttgtagctccgaggatcatcgccacatagccattgtacacgccgacgacagccaccagcgccatagcgacgacagcgatggcgacggcagagagtgccgtcacatagttcactgcatgcaggcgggtgcggctgaagaggtagcggagggctatgcggaagctgagcacggacgaggggcggggagtgtggaggtcgttacttgtcgttcagcccgaggaggctatcgatgcgctcgaggtagtcgagtgagtcatcgatgaagaaggtcagctcggggagcttacgcagctgcttacctacgcgcaggccgaggtcatagcggatggtctttgcgctggagcgaattgactcaagcagctcttcggccttctccgaggggaagatgctcaggcgtacacgagcgatgctgaggtcggggctcacggtcaccgatgtcacggtgatcagtgtgccggggatgctctgggtctgtatgcggaagaggtcgctgacctccttttggatgagtcgattgattcggctcattcttgtattatccattgtctctgtctttttgaattacgcttacaaagttagtcaaagctcgcctcatctcccgcctctacgcgggcggtcggcgaaggtccgatagctgactacctattatatagtacttcattcggtgagaagagtgctcggcaaagccacttcctcgaaaagagaagatcccacttgatgcaccctcggatggagcggtatcaagtgggatcttgcctgagggactatgtgccagagagcgtgcccctcctaagttgggatcgtttggctagttaccgttagcctcgactttgtaaagttcatttgatgatgagtgtgaaggatccgaggtaagtgttacttccttctcgtaggtcttgaggtacttattccctctatacagcttcacgctcgtctttaccttgatggatgcaggaccattactattatcgggtctgtgtacgataatgccgacatatagccccgaacccttgtgggtgaaggtcgtgcgataggactttgcaatggggtccctccactcggagttgtagatcgtctgagcaacgagcttgccgtcacggtagatgtcagatcccccttgggtgttggctgtgaagtggacactgatcggagcggatgcactgatcgatacctcttgcttgaggtctgcgctgccgaagccgccgaattctccgcctggcaggtcactcttgccaccgcaagagctgagcactaaggcaaaggagaagaggagaagagataggatgccgagtcggcgaattgattgttttgtagccattttacttgtagttgatgatgaggcggagggagggtagaccgagctatccagctccgcagtaatggttccgttaaatgaattgtacttagggaaggagtgtaagacgggcttcttctcctaccttaactacaacgagaaaatgtatggatatgttgttttctcgcggaaatatgttcgtgtataatagtatgtagtaaataaaggtaaactgtcttcgcatcgtatataccccgaattcgcggagaagcagcctcaggatagctcacttttggtgtagggaaagtgggtgtatggtgagccctcctgtgagatgtaagtcgctcatggatgcggtgttgcttgctcgacagcggggaagttgctacatttgtttcagtactacggctgatcgtagtggcctgacctctcggtctgatcacaaaaaagaagggtgagaacctcacttaagaggccccaccctggatgttctcacaacggaataaatccttattgtgattagctttcagatttcgttactgcaaatgtagccatttttcttaatatcaacacaaccaatgcttatgagcaaacatgtacttggtcttgacctcggagtaggatcaatagggtggtgccttatcgccctcgatgcgcagggagatcctgccgaaatcttaggtatggggagccgtgtcgtccccttaaataatgctaccaaagcaattgaagcctttaacgcaggggcagccttcacggcgagccaagagcggacggcgcgccgtacgatgcgccgaggctttgcccgctatcagctgcgtcgctaccgccttcgtcgagagctggagaaggtcgggatgctccccgatgctgcactcattcagctccctctgctggagctgtgggagctccgcgagcgggcgtctaccgctggtgggcgcctgacgctgcccgagctggggcgtgtgctctgccacatcaatcagaagcgtggctaccggcacgtcaagagcgatgccgctgccatcgtcggtgatgagggcgagaagaagaaggactcgaatagtgcctacctcgctggcatccgtgcaaatgacgagaagctacaggacgagcacaagacggtgggcagtacttcgccgagcagctccgtcagaatcagagtgagagccccacgggcggtatcagctaccgcatcaaggatcagatcttctcccgtcagcgctacatcgatgagtacgatcagatcatggcagctcagcgcgtgcactatcccgatatccttacagacgcattcatccggatgctacgcgatgaagtcatcttcatgcagcgcccgctgaagtcctgcaagcacctggtctcgctgtgcgagtttgagaagcaagagaaggtgatgcgcgtccagcaggacgacggcaagggcggtcggcagctcgtcgggcgtaaggtcaagttcggcccgaaggtagccccgaagtcctcacccctcttccagctctgccgtatctatgaggctgtgaataatatccgtctgacccgtcccgacggctcgccacgtgacatcacactcgaggagcgtgctaagatcgtcgcacatcttcagtcaagcgcttcgctatccttcgctgcgctgaagaagcttctcaaggagaaggcactcatagcagaccagcttacctcgaagagtgggctgaaggggaatagcacgcgggtcgctctcgctgctgctctacagacctattcgcagtatcaccacctcctcgatatggagctggagacgcgtatgatgaccgtccagctcaccgacgaagagacgggcgaggtcaccgtgcgagaggtcgctgtcgtcactgatagctacgtccatcagcccctctatcgcctgtggcacatcctctactccatcgaggagcgtgatgcgatgcgccgtgctctcatcacgcagctcggcatgaaggaggaggacctggacggcgggctcttggatcagctctatcgtctggacttcgtcaagcctggctacgggaataagtccgcgaagttcatctgcaagctcctcccccagctacagcaggggctgggctatagcgaggcgtgcacagccgtcggctaccgccactcgaatagccccaccagcgaagagatcaccgagcgcatacttctggagaagataccgctgctgcagcgcaatgagctgcgtcagcccctcgttgagaagatcctcaaccagatgatcaacctcgtcaatgcgctcaaggccgagtacggcgtcgatgaagtccgtgtcgagctggcacgcgagctgaagatgtcgcgtgaggagcgtgagcgtatggctcgaaataacaaggatcgggaggagcgtaataaagaagtcgctgcgaagatccgtgagtgtgggctttatccgacgaagtctcgcatccgcaagtacatgctgtgggaggaggctggacgccagtgtctgtattgtggtcggtcaattgaagaggagcagtgtctcaatggggacgatatggaggtcgagcatatcatcccgaagtccgtcctctatgatgactcctatggtaataagacctgcgcctgccacgaatgtaatcagacgaagggcaatcgcaccgctctcgagtacatccgagcagagggtagggaagccgagtatatgaagcgcatcaatgacctgctaaaggagaagaagatttcctatagcaagcaccagcgcctacgctggctgaaggaggatatcccctccgacttcctcgagcgtcagctgcgtctgacgcagtacatctcgcgccaagctatggccatccttcagcaggggatccgccgtgtgtctgcgagcgagggtggtgtgacagctcggcttcgtagcctctgggggtatggtaagatcctccatacgctcaacctcgatcgctacgactcgatgggcgagaccgagcgcgtatctcgggaaggtgaggcgaccgaggagcttcatattacaaattggtcgaagcgtatggaccaccggcaccacgctatcgatgctctcgtcgtggcatgtactcgtcagagttacatccagcgactcaaccgcttaagctctgagtttgggcgggggaataagaagatggaagatctggaggcccaggagcagcaggcgaaggagaccggtaggttctctaacctggagcgctggctgacgcagcgccctcacttctcggtgcggacagtcagcgataaggtcgccgagatcctcatctcctaccgccctgggaagcgtgtcgtcacccgaggacgcaatatctatcgtaagaagacggctgatggtcgagaagtcacctgcgtacagcggggcgtgctggtaccacgaggagagctgatggaggcatcactctacgggaagattctctcccaagggagggagcgtattgtcaagcgctatcctttgcatgaccttaagggggaggtcgtagatccgcgccttcgtgagcttatcgcagagtacaatcaagagattacatccaaggtaaaggcgaagggagctcccctctatctcgatgcagctgagaagcaggaggtgcgctctgtgcggtgctatgttactcagccttccgttgcaaaggctattcctattcgcttcgatgagcgtggtagagctattacattcgtaaagtctgggaataaccatcaccttgctctctatcggacccctcagggcaagcttgaagagtctattgtgaccttctgggatgctgtagaccgtgcacgctatggtatccctttagtcatcacgcatccgcgtgaggtcatggagcaagtcctacagcgcggggatatcccagagtcggtactgcgcttgctcccaccctccgattgggtatttgttgactccctccagccggatgagatggtcatcattggtctgtcggatgaggagcttcagcaagccctcgaagtgcagggttatcgcaagctcagtgagcatctctaccgtgtgcagaaggtgtcttcgagggactactggttccgctaccatttggagacgagtgtggcagatgataagaatacttcggggcgtataccgaagttccatcgtgtgcggagtttgtctgactacgaaaagaggaatatccgcaaggtgcgtgtcgacctcctcggacggatctctctgctctgatgctcccctactaccatgatgaagcaaacgatctatatcggcaatcctgcctacctctccctgcgtctcaaacagctggaggtgcggcagccgtcggatgatcgtgagacgatggtacggacgatcccgatagaggatatcggggtcgtcctcctcgaccacccacagatcacgatcactcatgccctcttaggggctttgctcgagaataattgcgctgtcgtgacctgctcagcgacgcacatgccctcggggctactcctcccgctggacgggcacacgctctgatctgcctacgggtacgcctaaggagcgcaagacggctaacagcttccgccaagaactcctgaaggatggcttcacaatgtttcagtactccatctatatgcgccattgtgcgagtatggagcaggcacagacgcatatgcggcgggtcaaggcgatgctccccgatgagggcgaggtggtgatcatgacgcttaccgacaagcagtttggtatgatggagcacttctcttcgcgcaagcctaccgatgctattcagctcccaggactcttcgatatgctgtgagatctgggatcggaaaagtcgctaagtaaaggaaaagcccgtggatatccacgggcttttctctttctaaatcctcctgctaagtacttgtcccatagactcctttgcggggtctgctgtattagcaagtatgaaggtacgaaatctgaaagctaatcacaacttgtcggtggctataggcgtaatatccctcgctgtattagcaagtatgaaggtacgaaatctgaaagctaatcacaacaagatagtgatgttgtgccactcggtgcgggctgtattagcaagtatgaaggtacgaaatctgaaagctaatcacaacgcttctttgcggtgttcgactctgcgacgcgctgtattagcaagtgtgaaggtacgaaatctgaaagctaatcacaacggtgacatcatcaaagccctacggcagtacgctgtattagcaagtgtgaaggtatggaatctgaaagctaatcacaactcccctgcaacgacgctgcgtgaggtgtaggctgtattagcaagtatgaaggtacgaaatctgaaagctaatcacaacgatacgaagcggtttctttgggggtatggggctgtattagcaagtatgaaggtacgaaatctgaaagctaatcacaacagagccttatttactactgcacatttggtggttatagcgataggttgttgctccgcatagggataaaagttgcggacgagtggtcgataagtttgggctacgtacgtggctctaatatctacgtacgtggatatttggatttacgtgcctggtctttaagactatgtacatagatagaagaataccactacgggaagacgcttttttcttcacgagaacgatgcttttccctccgctggataagcggaatacttgcgataaggcgcagggcttgcgtatcacttcggaggggtataatcgtgtaaaccacttctgtcttcccggctgggtattgcttgccaatcagatggagatgtgaagctatataggtcgctgggttgacctatatagcttcgcttcgtgacctatattggtcacgccgccgacctatataggttgactcgccgaccagtataggttggtagcacctccttcagtagctgtctgagagagggcaaggtcttcgccaagaagtggcggtggctaatgctggtagacgtgcgtagaggcggcgatgggagtgcgggtggctatggatattgttgcgggcaagtgggaaggcatttgcgtatatgaagaagttgtattacctttgcaaccgcaacaaagaaggtggcaatactcttccttagctcagtcggttagagcatctgactgttaatcagagggtccttggttcaagtccaagaggaagagcttctcccgagtatgggcgtggtgaataagccccttctgacgctgcattaagtactcttccttagctcagtcggttagagcatctgactgttaatcagagggtccttggttcaagtccaagaggaagagcttagagaaggaattagattcagggagataccctcaggttcaattaggagaacttgggggtatttccttttatgtccccccatggagtgggacgaaggctatatagcgacagcgcccctgctcaccgatggtgggcaggggcgctgcgcgtataggggagtgggacttagagcccgtgttcgccgaggtagcgctcagcttcgatagctgccttacagcctgaggccgctgcggtgaccgcctgacgatagagggggtctgcgacgtcgccagcagcgaagacgccagggacgcaggtgcgtggcgtaggcccttcggtcttgatgtagcccacctcatcgacctcgacgtagtcagcgaagagctcggaattggggtggtgaccgatagcgaggaagaagccatcgatgggcaggtctacacgctcttcatcgggctggccgaggcgcttgacgagatgtgcgccttcaacgccatcttcaccgtagaggcccacggtattgtgctcgtagaggacggtgatcttctcgttggctgcgacgcgctgacgcataatgtcagaggcgcggaggtagtccttgcgcacgatcatatagacgtgcgaggcgaggctcgccaggtagagtgcctcttcgcaggccgtgtcaccgccaccgacgacagcgaccttcttattgcggtagaagaagccgtcacaggtagcacaggccgagacgcccataccagcgtacttctcttcgtcgggcaggccgaggtacttagcggaagcacccgtagcgatgatgaccgtatcggcttcgacctcgacaccttcctcgaaggtgatgacgtagggagccttagagaggtcagccttcgtcgccagaccagagcggatctccgtaccgaagcgcagagcctgattgcggaggtcctgggtgagcgctgggccggtgaccccctcgggataaccagggaagttctctacatccgtggtctgcgtgagctgtcctccaggctggatgccttcgtagaggagtggcgagaggttggcacgtgaggcatagatggctgcagtgtagccagcgggaccggagccgatgatgaggcagcggcgatgttctctactcatacttgcgtagtctatatgtgatggtgatagaaataggggcgagtcttagcgcatgtcgcggagcttcttctggagctcttggcgagcgaagaagatgcggctcttgaccgtaccgagggggatgccgagggtatcggcgatctcgttgtacttatacccagcgacaaacatggagaaaggctccttgagtgaaggctgcagctcggcgatagcacccgtgatctccttgatatccatggagccctcgggagtgttgtgcccgccttcgctaagcagaggtacgttgtaagcgtcgacgttggggtcgatgaagctctgcgtgcgcacgagcttgtggtagttgttgatgaagatattacgcatgatcttcagcacccaccccttgaagttgacgttgtcgacgaacttatcgtagttgttcaggacgcgcagcgtagtgtcttgcgtcaggtcttctgcatcggcttcgtccttcgtcagcgtacgcgcgaagttcttcatatagtcctgcatgccgatcaggtccttctgtatctgtaatacgtccatgtctgtaatgctctattttgtatagtgaggcggtgcgccgaggggcaatgtggcgagccgtttaatatcttttttacaaagatactattaattcttccacagaaagcacggaacttgatataggtatattgatatactcaatatagagcgtatcaccagcggatgggtgccttgccccactgggtgaggtaggcattcgtctggctgaagtgacggcatccgaagaagccacgatgggccgagagcggggagggatggggggcttcgagcacgagatggcgggtgcgatcgatcatacttcccttgcgtcgggcagggcttccccagaggaggaagactacgtggtcgcagctgcggttgatcgtctcgatgatcgcatcggtgaaggtctcccagccgaggccctgatggctcgctgccatgccggcacggacggtgagggtggtgttgaggagaaggacgccctgctctgcccatggcaggaggtgcccatcggggatgatggagggctgaccgaggtcggaggcgatctccttcttgatgttgatgaggctcggaggtatggggacgcccgccggtacggagaaggctaagccctcagcttgccctgcaccgtggtaggggtcttgacctaagatgacgacgcgtaccgtggggagggggcaggcgtcgagggcgcggaagatgagccctccagggggatagatagggccttcgtactggtaagcctggcggatgcggtcggtgaggatgctgaagtagagcttgtcgaactcaggcgcaagggcggtacgccagctctcgtcgaggcggatgttcatcgtgtggtcgggaagaggggtggaaggtctgcggagaggatctgatggacgaggccacgcaggcctccgtgctgtgcggtgtagaagagggcatgccctacggcggcgagggcgtcgaggtcattggcaccatctcccgtatagagtgtcgaggcgagcgcccctgcagtccactcctcgaggaaggcgcgcttgccctcggcatcaatgatagccgcggggtcgagtccgtcgaagtcgccgtcagcggtatagcgtacggcactccctacaaaggtggagagacccactcgctcacagatatcttcaacgaagggctggtaagcccccgtgacgatagcagtggggagagagagctcgcggaggagaagcgtggtgtcagtggggagggtgatgcttcggatgaccgagtgaagggccttacgcgagagcccacgaaggagctcagtgcggtgcatgaagctctcacggaagggtgtggcgcctgccatagccgcttcggtcagggcagtcatctcctccgagcgatctgagagacgtgccagctcgggcagcagctccgtcgtcgtgagcgtgccgtcgaggtcgaaggcgacgtgcgtgacctcggctgtggcactcgtggaggggaggtagaaggcgccgtgcgtagcgcgcccccaggggatgaggcgggtgaggagctcacggcgtagctccgtctcactcacgcttcgctccgtaggatagctgtagagcctgccctgtggagtgtccgtgatacttgccttcggtgtagcgcctatcgtctcagagaggagagctctgagctgctgatcctctccgtccgtagggcgagagaagagatagaggtgctgcacgtggggcatcgaggcggcgtgagggtatgtgtatatataaagcaagagtgcttgacttcgataagccaagcactcttcagttttgggggtggaagatgggattcgaacccacgacacctggaaccacaatccagtgctctaaccaactgagctacaaccaccatataaatgctctgcttttcgcttgagcactgcaaaggtaatactactttctcaattcaccaaacctatcgcacgatggcggcttcgaggtcgtgccacagtcgttcgtcgggtacgggagccgtgagcgtgagggcttccttgctcacggggtgcgtgaaggatatctgtctggaaagtaggctgatactcccgccggggttgctacgaggtgcgccgtacttcaggtcgcccttgataggacagccgagggcagcgagctggcaacggatctgatgatgacggcccgtgtggagctcgatctcgaggagatgatagtgttcgcccgaggccagtaggcggtaggagaggcgggcgagcttggcgccacgcgtcgcagcgccttggcgagccacgtagctcttgttctgcgactcattgcgcacgaggtactgctcgagggtatcggagtgcttcggtgggcgagcagtgacgacggcccagtagcgcttcgagacgtctcccgtgcggaagagctcgttcatacggctgagtgccttcgacgtcttggcgaagaggacgaggccacccacggggcggtccaagcgatggatcacgccgaggtacacgttgccaggcttgttgtacttctccttgagccaagccttgagggcttcgctcatcggctcatcgcccgtcttgtcgccctggacgatttcgccggggcgcttgctgacgcagaggaggtggttgtcttcgtagacgacggtaggcttatacatacggggatatggggcggggagacttagtccccgatgaaggtgcagttgagtacctcgcggtagctattgaagatcgcgctcttgctgatgaagccgaggtagcgcccttcctcatcgacgacgggcatcttccacgccttcgtctcgtcgaagaggcgcatgacctccgtcatcggggtggctgaggagaccttgacctcgggagtgaccatgatcttacgcaccttgtagcgctcatagagttcggggcggaacatgatgttgcgcacattatccagctcgacgatgccgacgagtaccccgcgctcatcgaccacggggaaggagttgcggtggcttaccgagatgacgctgaccatctcaccgagggtcatgttgggggagacgacctcgaagtcacgctccagcacgctctccagattcatcagcgtcagtacggccgtatccttctgatgtgtgaggagcttgccctgctctgccaagcggagcgagtagatactgtggggcatgaagatgcggatcgtggcgaaggaggtcagcgacacgagcatcagtggcaggaagaggttgtacccgcccgagagctcagcgatgaggaaaacacccgtcagtggggcgtgcatcacgccagcgatcagccctgccataccgagcaagatgtagttcttcggggagatgaagacgttgagcgaactgaagtagttcaccagataggagaagatgaagcccgtgagcccgcccatgaagagggtgggagcgaagagcccgccacagccaccgcccgagttcgtcgctacggaggcgaagaccttgaagaggacggtgaggaggaagaaggcgaagaccacccagtaggagttcgagaacgcctcgaagatactcccgtcaaggagctgcgtgtactgcccatccaagaggatattcaccgagtcatatccttcgccatagagcggagggaagacgaagatgagcagggagaggatagctgccgagatgaggtagcgcaggcggatgtccttgatgcgcttcagctcgctctcgaagcggaacatcgtcttcgagaagtacagcgacatcagcccgcacaccacgcccagcaggatcatcagcgggatgcgctcgatatgataggggtcggtctggatgaactggaagaggatctccttccctgagaggacgtaggccacggcagcagccgagacggagctgaccaggagagggaggacggaggccatcgtgaggtcaaggagtaggacctcgatgacgaagacaagccctgtgataggtgccttgaagatgcccccgagggcaccagcgacaccacagccgatgaggagcataaggttacgctgctcgaggcggaagagacgtccgaagttcgaccccacggctgcacccgtcattacgatagggctctcagcccctaccgatcccccgaagctaatggtcagggcactggctatgatggagctccaggtgttgtgcggcttgatacggctcttacgctgggagatggagctgagcaccttcgtcaccccatggctgatgtcgtcccgcacgatgtagcggacgaagagcagggagaggagaatccccagcgcggggaagagcaggtagaggtagtgatgatcctcgatattctggaggatgaaggtctcgacgacgtggatgatgaacttgaggagagcagccacaagcgccatcgtcaccccgatgagaaggctcaggatgaggaggaagtagcgctcgctgatgtggcgctctcgccagctgatgagtcggtcgagcagaggtgtgatggcttgactgaaggcagacatcggcgtatgcagcggctatgggcgtatgaccttgacctcgcccgtgggaccgagcatgatgatctgagagggttcatgaggcgtctcgtcgctctgacggtacttgacgacatagtctacgccagcgacgatctcggggctgatgcccgagaagaagagcggggtaggctccccactgatgttggcggaggtggagacaatgggacggcgcaggcgcttgcagagggcggaggagaagagctcacggctctggcggataccgagggagcccccttcgccgaggaggttaggcgctacgcccgtggcatggggatagatgatggtgatggggcgcacggcgagctccatgaggtcataggcgacctcggggacttcgctcaccagacgctcgacttcgtaggtctctgctacgaggacgagcatactcttgctgtcttcgcgacgcttgagctcgtagatacggcgcacggcttcttcgttggtggcatcgcaaccaataccccacacagtatctgtgggatagaggatgatcccaccgcggcgcagggtctctacagcttcgtccaggtcggctttgtcgtaaggctcttgagtaatcttctttgtgtccatctccatatatataataggtaaggacaaaggtacgaccttttccccgtagtcgctctgcccgaagagggtaatattaattatagcgctttgtagaggaagctcgcgaagtcgatgtgtaaacgactacaggtctatgtacggacgactattgcttcggggtgcaaatgactattgcttttctcttcgctctcctacggcttcactccacttcctcacggacactcggctgaagtgctgtatcaagcacaaatagcctacaccttgatgtgggcgccgtgtgggcttgtggcttaataaaatcgatataattaaccgtacctttgctatatacctgcatataagggaatatcaagttgcttccgcagctcctcaatatccatcacaagtgtggggcggtctgtcccagcgagcttgtaaccaccaccactaaagcaatgaatagatttacgctaaggctcttcttgttttgtatggcgataggctgtgctatctcgggaagtgcgcagacaaaggtcacggggagagtcctcgacgagaaccgccagggagtggatgcagccgtcgtcatgctggtagcttctccaggagatgtcctcgtagagtctgtactcactgatgctgctgggcagtattcgatcctccagcgcaagggggagttcctcctttgtataagggcactgggctataaggaggtgaagagaaagatggctatcgcctcggccgatacacttcccgatatccagctggaggtagaggatgtttccctaaaggatgttgtcgtcaccgctcgcaagtcccgctcgctgaccagcgcatccaatgggaagattcggattcgcgtcgctcagtcttacctcacagatatagggactgcgctggatgtgctgaagcattctccgggcatcttggtgagcaacaagggggatatctccttagcgaccatcgggggaacagcgatatatgtcaatgggcggaagctgatgctaaagggggaagagctatcggcttatctacgctcgctcccctcctcaaagatctccagcatagagacttccccgagtccgaatgccagctttggggctgatggagctggtggcgtcatcaatatcatcacgaaggcatccgttcgctctggcttttacctcaccacctcacacagccttgcctattgggagaaccttcgacagagctcggacctcgctctatcctacaatacagataagtggcaactggggctc

SEQ ID NO: 3313 - DNA, 22484 bp, synthetic construct
  source 1..22484: mol_type = other DNA
  misc_feature 1..22484: note = Synthetic
gctcatcaagcaaacacgcacttatcgtcgcttcgacgagtccgtagctatcgaccgcctacagatcatccgctggcttgacatcgtccgtcagaccccttcggcacgcaatgcccaacccctgaagtatatcatcatcaccgataccgagctctgccacgagatcaccgctaagcagcactgggcttctatgctccccgagtgggacggaccaagtgtaggggagcgtcctcgtgcttacctcctgcagatcctggatacagacatcgcacccgcagctcgcttcgacgagggtattcagcttcaggcgctggggctcctcgccacagaagccggctacggcacgtgtatcttcggcgggcatggcaaggccgagctctcccgtcgccttggcctaccgacccacctctcgatcaatgccatcatcgctatcggcaagccccgagaggaagtggtactcgaagaggctcgtagtccagaggatgtccgctactggcgtgacaaggagggacgtcaccacgtacctaagcgccccttgagtgagctgatcatcgagcccaacaagccctctatcttctagacttactccctgctggagaactgactttgcctgtcggggtatagaccttcgcctctagagggcagaagctttggccccgagtgaaagaagcctttccctaaagacaagcctacttaccctacgggacgaagcgacgtctttcgcaggtccttcggcccccagcacaaacgatctcatccccctatccttatcccacttccccatacattcatgaaggcgatcccctcccttttctccatcctcgtgcttatgctactcctctcctccgccagctgtgggagcgctacaaggcaagcacagagtgcggacagcatcagtgagcccagccgtaccgctgcccccttcgacgcagactctgccctacgatacatccgagagcaggtagcattcggcgtgcgcactccagggagcgaagggcacaaggcttgtgcttcttggatcgagtccaagctccgtgactggggctatacggtgacgctccagcacttcactgggaaggattacttcggcaaggaagtacaggggacaaacatcatcgctaccctccagcccgagcacgaagagcgcatcctactgatggcccattgggacacccgtcaggtagcggatcacgatcccatagctagccgacagcaggagccgatcctcggtgccgacgacggcgctagtggtgtagctgtcctcctcgagctcgctcggcaggaagcgctcaagccttcgggcaaggccctggacttcgtattcttcgacctcgaagatggtggcggaagccaaagtgaagactcctggtgcctcggctctcaatattgggccaagcacccccaccgatcaggctactccgctcagtgggggatcctgctggatatggtcggtgctcatggcgctcgcttctattgggaggggctgtctaaggagtatgcacgcccgctcctcgccacactctggcagacagcagcacagctcggctggggcaattactttgtccaagccaatggatcacagatgaccgatgaccacgtcgccgtagtacgtgagctcggtattccttcggtcgacatcatcaacttcgaccccacacgccccacgggcttcggtgcgcactggcacactacggccgacgacatgaacatcatctctcgggagacgcttcgagctgtcggagagacagtcgccacgacggtccgtgaggatctctaattcgtcgaacctcttattcgctatcattccttcatgcccacaatcaacgaactacaagacgagatcatcgaggaattctcagccctcgatgattggatggatcgctatgcactgatcatcgacctcgggaataccttagagcccctgcctgagagcgacaagacaccgaccaacatcatcgaagggtgccagagtcgtgtatggatcactgcctccttcgacggggagcgtatccacttccgtggcgagagtgacgcactcatcgtcaaggggatcgtcagcctcttactacgtgtcctcgacggacagacgcctcaggacatcctcgcctccgacctctacttcatcgagcgtataggactggccgagcatctctcccccactcgctccaatgggctcgtgtcgatgctccgtcagatgcgactcttcgcagcagccttcgcaagtaaaagctaagtcttatcaatccccttatgcatatctatcatcagttactgaggtcagcggtagtgacctcagcagcccttgttgtggctactgcgctcgtcacctcctgttcgtccaagaccgttggtggtggaagtgacgaccagcttctcagcttcgtcgaccccttcataggtacgggcgagcacgggcacaccttccccggggctacacgtcccaatgcgctggtccaattcagccccgatacccacctcatcggatgggatgccagcagtggctatcatgcttctgacagcgtgatctatgccttcagcctcacccacctctcggggacgggcatcggagaccttggagacgtcgccctccttcccttctctggagcagatagtctcaagcccgtcgctaccttcgacaaggctacggaggtcgccactcctggctattatgccgtccagctacagaacttcgggatcaaggccgaactcaccagcaccgatcgtgtcggcctccttcgtgccacttatgccgatagcacggaccgcaagctccttcttgacctcgggcatatcctgcagcccaactgggggcataaggtaatgggcaatgaccttcgcctcgtcaacgactccacgatccaagggacgtactataccaagggctgggctgagcatcatcagctgagctacacgatccgtcttgcttcgcccgtcgacagcatcgccctctatcgggatggcaagcgtgagctcatccagccgggctatacggtgaccaaggacacagctaacctcaagcttcacctctatctccctgcaggaagcgaagcctatcaagtgaagatcggcgtctctgccgtctcacccgaaggtgctgagaagaacctcacggccgaacttcctcactgggacttcgacgctgtacatcaggagagccgacgtatctggtccgaagtcctctctcgcatcacgatcgagacgaaggatacgaccgtcctcaagaacttctacacagccgtctaccacgcacacatcgcaccctacaactatcaggacgtagatggcgccttccgtggcatggacaagcagatccaccaaggtggtccgaaggacggacattatactgtcttctccatctgggatacgtaccgtgcgctacatccactactgacgatcatcgatcctgaccaagcgctccgctacggtagaagcttggtccaggactaccaagaggggacgatcctcccccgctggccacttgcggcgaactatacaggctgtatgcctgcctaccattcggtgagcatcctggctgacctcgtagccaaggggctagcttcgaaggaagaccttcgtctctggacggaagctgccgtacgtagttccatttaccgagaagacctagcgaagaagttcgccggtactcgtgagctggacctcatcacccgtcatccatactacaaggaactactaggcttcgtgcccgccgactccgtgcccgagagcgtcagctggggcgtagagatggcctacgatgactggtgtatcgctcgtctagcagaggctgctgggctcgactctatccgtcaagtctacgacaagaaagcgctctactaccagcgctattgggaccccgagaccaagctcatgcgtcccgtgatggccgatggcaagttccgcacgcccttcaatccacgcttctctgcccacgagaagagtgattacaccgagggtaatgcttatcagtggagcttctatgcgcctcatgacatggagggcttcctcaaactcatgggcgggaaggccgtacttgagcagaacctagacacgctcttcaccacctcgtctcgtatcgacggagctgagcaatcaggcgatatcaccggcctcatcgggcagtacgctcacggcaatgagcccagccaccatatcgcttacctctacaactacaccgcttcgccacacaaggggcaagcgctcctagataccgtccttcgccacttctacaagcccacgcctgatggcatcatcggcaacgaagactgtgggcagatgtcggcgtggtatatcctcagcgccctcggcttctaccaagtctgccccgggaaggctgagtacatgatcggtcgtccgctcgtagataaggcgactattcgcctgaaggatggcaccttcaccatcgaagtcaagggcaattctcccgccaataagtacgtgcagtcggcgaagatcaacggccgagatatcaccggtacgctgaccttctcccatgctgatctccgtgctggtggcacgcttgagatcgtgatgtccgacaagcctcgcaagtaaggcaagactccccttctccaccacacgagcgctagctactccgtgcagggactttgtccttcggagagctagcgctcgctcgtttattctgatgccttagcacccaaggtcaccgtattcaccttctctcctactcgtcagtcctccatcctcattccccgacggaagatttacggcaaggaaaaagctccattcataacctgtaatagtaaccttcgtaatgggtaaaagccgaggagtttaccggtaatgaaggcaggtacagcaggaagcgaagacgcccacccattgggcatcgggagggagtataagggatattcctgaaaaaattaaataactcgttctggtttacactaatttatcttatctttgttgcacagaacgataagagtatcaactataaatacctaaataaaatggttagttacaaggaactcggcttggtcaacactcgtgagatgttcgccaaggctgtcaagggtggctatgctatccccgcattcaacttcaacaacatggagcagctccaggctatcatcggtgctgccgtagaaacgaagtcccccgtcatcctccaggtctccagcggtgctcgcaagtatgcgaaccagacactccttcgctacatggctcagggtgctgtcgaatacgctaaggaactgggttgccctaacccacagatcgcccttcacctcgaccatggtgatagcctcgagctctgcaagagctgtatcgagatgggcttctcctctgtgatgatcgacggctcacacctgccttacgacgagaacgtagcactgactcgctcggtagtcgaatatgctcatcagttcgacgtcacggtagaaggtgaactcggtgtcctggcaggtatcgaagatgatgtcgtagctgagcaccacacctataccgaacctgaagaagtcattgacttcgtcagcaagacgggtgtagactctctggctatctctatcggtacgtcgcacggggctaataagttcactcctgagcagtgccaccgtgatgctaacggcatcctcgtacctccccccctccgcttcgatatcctcgcagagatcgaaaagcagatcccaggcttccccatcgtccttcacggctcctctagcgtgcctcaggacgaagtcgctaccatcaaccagtacggtggtgccctcaaggatgcagtcggtatccctgaagaacagctccgtcaggcttcgaagagcgctgtctgcaagatcaacatcgactccgatggtcgtctagctatgaccgctgctatccgcaaggtcttcgctaccaaccctgcagagttcgacccacgtaagtacctcggtccagcacgtgactcgctcaagaagctctacatgcacaagatcgagaacgtactcggctccaacaaccgtctctaagagacagctagctcgccgatcgccctacaactagggccgagacagagctaatacgacaagaggctacctgccttcccgtaccctcgtgtgggtgggagtcaggtagcctctctcttttcaccctaccgatacatcatatatatgcaccgcctcttcacgctccgtgagcatgatcacggagcttaccccttcgaccaagtcgaggtggcggacttccgtcctgcctttgccgaagctattgccgagaagcgtagtgaggtcgaggccatcatccagcagaccgatgcgcctaccttcgccaataccatcgtagcgcttgagcgcagtggggcgaagctcgaatggctctctggtatcttctacaacctcctccacgccgaggctaccgacgaactgatgcagatcagtcaagagctcagccctgcgctctccgccctctcctcgtacatcctcctctccgaagggctcttcgctcgaatccgctccgtctgggaggagcgggatcagctgaagctagacctcgaggatgcccgcctcctacagcgtacttatgagagcttcagtgagagtggcgctctcctacccgaggacaagaaggagcgcctccgccaggtgaagcgccagctcagcgaactagccctcaccttcggacaaaataacctcaaggagcaagcacgcttccgactctgggtcgaggacgatgcccaagtagccggactccctgagtcggcactcggcgtagcacgtgtgctagccaagaaggaagataagccccatggctacctcttcaccctagcagccccgagcttcttccccttcatgcagcactgccctgactctagtcttcgagaggagatgtaccgagcgaagatgagcctgggtgcagtggagggtgagtttgacaatcgggatgtcatccgtcgccttgccaacctccgcctagagcttgcccaactcctcggacatacgaccttcgcatcgaaggtcctcaccaagcgcatggcgggctctcccgaagctgtctaccgtctgctggacgaactcctagaggcttacctccccgtagcgaaggaagagctcgctaaggtagaggccttcgcccatgaagcaggtgagaccaaggcgctacagccctgggactggagctactgggccgagcagtacaagaaggccttctatgagctggatgaagaggagctccgcccttacttcgagctctctcgggtctccacggcgatcttctccctcgctacccgtctctacggcatccacttcagcgagcgcaccgacctacccgtctatcatcccgacgtacatacctacgaggtgcaggatcgggacggctcttaccttggcctgctgtacacagacttcttccctcgtgaagggaagcagagtggtgcttggatgaataacctccaggagcagtaccacaccgtctcaggcgaagaccaccgtccgcacatcgtcctcgtgatgaacttcacccagcccgtcggcgatcgtccagcgctactgacaccgggggaagtgcgcaccttcttacatgagttcggccacgccctccacggcatgctcgcccaggctcgctacagctcactcagcgggacaaacgtcgtccgtgacttcgtagagctacccagccaattgatggagaactggctagaccagcgggaatggctccagagcttcgcccagcactaccagacggcagaggctctacccgactccctcatcgagcgaatggagcgtgcccgtcacttcctcgtaggctatgcagcctgtcgtcagctgagctttggctatctcgacatggcttggcacacgatcacggagcccctcccagaaggacttgacacgaaggccttcgaagagaaggcttgggctaaggccgtactcctacccgcttcaccagcaccttgtcagatgagtactgccttcggacacatcttctccggtggctacagcgctggctactacggctacaagtgggcggaggtactcgatgcggatgccttcgccgccttccagcaggaagggatcttctcgagcaagacggcccagcgcttccgtgactgcatcctttcccaaggtgaccgagaggatgctgaagtgctctacgagcgcttccgtgggcaatccccctcaatcgaagcccttcttcgcagggacggcatcgagcgtcgctagcctcacattcgaccgagccccagcgtcacgaaccgccgtgacgctggggcttacttgtatctaaggttcagggctaattccaaaggacttacccacaccttctaagctagccaacttccccttctaaacagcctcctccgagaccctaaaaaacgacctacggtaggttttatttgcgatccaccgtagatccctttttaggggtgccagagaccgcttgttatgcgggctggagcgaggtgctgtagctaggtgtgagccagtttgattttgggcgtttgatctcctaggggagtatgcctgaggtgcggggggatgatgggggcgtcgttctcttgaacttcaacttctacatgggctccgagagttgtatccctgtacacaattatataggacgagtcgaggtaagctcctccggagagatccttgatctatcggttctcttagctgccgaaagacctcagggtgtaagttttttgtcttgtgctgggagatgggaaataaaatgtggagagaggagttgtattaggttgtttctctgtgtagaagtcactaacttcgtgggcagagctacttattgtggtcgtctgatgatggggtaaaaagaagacgagctccccgaaggaagcccgccttagatgttttcacaacggataatccttattgtgattaactttcaaattcagtactgcaaagttagcttaaagatttaagctatacaacacaaacgcttatgagtaagcatgtacttggtctcgacctcggtgtcggatctatagggtggtgtcttatcgccctcgatgagcaggatcagcctgctgagatcttaggtatggggagtcgcatcgtacccctgacgacggatgatctcaatgaattctcccaagggaaggcgatctccaagaaccagaagcgcaccacacagcgctccatacgcaagggactggaccgctatcaactgcgacgcaaagtccttagtgagaagctggcagagcatgggatgctcccagacaaagatctaatgcaactcccagtccttgccctctgggagcttcgtgcacgagctgcttcaccaggggagaagctctccctcccagagataggtcgtgtactctaccacatcaatcagaaaagaggctataagcacgcaaagtccgatgaagccgaagaagcaactaagcgaggaaaggagcagggctatgtcgccacagtgaagggacgctatgcagagcttcagcaggaaggggctaccgtcggacagcactttgcctgcaaactcaaagagcacaggcaggagagcccttcgggtggatttttctataactaccgcatcaaggatcaggtctatcctcgggaagcctatatcgaggagtttgatcgcatcatggaggtgcagtcagtcttttatccagaggtcttgacctctgcgtttacccaagaactacgggataaggtcatcttcttccagcgaccactgaagtcctgtaagggactagtatccttctgtgagtttgagaagcaagagcgtgtcgtccagctcaagcgggtcaacagggaaggcaaggaagagctccaagagcggaagatcacgatcggccccaaggtcgcaccgaagagttctccaatagctcagctctgtaagctctgggagtctattcataatatacgtatctactatcccgaagggggaggagaggccgatcactctagaggagaagcggaagctcttagcttacctacagacgcatgacaagctgaccttcaccgctctcaagaaggagctgaagatctcagacaaggagcgactctggtgcgataaactcttgaagggaggcatcaagggcgatatgacacgggcgctcctgcgcaaggctctggcgggatataagaggtatgaacccctccttcggatggacttgaagctacgagactcccaagaggtagacccagagacggggcttatccgtccgattgttgacgagagctacctcagccagcctctctaccgactatggcatattctctactccatagaggagcgagaggcgatgcgtagagcccttatcgatcagcttggtttcctagaggaggacctagatggaggactgctggacaagctctatcagattgacttcgccaagcagggctacagcaataagtcggcgaagttcatctgtaagctcctgccccatctgcaggaggatcatgggtatagtgaggcctgtgagctagcggggaaacgccattcagcaagtagtctgactaaggaggagctggaggagcgcccactcctagagcacatccccttgctccagcgcaatgaacttcgacagcctatcgtggcgaagatcctcaatcagatgatcaacctcgtcaatgcccttcgccagaagtatggatcgatagatgaagtgcgtgtcgagctcgcccgtgaactgaagatgagccgtgaggagcgtgaggagacctctaggaggatccgagccagagagagggagaacaaagaaatagcagagcgtattaaagagtacgaactctatccgacgaagtcccgaatccagaagtatcgtctctggcaggaagccggggagcaatgcctctattgtggtaggtcgatcgatgtcgtgcagttcctcagaggtgatggagtcgagatcgagcatattatccctaagtccattctctatgatgactcctctgccaataagacctgtgcttgtagccgatgcaataaggataaaggcaataggacagcctatgagtacatcctcgctgagggacgagaggccgagtatctagatcgtctcgagactctcttccatgatggtaagctctcctatagcaagcgtcgtcgtcttcagtggaagaaagcggatatccctgcagacttcatcgagcgccagcttcgtctgacgcagtatatcgctcggcaggcgcaggagatcctccgccaggggatccgtcgggtcggtgcctctgaggggagtgtgacggccaagctccgtcatctctggggatatgatgatatcctacgggaactcaacttcgagcgctaccaatctatgggggaaaccgagatcgtaagccaagaggagaaggatggatccatcacgaagagcgaaaggatcaaggactggtcgaagcgtaaggatcaccggcatcatgcgatcgatgcacttgtcgtggcttgtactcggcagggatatattcagcgactcaatagcttgaatagtgaggaggatagtctacagatgcaggaggatagcaaacaggtgcgggagaagatggggggacagagacgccctacagcggacaagcatagcatcctagagaattggctcatcctacagcctcacttctcacatcaggacgtgaagtctaaggtcgcagagatccttgtgtccttccgccctggtaagcgtacggtctccactggacgtaatacctatctccgctctgggaagaaggtgactcagtccggtgtactcattcctcgaggaccattgtccgaagagagcctctatgggcagatcttgaggaatggcgagcctacctacgtcaagaaggtcgccctagagagcctctccgaagctcagattgagcagatcgtagaccttaagcttcgccgagagatgatagcccatgctcaaccttcagacggagcgaagctcgatccgaagttgctcctagctaccccgttctattctgacgcagcaggtgctcagcgcgtacgtagtgtacgggttgctattgagaatgggaagaatagtatcgtccccctacgctacaatgagtcaggtaaggcgatcacctttgtcaaaccaggaaacaatcatcacgtggctatctaccgaacgcctaagggtaagctcgtagacttgtgtgtcaccttctgggaggccgtagatcgtgtgcgctacggcatacctacgatcgttaggaagcctcgtgaagtccttgatcagctccttctaagagatgatatcccagaggctctactggcgaatctccctgcctctgactgggagtttgtggagtatctgcaggtgaatgagatgttcctcatcgggcttacgaacgaagagatccagacagcactagcagagtcagatttgctgaccctaagtaatcatctttatcgcgttcagaagatgtcctcggagtattacgttttccgatatcatcttgagactgaggttgccgacaacaagaataatacggggattatccccaagttctaccgcttgcaaggtcttaatgctacttatcagaaggcaaatccacgtagagtcaaggttaatctcctcggggagatcactctccctaagtaaactgaaggcttatgattaagcgaaccctctactttggtagtcctgcttatctggccttgaagcagaggcagctagagatccgtcagacccctgatgaggatggagctacgagtgtacggacgatcccgatagaggatatcggggtcgtcctcctcgaccatccgcagatcacgatcacccatagactgctcgatgctctactcagctacaattgtgctgtcgtgacctgctctatgaatcatctcccttcgggcctcctccttcccctagatgggcatagtctgcagaatgagcgcttccgtgcgcaactcgaggcctcggtacctctgcgcaagagactctggcaacagacgatccaagccaagatacagaaccaagcaatagtattgcagaatgttctaggagaaccagcgaagaacatgatcgcttggtctcggcaggtgaagagtggcgactcagagaatctcgaggctcgagctgctgccttctactggcgtaacctcttcgtctctctcccagactttgtgcgagagcgagaagagactgctcctaattccttactcaactatgggtatgcccttctgagagccatcgttgctcgagctcttgtcgctacaggacttctccccacactcggtatccaccatcacaataagtacaatgcctactgccttgctgatgatatcatggagccctaccgcccctatgtagatcagctggttgtggagatatgtgaggacgaagggtttccctctgtgctgagcaaggagatcaaggctcgcctactttcgatctctgccctagatgtggagatcgaaggacagcggcgacctctgatgcttgcagcctctcagacagcgacctcgctcctgcgctgcttcacgggggagagccatcgcctctcttatcctctcttctcatgctagctcatcgcctaagtgaataccgagtcatgtgggtcttagtcttctttgatctccctacctatacctcacaggagcgcaaggctgcttcaggttttcgccaggggcttatacaggatggcttcacgatgcttcagtattccatctatatgcgccactgtccgagtatggagcatgctgagactcatgttcgtcgtgtcaaggagatgctccccgatgagggcgaggtgatcatcatgacgatcacggataagcagttcggaatgatggagcacttctcgtcgcatagtcctaaggagggtccagatacgcccctactcttcgagatgttctagcgccatttctgtatgagacaacaaaaagccgatggagctccatcggctttttgatttctaatccctcgattaagtagctaacgtacagtagactatgtagggtcagctgtattagctgtatcgaaggtactgaatttgaaagctaatcacaactagcccagagaggtatttcgttggcaagtcgctgtattagctgtatcgaaggtactgaatttgaaagctaatcacaacgtaagtcctcacatgcctctacacgtagtcgctgtattagctgtatcgaaggtactgaatttgaaagctaatcacaacaaggagcgtccaggctaccgccattacatcgctgtattagctgtatcgaaggtactgaatttgaaagctaatcacaactatcgccagcgtaactcacagtagaaacggctgtattagctgtatcgaaggtactgaatttgaaagctaatcacaacctgattgatctccgtgcgaaactcactgaggctgtattagctgtatcgaaggtactgaatttgaaagctaatcacaacgcctcagagatcactaaccgacagatcgaagctgtattagctgtatcgaaggtactgaatttgaaagctaatcacaacagctatcatgaacaacccgttgcacttagtgctgtattagctgtatcgaaggtactgaatttgaaagctaatcacaacagctgaagcgccttctctcgctccttcttcgctgtattagctgtatcgaaggtactgaatttgaaagctaatcacaacaggaacattagacgtacaagtgatcaccccgctgtattagctgtatcgaaggtactgaatttgaaagctaatcacaactagtcagtttttgcgctcccaagaccgtcggctgtattagctgtatcgaaggtactgaatttgaaagctaatcacaactgatcaaacgtgtagaacttactctctacagctgtattagctgtatcgaaggtactgaatttgaaagctaatcacaactcctcgacagacaccctttgctctcttgcgctgtattagctgtatcgaaaaggtactgaatttgaaagctaatcacaacagacagagccccccaagcaggcaaagtaacgctgtattagctgtatcgaaggtactgaatttgaaagctaatcacaacagacagccacactataatggcgactactacgctgtattagctgtatcgaaggtactgaatttggactcagggtgcaaaggcctttagcgagggggcgctatgagaagaggttatacaagggagaggtgattctttttaggctcggctttttgggagagtatccctaagtctggaggggtggtcttatccgtagaaaagactagacttggatagccctaaaaaacgacctaccgtaggtccttttttgcccctcccgaagaaggtaaatgagaccgcctgtatcaggggctctggaccttgggatgcactcagggaaacaggggaatgtgtcggggtacttcttcgctgtctctccgccttcgctagcccctccgaaatgcggagaaatgatcgaagggatagcgccatgatgcttccgaggtcgtggggaggatgctcagccccttccgactgcctaaaaatgtgtatttttgcacccgcaaatcattcaattttatcaataatcggacacagtaatgaagaaatttcttattcttttctccctactcctctgcgtgggtcgtgtaagcgctcagacggaagcggcccctcaggaggaagctcccaaggcgtggaagttcaccggcgtctctggccttaaccttgcccagacctctctgaccaactgggctgccgggggtgagaactccgtcgcttggaacctctatctcaatgcgtcggctaactataagaagggagcctggagctgggacaatgccctggtcaccgacttcgggaagaccttcacctcgacgaataagtggctcaagagcgtcgataagctcaatctgagcaccaaggtcggtcgcttcgtgagcaagcactggagcatctctgccctcggtgacttcctctcacagttcgaccgtggcttcgatgcctcgacgaaccccaacatctcagggaacaaggacaagtacatctctacgatcttcgctcccggctacctgactctcgctatcggggcagactacaagcctaatgatgacttctccctcatgctctctcctgctacgggcaagatgaccttcgtcttcgacaagaagctctcggacgcaggtgccttcggtgtcaccccaggtaagaaggtgctcgctgagctcggtgccctagctgtagctaactacaagcgcaagctcgctgagaacatcaaccttgtgaccaagctcaccctcttcacctcgtacgacaagaacttcgggaacatcgacgtgaactgggatatgatgatcgccttcaaggtcaataagttcctctccacgacgctcacgacgaacctcgtctacgatgacaatatcaagacccgtgacgatcagggcaacatccgtggcgctaaggtacagttccgtgaagtcctcgggctcggtctggcctacaacttctaagcgctcccagacaagcgtctaagtcgctttaatcaagggctatcccactggctgggatagcccttgttgcttatctcggggaagctcatcgtgggtcgggtaggagaatagctaggaatttgctttctttacaatcaaatatcggctttggatagatccaaacggataacaaagaaaaaccgattattcttaaacattagaagcaaataactcacctacttagtctccataatacctatgcttggacaagaaatctccgaattcggacacatcctcagtaacgaccagctctctgtcgtacacgtagacctccccaaggggaagaagatcgccccacacgaccacaaggggcaggacatcttcttcagtgtcgtcaagggacaggtgaaggccaccctcaacgagagcgaagagcacacgctcagccccggtacactcctgcgcttcgacggcgacgtattcatcggcatcgaagccctcgtagatagcgaattcttcgtctatctcatcaacctctaattcccccgattctccgccatggaacaaatgaaagacaacctccctgaggtagacatggagaagctccgtgtcgtcctagatgtcaaggaaagatacctcagcggtgccctccccctcgacgaggcacgtgctatccttagggagcgagtgaagaccctgcgcccctatgagatcgctctcgccgaacaagagatcaagaccatcgaagacgacgagtgtcgcaaggaagatatccagcagatgatggtcctcttccaggatgtcctcgacagaagtcgtcccgaccttcccgaagatcaccccatcatgtgctacatccgtgagaatgatgccatgcgagggcttctcaagcaggtcgaggagctggcgcagtaccctgtgatcaagaatcaatggcttgagctgtacgacgagctccataagcaccgccttcacctctcccgcaagcagaaccaactctattcgatcctagagcgcaagggcttcgatcgtcccaccacgacgatgtggctcctcgatgacttcatccgtgatgaagttcgggatgctcgtaggctactcgaggaagaccgggaggaggagttcatcgccatgcagcctgtgatcgtcgccgacatccttgacctgatcgagaaggaagagaccgtactctatcccacatcgctcgctatgatccgccccgacgaattcgaagagatgaaggcgggcgaccgagagatcggcttcgcttggatcaaggtcggtggagggcatcggacagaagagaccaagaagccactacccgccaccgaagctgctggcttcgctagtgatctagcagcactcctcggtaagtatggcttctcaggagggtccaccccagggcaactccttgaggtagctacgggacagatgaccctggagcagatcaaccttgtctacaagcatatgcctgtggacttctcctatgtcgatgagaacgagatcgtgcgtttctacaccgacacagaccaccgtgtcttccctcggagcaagaacgtcatcgggcgagacgtaaagaattgccacccacgcactagcgtgcacctcgtcgaagagatcatagataagttccgtcgtggcgagcaggatgaagtcgacttctggatcaataagccaggactcttcatctacatctactacgtcgctgtgcgtgacgaagagggacgcttccgtggtatcctcgagatgatgcaggattgtacccgcatccgtagcctcgaaggttcccgcacactcctctcatgggacaagagtaataaggcagcttcgaagcactcagacgcatcgtactccgctccagcaaccactcccgcccccgaagcatcatccactgcggacaagcaagctgaaggagagagcgaatatgtctcttgctcctgcatgaagggagtgagccatgcgcccaaagctcctgaaactccccaagccgaagcaagcacttctgcccccgctgtcgaagtatccgcccctgccacagcgaagactgctactgagatcaccggagcaactcgcctcaaggacctgctggagcagcacccttggctgaaggctaagctccccgagatcaatcccgccttcaagatgctctctacgccactggcccgcatcatgatccccaaggctaccgtagcgatgatgagcgaacggagtggtatgcccctgactgaactcatcgcacagctccagcgagtcatctctgagcataagggctaatcctcccacagatcctgctaaaagaatagaggctcacccgaccaatgtgtcgggtgagcctctattttatccttaggagacttggtgctcctacttaggagagttaggtgctcctattagaactggtaaccgagcgtgatatagccggtcaggaagcgtggcgtaccgtcggtgacatagtagggagtaccgaggttctttgctacagacttcgtcaggctaccatcgataccaccacggagtgagaactgcttgtactgatacatcaggctcgcaccgaggccgacttcgaagcggttgaatgccttctcctgatagaggttgaggcttgtcccctgcttgggctgagctgcattgacattcttgccgtcattagtcagtttggcggagagaccataggctagataaggagcgacattgaagaagactcggtgatcatctccgatagtgaggagcttaagcgagacttccagaggtagctgaagggcatagttctggatctttacgttcttatactccggctcgatcacgttcttctgaccctcgccacggccaatgacatagagacctgggttgaatgagaagatcgtgttctcgaagggcaagatgacactagccccgacacggaagttcttggccatgacgccagcgtcgccatcatgattgacaccgagtgatgtgatgcgagacagagtcagaccagcttctgcacgatagccgatcttaccaaggtcctgagccgagaggctagtaccgagagccagcagagcgcaggctgaggcaacaagattcttgaatagcttcattttgtactgtttaaataaatggattgttaagccacgtacccgctggacccttagagaagcaacctcggcatagccgatcacgatccttgtttaaggtggatcgtctcgggtggtctcgacgggacgggctacgaatgacacgcaaatatacgtaaaaccacccataccccctttccctttttcttactctaaagttccccgtcgcttgaaggaagccctctcattacccgatcaggtcgcacgcattactcgctaagttaggatcaagaagctatcatcctcgctggcatcacttatcaaagcctctgcgatcacttgtagcgtttgctaccattacttgtaatagcgtcgggaattacgggataaaaggggacggaaattccatattttctgtacatttgttcagattctaacgcctaaagaggccgaagttcatctaccctctgaaggacaatactccccccatcacaaactaaccgccatgaatcgattcttcctacgcctgctcctttgcttcatcagtgtcagctatagcatatcagccagagcccagcagaaggtcacggggcggatactcgacgaacatcgaggagcgatggacggcgcagtcgtcctactcatcacgatacctcagggtgtcctggtcgaatccactcttaccgatgatacgggagccttctccctccttccccgtgaaggggacttccttctatgcatccgttcgctcggatataaggaggttaagcaaaggatctcctgcactccgggcctgcgcctccctgatatccagctcgagccagaggaagtttcgctcaaggatgtggtagtcaccgcccgcaagtctcggccgatgaccacggcctcccacggcaagatacagatccatgtagcccagtcttatctcaccgatatcggtaatgcgctagatgtcctcaggcatgctccaggtatctctgtgagtaataagggggagatctctctagccaccatcggagggactgccgtctatgtcaacggcaagaagctgatgctccagggcgaggaactcgcagcttacctgcgctccctctcgtcatcgaagatcgctcgtatagagacttcgcccagccctaatgcaagcttcggggcagatggagccggtggcatcatcaacattgtactgaaagcctcggagcactccggcttcttcctcaccacttcacacagcatcgcctactgggatcacctgaagcagagctccgacctagccctatcctacaataccagtaaatggcaactcgggctcaactacagccacagcctcggccaccatgggatgaggtacggctacgagaaggtacaaaacggcgacaagagcctgtcagagaccatcgacacagacaagcggaatacctacgctacgggtatcgacttctcgtggcaagtgacaccgaagagcaagttcttcgtagggagctcggtaaatatcctctctggccccggtgagaccaataccacgaccctcctctacaaggggatgacgacgctcgatggcagactcagagcccgcaatgactatatcgagcagaagaccctgaggtatgccaatagcctcaattacctctatcagccctccgaccgacagcaactctccctcacactggactggacacgcttcgacgggaaggcacgctgtgaccagcccaacgactactattcggccaccgatcagctcattcgctccgacgtcttctattcacagcccgagaaggatatcgatatctacgccctactggcggactacaagctccagacgagcacgcagtctgagtggcttctgggggtgaaggcctctcgcatcgctagcgataattccttcctcttcaagaagaacgggacgctcgatccacagcgctccaatcgcttccgctacgatgagcacaacatcgagggctacacgcagtacactcatacctgggatcggctcgaactcagtgctggtctccggctcgagtacatgcatacccagagcgaacttcgggcacacacctctcaggctacggatcgaagccgtggggatcacctacgactcttccccaacctcagtctatcctactcgatcaacgaaaagaataagcttgcccttctctatagtcgccggcaggacaaacctagatacgaggacctcaatcccttcgaatacctgctggatgaattgacctactggaaggggaatcccttcctcaagcctcagatcagccacaagttcatcctcaactatctgtggcgtgacctgtcacttagcctctactacagcaagctcgacgactacttcacctccctgaccgatgtgctcggcccagacaagacggtcatgaccacgaagaatatcgggacacagcagcaggtcgggctcgaagccgtcttctccagacgcctcactccgtggtgggacttcagtaccaacctaggcttttattacttcgctaatcagctccattacgagacctaccggcaggactatcggcgtccctcgtgcttcctctccaccagtagtagcctccttctcccgctggggatcaacctcgagctatcagctcggtactactctgcacgtcagggcgggagctatgaggtgagcaagccgacgggtggtattgatatcgggctcaataggagctggcagagcggtcgccttcgcctgtcgctcctgatgacagatatattccacaccgagcgctgggatagctacggtacgaaggatgctctgcaactcgcctcctggggctatggtgagagtcgcaaggtcagcctacgactcagctacagcttcggtcgtcagcgcttcaataaggtagagaagcaactcgaggagcacaatcgactctagcccgatctcagggtcttcagggcttagcgtccgatgggctggaggctcagctccctctacgcctgagctccctaacggctctccccgatgccttctctatatatcccccgatagaaggactatcggggggagcaaattagctatctttggatgagctcactaataagaacttcgggctacttctccgaagaactgagagctaattacatgatgaagaccatcc

SEQ ID NO: 3314 - DNA, 22451 bp, synthetic construct
  misc_feature 1..22451: note = Synthetic
  source 1..22451: mol_type = other DNA
tttcgaggagatacgtgaggagatgcgtgtggggcttacggctgagttccacgagaacttcaggcgcaaagccttctttgaccagccgtggaagcctcgcaaagagtcgggctggaagtcctcgaggagaaaaagcccccgtggtacgctcctcgtagcgacgggtaagctacgccgttcgctcaaggcacaggcgactgcctcaggggtgctattcacctcggcgatgccctatgcctcgatgcacaatgaaggcttctcgggtgaggtaactgttccccagcatacccgtaaggcgacgacagctatccgactggtcaagggcaagcgtagactccagcgtaaacgtgtccacgttcgagcccaccaagtccgctccttcaagcggttcgtccgtatccctgagcgtcgcttcgtgggcaaccactccaaggtcgaggcactcatccagcgtatcgtcaccaagcacgtcgacctgtggcgtgaggagctgaatgcccgactacgtcgagctgagcgctcccatcaatcactgattaaatagacattgaatatgagaagagaactataccgcgccctgaggaagtgccttcgggaagccctccctgagctccagcacatcgcgctttggaatgaaaatatggaagacttagaagggggcttgctcttcgccactcctgccgtcttcgtggagttcgctcccgtgaccttttcggcatctggtcaaggcatcccccgtgctccgatggaggtcactctgcacctgatccataagttcacccccgaagacccccacgaggatctccagggagaagagtaccagcgccccgactatatggaagaccctcttgcctatcttgacctgatggagctactggagacggctcccatagggctctcgggggtaggcttctcggggctacagctcacctccagcgacctcgaccaccagcacggcgatctgatgcaccactgggctacattcgtcacgggggtagcttacccgagctcaatggtcgttcgagaccgatataggaaagcgccagcattacaagttgacataaagcaagggtaactcaaattatctacctttgtttcaaataatcctttacacaacaatctcactatgacacagaatcaggatcccgaattggtatacctccgataccaccttgacaataatgccccagtggacttattagatttcacagacagcatcatagctatacagagtgagtacaaccattttctaaaggttagaggtcgccatggcacgaatgcccgcttgaatattaagaaggtcgaagaagggagtattgtatttgagttcatgcaggctgtacttccaacagcaatagtggcagcggggaatgctaataccttgattgattttgggaagcatttgaagaacctggtccaatcactcactacaggtagccaaataccagcagagggatacaaccaagaaagtttatcgaatatctctaagatcgtccagccacttgcccgaaatcctaactcaaacttagggttctcggtaatgacccagggaggtcagactatcttcaacaactgcacctttaatcttaactcgacggaaggaaatgctattcaaaacagagcacaaggggcaaaagaggaactgcaggaacagatgacaaggaccgaagagctaaagacgaataccattttgcggttagcttgtcttgatcggaaagcagacagcaagcaagaccgaggtatcattgaagtctttgacccacaaaagcctcggaaattgctctttgatgatgagactatcaaagctcaatttgtggagtcggatcagaatgcgttcaagtgcctctattatgtagatgctatcgcgatgtaccaagaagggcgtatcgtcgcctatcgcatcatcaagctccgtgatatcattgagcccgaagactaacctcatataatgcgacaagcccctgctccgactattcggggcaggggcttgtcgttatatagagcgcagggggcttaggtatcccatgctttgcgctcttcgttccacttgtcaaacagaggatatagaccggggggcatctcgtcggggagctcgagactgcgggcaatagctaagtagtacatcatcgtccgatagctaatcgcatagacgggatagacatagacagaccacaccttgcggagcgaccgcttgtggttgccgcgctcgtggtatcggtggacaatgtagctgacacgtcgtgccatctctattctattcgtatgcatcgctctataggtgttgaatttgtactacctttgtggcgatgacggactaagcagtatccgtttttcgttccattgaccagcctggcggtagcaccccgccaggctggtattttttttaggcttcggtgatgccgaggggaacgtccgaccagccgccggtgccgttcttgacttgggcacggacaaagtccttggtgcgaacggggctgtaggcttccttgatgatggctacgccctccgagaagcgggcatcctggatgctctcggcatacttgtcgagctggaggactttgtcggctttgaggttgcccttgttatcccgggagaggaggtcaaggatgatatccacgagcttgcgggtctcctcgtctccagccagcgaagagatgtagtcgcgtaccttggcgatgccatcctctacggtgtcatcccagccgtcacgctggtagtagccgacgatgatgcgctgtgagccgtcggtggagaggaagctatgggagcgctgtccctgggcttcgctgcccatcacctccatcttggtctcgatgacttgggcgaaggcatcatagacgtgcttcttcatcgaggaaagctggcggctggtttgctcgagctgggggaagagctcatcgacggtggtggaggcaagggagcggtacgcctcgcggtcttctttggctttcttctggcggtctttttcgtcttgagcctgcatcgctgcttggtagcgagcatactcttcgggggtcattgatacttgtacggtatccattgtgggtcggtggttaaagggttgttaaatgctatttgattagcctcgggcttgctcgatgtggtgcaggcgtttgcctaaggagcgagctaagctgtcggaggtgtgggggtgggtcaagagggcaaagaggatgtcggggtcgtccgtcaggctcagctcatcgagcaggtcggagggggtagacgggttctcggcgatcatcagacgaaggagcgtatcccccgtgtgggctaagtcgcagaggacatcctcgggcgtggaggggttgctggctacggagaccttgatccaggtaaggctatctcctgcgagctgacgaaggagtgcgggggaggtcgtcgggtcgtcggctaaggcttgacgctgctcggggctgtagcggtagaggtctgtgggtatcatcgggctacttcgtgggggtggacttcttgcggaggtcgtcgagttcacgacgctggcgggagatgacttcactgagcgtcagggtggtgcagacgccccagagggctaccccggcgagccaaacgatgatgcctatatggctgtcggggatgatggcatcgaagcctaaggcagcgagtaggcagaggaagccgatgaagattgtttcacgtttcattgtagtcgttattaagtggtgaattagttagcgagggtggaggtggggaaggtaggcagaggagcttcgggggtaggctcttcggtggtgatggcgtcaacggcacgcttatccttgactttgtcgttgaagagcccgacgaggttgcgcagtcgttccttgggaatcttgttgaaggagcggtagcccgtggctcggcaggcgatggccttgatgagggaaaggctttcgacgcgccccgtgagacgaaggtagctggcgatggcagcgataacgcggcggcgcagtcgctgaatgtcggcgccctcggtgcggcggtccagctcggcagccagcgaagcgcagacatcgaggaggtcgtgcgtctccatatccttagaggaggtgcagccgtagggggagaggagggcttccctatcctcgggggtgaggtgaagctgcgagcagagggtgtggtacttcttgatggtggcggcagcgaggtcgtccatttgctttgttcctttggctttcattgtgggtcggtggtgatgggttgttttctctttcgttggtcacgctctttggggtcggtggcggtggtgccccagtaggcgtcggcgccgtcctcccagatgatgtagtcgtctccgccgacctcgcctgtagcgtagcgggaggtcaccatagctcggtagccctcgacgcggatctttacgtcggcatcgtagcggatggcttgggcaagggcgcccttcggctcaccgcccttctcgtgggcgacgactacaaagagcttttttcggtagcgttgactgaggagctgatagtcgcagaggcgaatgcctcggaggtagttgatcgagtcgatgatgacgatctcggggctttggcgcttggcgaggcgagcgaagagctcatcatagctctcacggtcgaggagcttcacgcgtcgccctgcctcatccatccctccagcgatccacgctgcctgcatcgtagggcttagaccctgctcgaggctgttgtagaggactctcccgaactggctgaggtacttagccagctggaggcagaatgaggtcttgcccgagccactacccccgtagatgagccacgtgccacgcagcacaggcatcccgatgctcgccagccacgccccgtcgaagtcggcggtcttgaagcgcgcggagcggatattagcgttggagtatgctcgtgccatagctaagcctgctgtgccaactgatgttcgcgccacacggcacggcgcactcgccgcaggtcgcactgggcttcgtcagcgatacgccgcacacagcgcccctccgagattccgttggcggtgcacaccagggagatgtcttcgggggagagggcgctgagctggacgcactgccttcccacacggctgtacacctcttcgtagcccttgcgcccggtgcgaagcccccgctgcagtcgcttgtcgaggtagtgcgtggcgctgaggacgacaccgcagtgatcctccagctcgttgtagagggtgatgaagaagtagagcacctggtcgctcatcttgtccgcctcgtcgaggatcaggagcggacggtcggcacgcttgaggcggcgcaccaccgagccaattttttcggctacgttcatcccacgggggtcaagccccatcgactccatcaccgcagagagccagctggtgcgattctgatactcgctgcaggtgatggcgtaggcttcgctgtggagggagatgtactggcggatggtggcgctcttgccacagccggcactgccgacgatagccatcacttggctatcccgctgagcgcagtcgaggagctggatcagctcttcgtagacattcgtgtggacgatagaccagccctcggcagagagcccgatctgcttgctgacgttgtgccacatcccttcggcgatggtcgcccagtcaccgttgagcatcttgctgatggtggcagcgctgacaccgctcagcgtgttggaggctttgttttgcccaccacacttcgtgcagtagtcacgcaggcgggccgtgatgaggtctttttctttctgttccattgttgtgctattttgtgttgtcctactccttcgaaaaaaggagtgtactcgttcggcggaacgactatactcgttccaagatgcttcgttttcgcggctctgtggggggctcttcttgggggctaccttctcgctggagcttgcggtcgtatctgttatccttgacttgcccctggctgtcgggtaggaggtcgtccatctcgcgggcaaaagcctcagcttcggcgggggtgtcgtcctcgatggggcgcgtcttcttctttttgcctcggcggaagggagtgatacttctctgcaggagctcctgggcgacgctgttgtcctttgaggcttcgagggccaaaggcatcatcctcttccactcgccatccacccagtcctcgatctcccgctgatgggtgcgcacacgctccaggtgctggaggtcttcggggcgctggtcttcgacagccataggctggaggtgcttccgctcgaggaggaacttatactgcccatcttcgctgacggcaaggacgctcgcaaggtcgctcgggtcgtagtagacctgccagcgctggtgacgctgctccttgaagccctgctcgaagctctcgtagtactgcacctcgccaaagatcgtgggcgtgagcccgtagatactctgaccgatgtagcgccccgaggtctcgccccagtgctcgaggtagatcgagcggtccagctggatgtcggtgatgtccccatcgaagaggctcatatactcctcgtgcttcaacgcgcgctcctggctcataatcgtgtggatctgaccctcgacttcggcgcgggtggggatctggtggcgaaggtcagaggcgacttctctattcgtccccttgcccttcttccccgtgatcccgtagcccgaccaattcggctgcagctggcagtaggtcttgttgaggcgggagaagtaaggctcgatgatcttagcgcgggcgttcttcgctctcgctgggctgagcttgttactcatcgccttgtagagaggcgtcagcgctccgatctgatagtggtcgtattggatctcacgggggtgacacttcaccccgaagagctcctcagtatggtgcgctgcactgcgcagcgcttgagcgatcagctgggggcattcacgctccccgatagcgtagccgatgggataggagcaagaggcatcgaggatgaccaccaccaccagacggcagtcgtataccgtcttggtgtcccccttcttgtcggtagttgtgtgctggtagtagagctccaccgtccagccgtcgtgcacccagtagctcatagcgcgggtgggcttcgtcctcttgatggccgtctgcacctgcaggcggtagtcggtacgacccttgcgccctgcgtcgatgagtaggctcttactcttggcgatcttccccacggccgaagcggtgagcttctcccagccacgcacctttgcggtctcgttgtagagccgtgccacctgactattgttgagattgttggggctggcaaggagcatcaggaggagcgcggactgctcgtcggcagaagtcttgcttgcattctgattctgatagcccttgtggatgaggctctcatagccgtcacgctggtaggcttcgtgcttctcctgaaggcgactcttggggagcttgtgggggtactcctcctgaggcagtgcctggatcatatcggccagcctgcagtagagctctcccttacccatcgggcgacgccctgccttaccgcgcttgctgtagtgctcggcttggtaggcgctgatggcttctaagatttgcgcctcagccacgtactgacgtatcttctccccaggcaggcaacggccgtcgaggaggcggtagctgtggtaatagtgtacggcttcgggtaggggacggatgagctgctcaaggagactcttcactctatccatgggagggatgtcaaagcgcttgtaaacctcggccttgtacttctcgggaagcgtgtccacggcgtactgtgcctgccgacctcggcaaccacgcaccacgatctggagagtcttgcgattgacaagctccttcagatagcgttcagtaatcagtgcagcaccaaccaattcactcttggtcgcacacagtactccgttgactcgttccatagtggttataagctctttccgaagtcctggatagccttcagtggggcgatgaccccgtggtgggtactacacagctcctctcccttatagaggtagatgtcgcccgtagccttatcacactccagacggacgctggcactgaagcgctgcaccagcttgtcgcccaggtctaccagcacctccgactcgggagcggtgatcatcacctcacccccacgagctaaagcggcgtggcggattccctccagcagctcagagccaccctggtagctcaaggcactgtgtaccgtcttgcgcgtcgtcccgaactgctccaccagctcccgacgcagggcgttgcttactttaatctctcgtttcatcgttacgttaccttattaatagaggttcagaaaggcatcgggcgccaagggtcgatctggatctggtagaccaactcatccatcttaccaccagagaggaattcgactattgcccagctgaaggtcggcatcgtggcgcagtagtgctcatcttctgccagcgcagggatcatcccctcaccttcgaagacctgaccctggaaggtcatatcatcccgaagcatccggaggaaggtatcaagctctaccgcattgacgctgctctgcagaacctctttgccattagacccggtaatccaaacgggttttcccccgtcttcctctatctctgtacgtagcgactctaacacatcttcctccgtcagatgaaggcatacatcgcctttgaccacaagccaagcttctggctttgtctcctcggctgcctctttcgttcttttcattgtcgtatctttgttatgtgtgttacgtgtaacttatactggtgcgctgtaactacaccgcaaaggtatgcacaaattgaataagctccaaataatttatgcacagactgaacaatagagggaggttggaagcactaataaactattactcagagggtaataaatctatgtttggcaggctcataggcttgcaaccatcaagcataacgaactggatacgtagagatacgcttgactttgagttgatatattcgaagtgtgcaaaccttaatcctcactggctattaactggggagggtgagatgctcaaatctacagtccaccaaagcaacccccagcaagaagcggcgccagcccagctcacagggctgatacaagagcttatgaacgagctccgccaaaagaacgaagagataggagaacttagagagagaatagggcgagctgatggcacaatagagtcccttcaaagagaacttaatcaccacgcaaaatctgctggcgatgtgaccttagaagagtctgcccgtgctgtatagctcctatatttagactaataaaagggaaagcgtttggaacataactacttatagcattctcaacggctaatatcgtgtcattatccccccttgagtttggaatttatagctgtttttcacgctaaaacaacatctatccccccattcaacagataaaaaaaacatagtatctatgtactccattatgtagcaagctatgtactctattgtgtactccaataggtaatccattccgtttttaccgtggaaaacggagctatttgtaggggctcaaagagggggtatttacacgacatctgaccacttgagagcgggtgattaatcagtccttaatcacctggcacaccatccaacacacttcggataagggaggctcaaggatgcccttatctgtcacatcgcctaccatgccagcgccccacacaggtgcactataatcctttatctaagcgacctaacggcacatcagccaccacactccaccgacgcaaaagaaaagggctgagagcgtctgtatgacaccctcagccccttattctttaagccgaccaaagccgaatttaacccacctcaatcaatcgtcgttcaactccccttcaaagtttaagctgaatttaagcgaatttaagttgtcagcgcaattcgttttccccgtccgcatcgcctaactcattgtctatctttctcatacgtcccacccgtagtccgcatttcgttttctgtcttatacaccacgcgcgtagccctggccagcatcctccagccctatgagcagtaccaccacctcctcacgatggagctggagacacgaccaatgaaggtgcaaaccaccgatgaggctacgggtgagatcacggagtacgaggtcgccgtcctcaccgacagctatacacgacagcccctctatcgcctgtggcacatcctctactcgatcgaagagcgcgatgccatgcgcaaggcgctcatcacccagctcggcatgtcggaggaagatttagacggcggactcctcgatcagctctatcgtctggacttcgtcaagcctggctacggaaataagtcggcgaagttcatgtgtaagctcctcccccagctccagcagggcttaggctatagcgaagcctgcgccgccgtaggctaccgccattcggtgagcctcacccgtgaagaaatcgccgagcgcatcctcctccctcagattcccctactccagcgcaacgagctccgccagcctatggtcgagaagatcctcaatcagatgatcaacctcgtcaacaccctccaagcggaatacggcatcgatgaagtacgcatcgagctggcacgcgagctgaagatgtcacgcgaagagcgcgagcgtatatctcgtagcaatggcacaagaaagactaaaaacgatgctgtagcaaagtacatccaggaatatggcttctaccccaccaagtcactcatccgcaagtttttgctatgggaggaggcagagcaccgctgtatgtactgcggtaaagagatctcgcagatcgaatgcctcactgtaggagagatggaggtcgagcacatcatccctaagtccatcctctatgacgattccttcggcaacaagacctgtgcctgccgccaatgcaacaaagagaagggcaatctcacggcacgcgagtacatccagtccaagggctgggaagctgactacctcaaacgactcaaagacctacaacagaagaagcagatttcctactccaagtaccagcgtcttctgtggctaaagaaggatatccctacggacttcctcgagcgacagcttcgcctgacgcagtacatctcccgacaagcgatgagtatcctccagcaaggcatccgtcgtgtcgctgcgagcgaaggcggtgtgacggctcgtctgcgtagcctctggggctatgacgacatcctccacagcctcaacctcgaccgctacgagtcgatgggtgagactgagctggtgccgaagcatcccaatagcgaagaggatgactcgatgaagtgccgcatcaccgactggagcaagcgcaaagaccaccgccaccacgccatcgatgctcttgtcgtagcctgcacacggcagggctacatccagcgactcaaccgcctcagctcagaggctgaccgcgaagagatgcgccatgagaccgagctacgcaaagagcccacagccgacaagctctccctcttagagcgctggctctcgcagcgacctcacttctccgtgcaggacgtcagcgacaaggtcgccgagatactcatctcctatcccaagcccaagagaacccacacctggggacgtaatcgctacaagaagaagacagccgatgggaaggaaaagacttgtatccagacgagggtactggtacctcgtggtgaactgatggaggcttcactctatggcaagattatatccgatggcaaggagcgcatcgtgaagcgctacccattacacgccctgaaaggcacggtggtagatcctcgcttaagagaacttatcacccagcgcaagcaagggagcaccaccgaagcaaagggagcgcctctctatttggacgaaaagaagaagcaagaagtacgctctgtccgatgctatgccgccaaactatcaacagacaaagccatccctatctgcttcgatgagcagggcaaagccatcaccttcgtccaaagtcggaataaccaccacgtggtgcattacttagatgcagctggcaaaacacatcctattatcctatctatctgggatgtcatagagcgagttcgctatggtctacctaccatcatcaccgattatgctcaggtaccacaagatctcgagctaccagcatctgtaagagataagctaccacaagctgaatggaagtgcatggatgtcttactacgcaatgagatgttcctactgggcttatccgatgaagagattacccaagccatcactcgagcagactacacactactaagcaagcatctgtatcagctccgaaaaatttccatctcatctgataaaaagattgattacaccttctactatcacttagatgctcctgacccaaagaaagagaagaaagagcaaggagacaagaagaaagagaaggaacaatccaagccagctaagggtacaagcctcacactccacaaatatagagtgcaagggctctcaaccttccttaagctcaatattcacaaggtacgcatcgacttgcttggtcggattaccctactctaatcacttcctctaccatgatcaaacgcaccatctacatcggcaatccagcctacctatccctacgccttcggcagatggtagtacggctggagccgaaggatggtgagtcgcaggcacggacgatcccgatcgaagatatcggggtcgtcctcctcgaccaccctcagatcaccatcacccacgctctcttaggcgcattgctcgagcagaactgcgctgtcgtgacctgcacggcagcccacatgccttcggggctcctcctacccctcgctggacacaccctccagacagagcgtttccgtgcccagctcgatgcctcccttccactcaagaagcagctttggcaacagaccatacaagctaaaatcctcaatcaagccgccgccctgcagtcagtcttaggcgaacccgtcaagaatatgctctcctggagccgccaagtcaagagcggcgatacagagaacatcgaggcacgtgccgctgccttctactggcgcaacctcttcatcaccctcccgggcttcgtgcgggagcgggaagaagctgcccccaactccctactcaactatggctatgccatcctgcgcgcactcgttgctcgcgcactcgtcggctgtggcctactccctaccctcggaatccaccaccacaacaagtacaatgcctactgcttagcggatgatatcatggagccctaccgcccctatgtcgacctcttagtcgtagagatctgcgaagaagagggcttccctacgaccctaactaaggaagtcaaggctcgcctactcaccttgcccacccttgacgtcgagattgatgggcaatgccgtcctctgatgcttgccgtcgcccaaacggcgagctccctcctacgatgctttacaggcgaagtgcgccggctctcttatcccctcctacgatgcgatgtaaacgactaagtgaatataggattatgtgggtctttgttttctttgatttgcccacctatacggcactggagcgcaaggctgcttctggctttcgccaaggattattgaaggatggcttcacgatgtttcaatactccatctatatacgccactgcgcgagtatggagcaggctcagacgcacacacgccacgtcaagcagatgctccccgaggagggcgaagtcgtgattatgacgattaccgacaagcagttcggtatgatggagcatttctcttcacacctccccgccaccctgccgacatcatccgcaccagtggagatgctgtaaccccaacatcggaaaaagcgacctaataaaggaaaagcccgtggttacccacgggcttttctctttctatttctctcgctaagcaactaacacttagactcatacactgggcctgcgctgtattagctactacgaaagtaccgaatttgaaagctaatcacaactggggacgcgaagccccacagagcaggggcgctgtattagctactacgaaagtaccgaatttgaaagctaatcacaacatcgagcgttgcattcaccgacaaggggctgctgtattagctactacgaaagtaccgaatttgaaagctaatcacaactctatcagtgtcgttgttcgacttaccctggctgtattagctactacgaaagtaccgaatttgaaagctaatcacaacgtacaccctttactatgtttgattgagaagctgtattagctactacgaaagtaccgaatttgaaagctaatcacaacccctccagcttgtacagcgtggcactgacagctgtgttagctactgcgaaagtacctaatttgaaagctaatcacaacgcttcgcgaggagtggtacaaggttaatgcgctgtgttagctactgcgaaagtaccgaatttgaaagctaatcacaacagtgtctttgcgccgtacttcgtggggtcggctgtgttagctactacgaaagtaccgaatttaaaagctaattaccaagaccattctccgatatatcagagaggcgacgcccttgctttcggaagagaagagcaagaagctatataggtcgtcgaacaaagctatattggtcgctacgacgacctatataggtcacgtcacaaagcaatataggtcagcccgtgaagcaatataggtcggcagagagacaccacggcaggggtacgccatcatacattccctcaagctacgacgcatcggattcccccattccgcccctcagcatcggggctgtgcttctcatacgcgcgcatatatacattatgggagaggacgggaggagcgaagaaggactacaccaagcagtaaacccttccttagataaaaaggcggagctttatgccgataatgtctatctttgcgtgcaaattgtccgtggtgtacccagacgagaaggatacaccacccgctcaacaacagcatacatacctacaagatatatgggcgcgcctaaagcaaaacagtcatcgaccctgcgctatgcacggctcctgagcttcatcagcatcaccttcaccctctttatgctcggggctttaggcctcatctacgtcctcgagcaagggatgagtcaggaggtaagcgagcgcatctccttctctgtcgagctctccgaagagcctggagccacaacagagacgacccttagggagctccgtgcgcttccctacgttcgctccgtcgagctcatcacggccgacagtgccgccaaaagcctgaccgacatcctcggcgaagacccgacgaaggtattaggctacaaccccctccagccgatggctaaggtctacctcaagagcgagtacaccgagcctgatagcctcaagaaaatcatcgcctctaatccgctcctcaagactgccgaaggggttgaggagcaggaaggacaatgggcctcagcttcccacaacctccagaccatccgcctcatcctctgggtcttcctcggcatcaacctgctggtgagcttcctccaaattaataccgccacagggctggtcatctattcgcagcgtatgcgcatccgcacactctcgctcatcggcgctacggcgagcttcatcggccgtcccttcatacgccgagccgtccttgagggctttgtcggctctctcttagccctcggtctcttagccggcctactctatggagcggagcaagccttcggctatcccatcctgagcctctgcccccgtacgctcctgctcgctctcatcatcgccatccccagcgtaggggtatgcgtcagcttcatctcctcgtggcaggcgacacgtcgctacatccatatggaggagggcaagatccacttgatctaagtcccgacctcgctcctatcaccccatacgatataagtatatagtatgctctacagcaagaagaattatctcctgatggcgctctccgcactcctgatcctcgtgggcttcgtcctgatgtcaggaggacaaagtgaagaccccacggccttcagtgccgagatcttcagtgaccgccgtatcgtcgtcgcccccatcgtctgcctcatcggcttctgcctgatggtctatgccatcttggtcaagcctacagcgcgtcccgtagagaagaaggaagaggagggcgctgaatgagcattctccaaagcatcatcttagcgctggtcgaagggctcacggagttcctccccgtctcctccacagggcatatgatcctcaccgaaggtatcctcgggatggagaactccgactatctgaaggccttcacggtgatgatccagtttggcgcgattctctcggtcgtcgtctactacttccgccgcttccttcccttccccatcttgggtctgaagcccgattctacgaccagcctcggcggctggcgtctctacctcctgatgatcgtgggctgtatccccgctgccatcctcggtgcgctcttcaacgataagatcgacctcctcttaggcagcacctgggtcgtgctcacaatgctcttcctcggggggatcttgatgatctacttcaaccgcatcttcacccaccagcgtgagcggacgatgacgctacagaatgccttcgtcgtcgggctcttccagtgcctggcgatggtacctggcgtctcacgctcgatggctacgatcttcggggggatgcagcaggggctgacgcgccgacaggctgccgagtactcgttcttcctcgctgtccccacgatgttcggcgctacgctcctcaaggcgtacaagctctacaaagacccagcgatgagtggggtcttcgaggcgaactggcacacgctgctcatcggcaatgtggtcgccttcgtcgtcgccctcttggccatcaagttcttcatcgacttcgtcaccaagtacggcttccgcgccttcggctactaccgcatcatcctctccgtagctctggctatcgccctgctctgcggcgccaatatctccctgcagtaaatggagcagctcgacctcatcgcgggggcaaccatcgccctcgacaagcccctgacgtggagttccttcagcttggtcaataagtttcgctgcgaagcctgccgctacctcggcatcaagaagctcaaggtagggcacgcgggtacgctcgaccccttggccacgggcgtgatgatcctctgcactggcaagcataccaagcgcattgatgagctacaagctgggcgcaaggagtacatcgccgatatccgcctggggcagaccacgcctaccttcgatatggagacggagcccgatgccttcttccccaccgagcacatcactcgcgaaagtgtcgaagccgccctcaagggcttcatcggcaccatcgagcaggttcccccagccttctccgccgtcaaggtcgacggacgccgtgcctacgacttagcacgcaagggacgagacttcgagctcaaggctaagacgctcgtcatcgacgaaatagagctcctcgactacgccctaccacagatacagatacgcgtggtctgtagcaaaggcacctacatccgtgccttagcgcgcgacatcggcaccgccctcggctcgggcggtcacctcaccgacctgcgccgtacgcgcgtcggtgactaccatatagacgactgctaccgcgtcgaggatatccaagccttcctccgtgagtacgtcaccctccccacagaagaaacagaacccaccaacccatagtcctacgacatagacaatgaaggatactaagctaagtcacttcgaaatcgacatccccgaaacgctcatcgccaagaagcccgccaccttccgtgacgagtcgcgcctgatggtgctgcaccgctccacgggcgagatcgagcaccgccacttcaaggatatcttggactacttcgccaaggatgacgtcttcgtcttcaacgacacgaaggtcttccctgcacgtatgtatggcaacaaggagaagaccggcgcacagatcgaagtcttcctcctacgcgaactcaatgctgccttcaagctctgggacgtcgtcgtcgacccagcacgtaagattcgtatcggcaataagctctacttcggcaagaacgatgagctcgtggccgaagtcatcgacaacactacctcacgtggccgtaccctgcgcttcctcttcgatggctcgcaggaagagttccgcgaactcctccacgctatgggcgaaacgcccctacccaagtatatgaaccgcagccccaacagcgacgatgcacagcgctatcagtccctcttcgccaagcacgaaggggctgtcgtagggcctgctgccagcttccacttcagccgtgagcttctgctgcgtatggagatcagggatatccgcaaggccttcatcaccgtgcacaatggtcaggggaactaccgcgacatcgacgtcgaagacctcaccaagtacaagatggagagcgagcagatgatcatccccgaagaagcctgcaccatcgtcaacgctgccagcgaagctgggcgcaacatctgcgccgtaggtacctcggtgctccgtgctatggagacggcttcgggtacacagcgtcacctcaaggccttcgacggctggacgagcaagttcatcttccccccctatgacttcaacgtacccaatgccctggtgaccaacttccatatgtcgaagtccatcctgctgatgatggcagcggccttcgggggatatgaggagacgatgcgcgcttactccatcgccatcaaggagaagtaccgcttcggtgcctacggcgatgcgatgctcatcatcgactaatccatagcagtgcctgatgcctcagctgtatctctccctcggcagcaacgaggggaatcgcgaagcactcctacaccaagctatagatgccatcgaccgcctcatcgggcaggtcggtggcatcgctacattcatcgagacggagccctggggcttcgatagtccccatcccttcctcaatacggcactctcggtcaccacgtcactcccaccactggaggtacttgagcacacccaagccatcgaacgtcagctcggccgccagcataagagcgtggacggacactaccacgaccgccccatagatattgacctgctcttctatgaccagctcatcctgacgagcgagcgtctgaccctaccccatccgctactcaccgagcgactcttcgtcttagagccgcttcgagaaatagcgccagaatttattcaccccctctcaggtcgcgccatcgcagagctatataccgcgctccgtagtcgcctgagctaactactttatccaagcttaacttatgatcctaatcttcggcggtactaccgagggacgcatcgtcagctccatcctcgatgagtcgggcaaagaatacttctactctactaagggcgccttccaagagatagacttggtgcacggcgagcgcatctcaggggctatgacccatagcgtgatgcgcgacttcatccgcgagaaggagatccgcctcgtcattgatgccgcccatcccttcgcagccgtccttcacaagactatcggggaggtgactgccgagctctccatccccgtcatccgctacgagcgcaagtacagcgaacgcacagggcaggtcatcgagtgcgcaagctacgaagagatgatccagaagctcgaagcccagccttgtcgccgtctacttgccctcacgggggtgaataccatcgctacgctcaagcccttctggagcaagcacgagagctacttccgtatacttgaccgagaagattcgaaggagaaggctgaggcggcaggcttccccttcagccatattctttacttccgccctggcgaagatcaagccatcttcgaccaagtgcgccccgatgccgtcataacgaaggagagtggagagagtggtttcttcgaggagaagatagccccagcactcgaagctggtatcccggtctatatgatcactcgcccggcactccctgcccactacgaatatgtctacggtcccgtaggcttgcgtaaagctgtcgagcgactttgccccgatttctttccgctgaagacgggctttaccacagggagcaccgccacagctgccaccgctgctgcactccacgctctactccacgagggcgaaatgctgaccgaggcaaccattgttctcccttcgggtgaggaggtacgcctcccagtggagcaagtcgtcaagaccgagcgaggctaccaagccaccgcacgcaagtattcgggcgatgaccccgacgtcacacatctggctgagatttgctccgaagtctccttcactacggagcacgaaggcatccgcttcctccaaggtgagggcgtgggcatcgtcaccctccccgggcttgggctggaaataggaggccccgccatcaacaagacaccgcgtgcgatgatggagacgatcgtgcgccgtcactaccccacaggcggtgtcgacatcaccatcagcatccccacgggaagagagctggccagcaaaaccttcaaccctcgtctcggcatcatcgacggcatctccgtcgtcggcacttcgggcgtcgtcaagcccttctccctcgaggccttcgtcgcctccatcgttcgccaagcggatgtagcagtagctctgggtgcagacaccatcgtcatcaattcgggggccaagagcgagaagtacctcaagaacgccttccccgagctccccttccagtccttcgtccagtacggcaacttcatcggcgagacgctcgacaagctcgcccagcttgctatccctaagatctatatgggcattatgctcggcaaggcggtgaagctcgctgagggcaacctcgacacccacagccgcaaggtcgtgatgaacaaggactttatgcaccgcatcgctcgtgagtcgggctgcagcgaagccacccacaccctcatcgacagccttaccttagcacgtgagctgtggacggggctcactcccgacgaccttgagcgctttatgctccgtatcctcgatgcctgctacgaggcagcggcaaagctcgttcccgagagcgaactctccatcctgctcatcgatgacgacggcaatatccgctataccttcccgcataacttcttagccaaacgataagcgacgcccctcatggaactacttctcaagcgtgcctacgagccagccgaagcgaccgatggctatcgcgtacttgtcgaccgactttggccaaggggactcagtaaggagcgtgcccaaatagatgaatgggcgaaggagttagctccctcgaccgaacttcgtcagtggttcggacacgcaccgagtcgctgggaagagtttgctcgtgactaccgtgctgaattagagggttcgacagcaggaagagagttcgtcactcgcctccaggatgaggagcgcattactctcgtctacgcagctcacgatgagacgcactgccatcccctcatcttacgcgactaccttgagcacctgatctccccaccgtaatttcacctatgctttaccctatcctcctctttacccttccactgctggcaggctttctgctggatcgttcgctgggagacccgatgctcttcgggcatcccatcgtcctcttcggacagctcatacacttcggtgagaagcgactgaacaaggggaaagcacggagtctgaaaggcttcctctacaacgggagcttagtcctcttcaccttcctcctccccctactcaccttcgcagtgctcatcataggcgctggtagctgctacatcggcggagcgcacaccgtaggtgacgggctactcctcacctacagcctcctctcagccatcatcatcttctatatgctctcgggcaagaccttggtcaaggaggtgaaggatgtcttcgctgcgcttagcgtctccttagaggccgggcgcaagcaagtagggcggatcgtcggacgtgatacggagacactctctgcccacgaggtgcgtaccgcagcactggagacgctggcggagaacctcagcgacggggtcgtggctccgatgctttcgtgggcggtcttcgacctctcgggaatactgacctataagatgatcaacacgcaggactcgatggtcggctacctcaatgagcggtatcgcgcttatgggtacttctcggccaagctcgacgacttggtcaatctcctcccctctcgcatcacggcgatactgatgctcctctcagcgggaaggcttgacctgctcttcaagaccttccgccacggaaagcgtcacctcagccccaactctggttatcccgaggcggctatggcgctcctcctcggctgtcgctttggcgggccgcacgactacttcggcgaggtcgtcgacaagccttatatcggcgaggtcgagcgtgagctcagtgatgctgacctccagaaggctgtacgcatcgctcagcgtaccgaggggctggcactcggactatcactgctgctgcgcctccttctcatcgctgcccttctcgtccttcttattcatccgtaatgacctccaagcaacatcccttc

SEQ ID NO: 3315 - DNA, 20722 bp, synthetic construct
  misc_feature 1..20722: note = Synthetic
  source 1..20722: mol_type = other DNA
gagctggcgcagtgccgtggagaggctgtcgacgaaggtgcggtcacgaccgagggccatcgccgcctcgcgtgtcgtggagaagagctcgcgcaggatctgattgtccatcgtcgagcctgcagctacggctacggccttgccttggggcgtgtagtagctgttctcaggtgaggtcgtggggacgttgacgaggtagccgctcttgggatccttgaccagcgtcgtgaggaagaagcgtgcagctccctgcatcacggggtagatgcgctgcaggtaagcgcggtcttggctgtagcgatagtggttgtagaggtgctcacagagccaagcggcagaggtattcgtggcgccccagctgggatgctcgccaggggcggtgaactgccatacgttgccgaggacgtgcgtgacccagcccttagcacggtagaaggtgcgtgctgtacgctcacccgaaggtacgatgctctcgacccaatccgtgagcgccccgacggtctcggggagtgcgcccttctcggcaggccagtaattcatctgtaggttgatgttcaggtggtagtccccgttccaaggagcttggatggtttcggtccatatcccctgcaggttggggggcagagcgccagggcgtgtgctggagatcaggaggtagcggcccagctgcatatagagggcagccagtgctgggtcgcgctcggggtgctcgtagtaagcgatgaggcgacgctggataggcagcgatgagagcgctgggtcggagccaaggaagcgagcctgtacacggtccatctgtgcggtgaagcgctgtacgtgctcagcgaagaggttggcttcgcccacagccttagcttggagtgtctgctcgatgctgcgcgccatgacgggcaggcgcttgtcgtagtagttggtgttgtgtgcgatgtagagctcgatcgtgggggcattgaccacgagcagctcatcgccacgggtgatgagcgtaccgccctgaggcaggacggggcgcacgacgatggcgtagcttatgccccgaccgcccttgccatcggggagctgacccgagagtgtcaagaagccagcttcggctgcagggtgcccattctcggggcgtgagagggagagacggagcgtgtcacggcgggcctcttcgctgtggttcgtcaggtgtacgacctgtacctcacggccgaggacgctgtacagacgcttcgtgcgataggcttgcccgttgacgacgaggctctccttgctgacgccttcgctgaggctcagcccacggtaatagccgctgagctcgggagccttgtcccaattgaggtgaaggaagccaccgacttggtagctgccgtagggggtgttcgcgccttgtccgcgtccgctacctacgccaccgcagacgaaggtgcgatagatgaggtcttcggcttccttagcacgcccagcgaggaggagcttacggatagcggggagttgcttgtaggcctcggcgttccaagcggtggagtcgaccgagccgctccacatggagctttcgttgagggtgatcctctgatgctgtacgccaccatcggagagcatccccagacggccattgccgagggggagtgcctccatcatgctcgtggcggggcgatcgaagaaataggtgaggctctcgcggtaagcctggtctacggaggtcgtcgtcttagcccgcggtgccaccgtcgtggggctggcgaaggcgttgcctgcgctgagggctgctgcgacgagggtgcagcgaagtagggtagtatatgccataggacttgtgcaagcgatatggaagcatcggctcccgtttgcccgcaaagataagccattcttccgcccaagcatcagccttgcctcccagctccctcctctcggtcgtttcgctgggggctataaaaaggctcagcccgcatcccccgagcgtggggaatgcgggctgtaagcctaatgaaacttgagggaaggggtcgcttcttagatgacgccctgctcgagcattgcctgagctaccttgaggaagccagcaacgttagcacccttgacgtagttgatgtagtctccttcacggccatgagccacgcactgctcgtggatgtcgctcatgatctggtggagcttagcatcgacttcttcgttggtccagtagaggtgcatagcgttctgggtcatttcgagaccagaggtagctacaccaccagcattgactgccttaccaggagcgaagagcatcttcttttctacgaagtactcagcagcttcggccgtacaacccatattcgacgtttcagctacgatggttacgccgttagcgtggagcatcttagcatcctcttcgttcatttcgttctgcgtagcgcaaggcatagcgatgtctaccttctgctcccaaggcttcttgccagcgaagaactgagcgttggggaacttcttagcgtagtcagagacgacgtcgttaccgctagagcggaggtcgagcagcgcctggaacttctcgggggtgttgataccgtctgggtcgtagacgtagccgtcaggaccagagatggtgacgaccttagcaccgagctccgtagccttctgagctacaccccaagctacgttaccgaagccagagatagctaccgtcttgcccttgaggtcgatgttgtgctgcttgcagatgtgctgtacgaagtagacagcaccgaagcccgtagattcgggacgcaggcgagagccaccgaaggtgaagcccttaccagtcatcgtacccgtgtgctcgttagcaaggcgcttgtactgaccgtacatgtaggcgacttcgcgaccacctacaccgatgtcccctgcaggtacgtcggtgtcaggaccgatgtggcgccacagctcgcgcatgaagctctggcagaaagtcatgatttcgcgatcgctcttacccttaggagagaagtcagcaccgcccttaccaccgcccataggcagcgtggtgagtgcattcttgaaggtctgttcgaagccgaggaacttcaggatagagaggttgacagagggatggaagcggataccacccttgtatgggccgatagcgttgttgaactgtacgcggtagccgatgttcacatggactttacctgcatcgtcgatccaaggtacacggaaggtgatgatacggtcgggctctacgaggcgttccatgatagctgccttttcgaactcggggtgctggttgtagacttcttctacagagagaagaacttccttcacagcctggaggaattccttttccccagggtgctttgcctcgagcgaggccaaaatctcagcggatttcataactgatcgatctaatagttttgcgtgtacggctcgtgtaggagccttgatttcacagcaaatatatgcaatgatttttaccttgacaaatgtagtagcttcttttaatttcttaggaaagaagcgtatctacacggcttttctgctatgtgtgaataggggtgtgaaaggcaaaatagctggtgaaaatcgtgtgttatcactcggtatcgtggcaaatcttttgcttttcacttcaccctccttctccgtattcatgggcacagtataccgtcctatatataataatgtatagggggaggtgaagacgatggggcggaatgcgcctaaccgcggcggaagaagcgggtggggtaaagggagatgaggaaggagagcgccgtcaccgagacgaagatgaggagcatatccagcgggcgcacatccacggggagcgccatcgcttcgataccgctaccagagcggatgatgccgaagcgtgcctgcaggaggcagagtatccagccgaggagcatgccgacgctggtccccgtgagggcgatcagtaggcctacacggcggaagacttgctgcgtgaagctgggtggtgcaccgagagcggtgaagatacggctgtcgtcttgcttctcgatgaggagcatagccagcgagctggcgacgttgaaggccgctaggaggaggatgaagaggaggatgagataggtcatgaccttctccatacggatgaggtaggagaggtctgggtgctgctcttcgcggtccagggcggtgaggcggtctccgtagagcgccttcacctgctgcttgaagtcggaggtcttgacgcccgagcggaggtggatgccgagggcagatacttcgctctcctcatagtcgagtacgtcctgcaggtcagccaaggggaggtagatcgcagcgtccgtctcttggctcgtgggctgatactgcccgatgacccgtgcctcgaggctctggaaggacgaggcgggggctaagggattagtgaagccgaggcgcttggggaagaggacttcggcggcggggccattgtgctcggtgcggctgctatcctgcgggagctgaatcgctgcgccgagctggatgggggtgatgggtgcgccctcggcatctacgagggtcgtcgtcgcatggagctcgggcacatcagctgcgcgccccatggggtagacggaggcaaaggccgagtccactccgacggcatccacgacccactgctgctcccctacacgtaggagtcctttgctctccaggcgcagggcaatcgcttcggcacctgcctttgtgagcttggcacggtagtcggggaacttcttcaggtcaaagactccgccctccgtgtctcttaggacgatgtcggcatcgacctgctctgtagccccgaggatcatcgctacatagccattgtacacgccgacgacagccaccagcgccatagcgacgacagcgatggcgatggcagagagtgccgtcacatagttcactgcatgcaggcgggtgcggctgaagaggtagcggagggctatgcggaagctgagcacgggcgagaggcggggagtggggagatcgttacttgtcgttcagcccgaggaggctatcgatgcgctcgaggtagtcgagtgagtcatcgatgaagaaggtcagctcggggagcttacgcagctgcttgcctacgcgcaggcccagatcatagcgtatggtctttgcgctggagcgaattgactcgagtagctcttcggccttatccgaagggaagatgctcaggcgtacacgagcgatgctgaggtcggggctcacagtcaccgacgtcacggtgatcagtgttccggggatgctctgggtctgtatgcggaagaggtcgctgatctccttttggatgagtcgattgattcggctcattcttgtattatccattctttctgtctttttgaattacgcttacaaagttagtcaaagctcgcctcatctcccgactctacgtgggcggtcggcgaaggtccgatggctgactgcctatatgagactgctcccgtgagtcctgccctctatttagagtgctaaggcattgcacgcccagctccccgatattcctctccgaagtgaccaggcaagcccttcgctttatcgcgcgtattcctcttatccagcggaggaaaaagtgtccttatcgcgaagaaaaaagcgccttcctgtagtggtattcttctatctatgcacgtagtcttaaagaccaggcacgtaaatccaaatatccacgtacgtagatttatcgtccacgtacatagcccaaacttatctgccactcgtctacaacttttactcctacgcggagcaacaacctaatagaggtcatttcacaaagctatataggaatcgatccaacgctatatagctttcttcaccatcctatatagctctacccacgcacccatatacctatatggagaccattgcgcaagtccacctcttcattacgcgtaccttcttgccttgaaaattgggatctttaggctgagaagttcgaaggaggaaagtgcaagccgtgaagagatacccttgcgcaatggttcctaatagtacttcagtcggtgggaagagtgctcggtaaagccacttcctcgaatagagaagatcccacttgatacaccctcggatggggcgatgtcaagtgggatcttgcttggagtgatgtgccagagagcgtggctctcctaagctgtagtagcttgctagttgccgctagcttcgaccgtgtaaaattcctttgacaatgagtgtaaaggatcagcggtgagggttacttccttctcgtaggtcttaaggtgcttgttccccctgtacagcttcacgctcgtcttcaccttgatggatgcaggggcattatcaggtctgtgtacgatgaatccgacatatagccccgaacccttgtgggtgaacgtcgtgcgataggactttgcgatggggtctttccactcggagtcatagacggtctgaccgacgagcttgccgtcacggtagatgtcagatcccccttgggtgttggcgttgaagtggacgctgatcggagcggatgcactgatcgtgacctcttgcttgaggtctgcgctgccgaagccgccgaattctccgcctggcaggtcactcttgccaccgcaagagctgagcactaaggcaaaggagaagaggagaagagataggatgccgagtcggcgaattgattgttttgtagccattttacttgtagttgatgatgaggcggagggaggatagacagagctaccctgctccacgataatggttccgttaaatgaattgtacttagggaaggagtgtaagacgggcttcttctcctgctcaagatataaacgataggttgtatggatatcttatatatcccttacaaaaatgcttgtgtataatatgtctatgtaaatagatataaatgaagtgtgtgtggtatatcccttctcttagtggagaattctccttgggtttgcaggctttagaggtggaaaaggtagggtgtggtggccccctttttcgagatgtaagtcgctcatggatgcggtgttgcttgctcgacagcggggaagttgctacatttgtttcagtgctacggctgatcgtagtggcctggacctctcggtctgatcacaaaaagaagaagggtgagaacctcacttaagaggccccaccctggatgttctcacaacggaataaatccttattgtgattagctttcagatttcgttactgcaaatgtaaccatttttcttaatatcaacacaaccaatgcttatgagcaaacatgtacttggtcttgacctcggagtaggatcaatagggtggtgccttatcgccctcgatgcgcagggagatcctgccgaaatcttaggtatggggagccgtgtcgtccccttaaacaatgctaccgatgctgcggacttctctattgggaaggccttcacggcgaaccaagagcggacggcgcgccgtacgatgcgccgaggctttgcccgctatcagctgcgtcgctaccgcctacgtcgggagctggagaaggtcgggatgctccccgatgccgcactcattcagctccctctgatggagctgtgggagctccgcgagcgggcggctaccgctggtgagcgcctgacgctgcccgagctggggcgtgtgctctgccacatcaatcagaagcgtggctatcggcacgtcaagagcgatgctgctgccatcgtcggtgatgagggcgagaagaagaaggactcgaatagtgcctacctcgctggcatccgtgcgaatgatgagaagctccaggacgagcacaagacggtggggcagtacttcgccgagcagctccgtcagaatcagagtgagagccccacgggtggtatcagctaccgcatcaaggatcagatcttctcccgtcagcgctacatcgatgagtacgatcagatcatggcggctcagcgcgtgtactatcccgatatccttacagacgcattcatccggatgctacgcgatgaggtcatctttatgcagcgcccgctgaagtcctgcaagcacctggtctcgctgtgcgagttcgagaagcaggagaaggtgatgcgcatccagcaggacgacggcaagggcggtcggcagctcgtcgagcgtaaggtcaagttcggtccgaaggttgccccgaagtcctcacccctcttccagctctgccgtatctatgaggctgtgaataatatccgtctgacccgtcccgatggctcgccacgcgacatcacacccgaggagcgtactaagatcgtcgcacatctccagtcaagcgcttcgctatccttcgccgcgctgaagaagctcctcaaagagaaggctctcatcgcagaccagcttacctcgaagagtgggctgaaggggaatagcacgcgggtcgctctcgctgctgctctgcagccctattcgcagtatcaccacctcctcgatatggagctggagacgcgtatgatgaccgtccagctcaccgacgaagagacgggtgaggtcaccgagcgggaggtcgccgtcgtcaccgatagctacgtccgccagcccctctatcgcctgtggcacattctctactctatcgaggagcgtgatgcgatgcgccgtgctctcatcacgcagctcggtatgaaggaggaggacctggacggcgggctcttggatcagctctatcgtctggacttcgtcaagcctggctacgggaataagtccgcgaagttcatctgcaagctcctcccccagctacagcagggactgggctatagtgaggcgtgtgcagctgtcggctaccgccactcgaatacccccaccagcgaagagatcaccgagcgcacacttctggagaagataccgctgctgcagcgcaatgagctccgtcagcccctcgtcgagaagatcctcaaccagatgatcaacctcgtcaatgcgctcaaggccgagcacggcgtcgatgaagtccgtgtcgagctggcacgtgagctgaagatgtcgcgtgaggagcgtgagcgtatggcagagggcaaccgccgtagagagaaggagaataaagcgatcgcagagaagatccgtgagtgtggactcttcccgacgaagtcccgtatccgcaagtatatgctgtgggaggaggctggagaaaagtgtctgtactgcggtcagatcctgacgctgagccaatgtctcaatggggacgatatggaggtcgagcacatcatcccgaagtccgtcctctacgatgactcctatggcaataagacctgcgcctgccgccgatgcaacaaggagaagggcaatcgcaccgctctcgagtacatccgtgcgaagggctgggaagccgagtatatggagcgcatcaatggcctgctagataagaaggcgatttcctacagcaagcaccagcgcctacgctggctgaaggaggatatcccctccgacttccttgagcgtcagctgcgtctgacgcagtacatctcgcgccaagctatggccatccttctgcagggtatccgccgtgtgtccgcgagcgagggtggagtgactgcccgacttcgtagtctctggggctatgatgatatcctccatacgctcaacctcgatcgctacgactcgatgggtgagacggagcgcgtatctcgtgagggtgagacgaccgagaagcttcgcatcacaaattggtcgaagcgtatggaccaccgccaccacgccatcgatgccctcgtcgtggcttcgactcgtcagggctatatccagcgcctcaatcgtgtaagctctgagagcgagcgtgaggcgatgagcggagagatcgagatgcagaaggtgacgaagaccgataagctctccctcctggagcgctggctgacgcagcgccctcacctctcggtgcgtgccgtcagtgataaggtcgccgagatcctcatctcctaccgcccagggaagcgcgtcgtcacccgcggacgcaatatctacctccgtcacggaaagaagtgcgtgcagtcgggactcttagtgccccgtggtccgctctcgaaggagacggtctatgggcagatcactgtcaatggggagccgcagatcgtctgtaagtatgacctccatagcctcaaggctaaggatgtagactacgtcgtggacttggctctgaggaagcgcctgaaggagcttctcgcacagcacggaggtaaggagaaggaagcctttgcgggagatgtgtacatggatgaagcgggtacgcaaggtcccatccgtagtgtgcgctgcttcactgggctggatcgagctaagatgaaggcggtgaagtacgatgagcagggtaaagctgtcggctttgttgccacgcagaataaccatcatctggcgatctatcgtactcctaagggtaagctcgtggagtctatcgtgaccttctgggacgctgtagaccgtgcgcgctatggcatccccttagttatcacgcatccgcgtgaggtcatggagcaagtcctacagcgcggagatgtcccagagtcagtactgagcttactgccaccctccgattgggtatttgttgactccctccagcaggatgagatggtcatcattgggttgtcggatgaagagcttcagcgagcccttgaagcacaggactaccgtaagctcagtgagcacctctatcgtgttcaggcgatctctttaggtgactccctctaccgatatcacttggaaacgagtgttgcggataggaagaacggctctggtcgtatacctaagttttatcgtgttacagggcttaagacttataaggagaagaatatccgtaaggtgcgtgttgacctcctcggacggatctctctgctctgatgctccccttctaccatgatgaagcgaacgatctatatcggcaatcctgcctacctctctctgcgtctcaagcagatagaggtgcggaagccgtcggatgatcgtgagatgacggtacggacgatcccgatagaggatatcggggtcgtcctcctcgaccacccacagattacgatcacccacgccctcttaggggctttgctcgagaataattgtgctgtcgtgacctgctcggcgacgcacatgccttcgggactgctcctcccgcttgacggacatacactccagaccgagcgcttccgtgcgcagctcgatgcttcgctccctctgaggaagcagctctggcaacagaccgtgcaggcgaagattctcaaccaagctcatgccctgcataccgtcttgggagagccagcgaagaatatgcttgcctggtcccgccaggtcaagagtggggatgcagacaatctcgaggcgcgggctgcggccttctattggcgcaacctcttcatctccctccctggcttcgtgcgggagcgagaggaggcggctccgaattcgctcctaaactacggctacgccatcctcagagccatcctcgctcgtgccctcgtcggctgtggcctcctcccgacactcggcatccatcaccataataagtataatgcctattgtctggcggacgatatcatggagccctaccgcccctatgtggatctgctcgtcgtggagatctgcgaggaggagggcttccctacggagctgacgaaggagatcaaggcacgactactcgccctcccgatgctggatgtggagatcgatggacagcgacgcccgctgatgctggcagcaacgcggaccgcgacctcgctcctgcgttgcttcacaggtgaggctcgtcgcttggcttatcccctcttgtcatgcgagccaagcgactaagtgaataccgcatcatgtgggtctttgtcttctttgatctccctacgggtacgcctaaggagcgcaaggcggctaccagcttccgccaagagctgctgaaggatggcttcacgatgtttcagtactccatctatatgcgccattgtgcgagtatggagcaggcgcagacgcatgtgcggcgggtcaaggcgatgcttcccgatgagggcgaggtggtgatcatgacgcttaccgacaagcagtttggtatgatggagcacttctcttcgcgcaagccgaccgatgccgttcagctcccagggctcttcgatatgctgtgagatcttggattggaaaagtagttaagtaaaggaaaagcccgtggatatccacgggcttttctctttctaaaaccttctgctaagtgcttgtctcatagactcctttgcggggtctgctgtattagcaagtgtgaaggtacggaatctgaaagctaatcacaacaccgctcagtaaagggcgaggcgacgaggcgctgtattagcaagtgtgaaggtacggaatctgaaagctaatcacaacgagctatgagcgtagtcttatcctcgacttgctgtattagcaagtgtgaaggtacggaatctgaaagctaatcacaacagagtactatcgccaaacgttaaagtgatcgctgtattagcaagtgtgaaggtacggaatctgaaagctaatcacaacaacgttgcgattgttcgcaagggcagttcagctgtattagcaagtgtgaaggtacggaatctgaaagctaatcacaacgggatagcgtcggcctgcccgagcgttaccgctgtattagcaagtgtgaaggtacggaatctgaaagctaatcacaacctgtaaagctcttctacaacgctctgtgcagctgtattagcaagtgtgaaggtacggaatctgaaagctaatcacaacatagaggtggagataacgtagcgtcttatggctgtattagcaagtgtgaaggtacggaatctgaaagctaatcacaaccgaggaagtcggactgcaggctgtgcttattgctgtattagcaagtgtgaaggtacggaatctgaaagctaatcacaacagacgctgacatttggcgatggtgataattgctgtattagcaagtgtgaaggtacggaatctgaaagctaatcacaacaactacaatgcgcccgcattaccatattatgctgtattagcaagtgtgaaggtacggaatctgaaagctaatcacaactatgaagctcttaacgccctatgaaaaagagctgtattagcaagtgtgaaggtacggaatctgaaagctaatcacagcaagtcgagagtctctgtagagagaagataggctgtattagcaagtatgaaggtacgaaatctgaaagctaatcacagcacatggtgcggcagtaccatgagcagggcggctgtattagcaagtatgaaggtacgaaatctgaaagctaatcacagcacatggtgcggcagtactatgagcagggcggctgtattagcaagtatgaaggtacggaatctgaaagctaatcacaatacttatatagcatagctgatagtcaagacatcctgaactacttaaaagaaaaatagcccttaagtatctcccctgctggaactacaatccagttcagagctacttaagagctatctctttgccacaaagatacactaaataacttcatacccacacaggtcttcgaggagatcaagcaggaggtgcgtgctcgcagcaagacatctattgcttagactctatcggatgagggagactaatcatctctatgtgccgaccagaagttgataaagctatctgggagcgagcttgagtccttccacttgatgatctcaatgatggacctcactgcataatagggaagaaaagcaaagctgaagaacagcccgagtagccacgtcagcaatacgcagatcttgcagaagcccataaataggtcgaaaaagatgctattctccattgtctaattgtcttgggttcactctcgaaggtagtcgtctcctgtgaattccttacccttcaattagtagtagccccagtggaataccgaatcaagaagctaatcacaacagaggcttgtttactactgcacatttggtggttatagtaataggttgttggtccgcgtagggataaaagttgcgtacgagtggcagataagtttgggctacgtacgtggctctaatatctacgtacgtggatatttggatttacgtgcctggtctttaagactacgtacatagatagaagaataccactacgggaaggcgcttttttcttcacgagaaggacacttttccctccgctggataagaggaatactcgcgataagacgaagggcttgtgtatcacttcggagaggtatcatcgtgtaaaccacttctgtcttcccggctgggtattgcttggcaatcggacggggatgtgaagctatataggtcgctgggttgacctatataacttcgcttcgtgacctatattggtcacgccaccaacctatataggttgactctctgaccagtataggttggtagtacttccttcggtcgctgtgtgagagggtccaaggtcttcgccaagacgcggcggtggctgatgctggaagacgtgcgtagaggtggagacgggagtgcgggtggctacggatattgttgcgagcaagtgggggaagcgtttgcgtatatgaagaagttgtattacctttgcaaccgcaacaaagaaggtggcaatactcttccttagctcagtcggttagagcatctgactgttaatcagagggtccttggttcaagtccaagaggaagagcttctcccgagtatgggcgtggtgaataagccccttctgacgctgcattaagtactcttccttagctcagtcggttagagcatctgactgttaatcagagggtccttggttcaagtccaagaggaagagcttagagaaggaattagattcagggagataccctcaggttcaattacgaggacttgggggtatttccttttatgttccctcgtagagagggacggaggttatataacgacagcgcccctgctcaccgatggtgggcaggggcgcttgtcatataggggagtgggacttagagcccgtgttcgccgaggtagcgctcagcttcgatagccgccttacagcctgaggctgctgcggtgaccgcctgacgatagagggggtctgcgacgtcaccagcggcgaagacgccagggacgcaggtgcgtggcgtaggcccttcggtcttgatgtagcccacctcgtcgacctcgacgtagtcagcgaagagctcggagttggggtggtgaccgatagcgaggaagaagccatcgatgggcaggtctacgcgctcttcatcgggctgaccgaggcgcttgacgagatgtgcgccttcgacgccatcttcaccatagaggcccacggtattgtgctcgtagaggacggtgatcttctcgttggctgcgacgcgctggcgcatgatgtcggaggcgcggaggtagtccttgcgcacgatcatatagacgtgcgaggcgaggctcgccaggtagagtgcctcttcgcaggccgtgtcaccgccaccgacgacagcgaccctcttattgcgatagaagaagccgtcacaggtagcacaggccgagacgcccatacctgcgtacttctcttcgtcgggcaggccgaggtacttagcggaagcacccgtagcgatgatgaccgtatcggcttcgacctcgacaccttcctcgaaggtgatgacgtagggagccttagagaggtcagccttcgtcgccagaccagagcgtatctccgtaccgaagcgcagagcctgattgcggaggtcctgggtgagcgctgggccggtgaccccctcgggataaccagggaagttctctacatccgtggtctgcgtgagctgtcctccaggctggatgccttcgtagaggagtggggagaggttggcacgtgaggcatagatggctgcagtgtagccagcggggccggagccgatgatgaggcagcggcgatgttctctactcatacttgcgtagtctatatgtgatggtgatagaaataggagctagtcttaacgcatgtcgcggagcttcttctggagctcttggcgagcgaagaagatgcggctcttgaccgtaccgagggggatgccgagggtatcggcgatctcgttgtacttatacccagcgacaaacatggagaaaggctccttgagtgaaggctgcagctcggcgatagcgcccgtgatctccttgatatccatagagccctcgggggtgttgtgcccgccttcgctaagcagaggtacgttgtaagcgtcgacgttggggtcgatgaagctctgcgtgcgcacgagcttgtggtagttgttgatgaagatattacgcatgatcttcagcacccaccccttgaagttgacgttgtcgacgaacttatcgtagttgttcaggacgcgcagcgtagtgtcttgcgtcaggtcttctgcgtcggcttcgtccttcgtcagcgtacgcgcgaagttcttcatatagtcctgcatgccgatcaggtccttctgtatctgtaatacgtccatgtctgtgatgctctattttgtatagtgaggcggtgcgccgaggggtaatgtggcgagccgtttaatatcttttttacaaagatacgattatttctcccgcagaaagcacgggactttatataggtatattgatatactcaatatagcgcatcaccagcggatgggcgccttgccccactgggtgaggtaggcattcgtctggctgaagtgacggcatccgaagaagccacgatgggctgagaggggggagggatgtggagcttcgagtacgagatggcgagtgcgatcgatcatacttcccttgcgtcgtgcggggcttccccagaggaggaagacgacgtggtcacagctgcggttgatcgtctcgatgatagcatcggtgaaggtctcccagccgaggccctgatggctcgctgccataccggcgcggacggtgagggtggtgttgaggaggaggacgccctgctccgcccacggcaggaggtgcccgtcagggatgatggagggctggccaaggtcggaggcgatctccttcttgatgttgatgaggctcggaggtatggggacgcccgcaggcacggagaaggctaagccctcggcttgccctgcaccgtggtaggggtcttgacctaagatgacgacgcgcactgcagggagggggcaggcgtcgagggcgcggaagatgagccctcctgggggatagataggaccttcgtgctggtaagcctggcggatgcggtcggtgaggatgctgaagtagagcttgtcgaactcaggcgcaagggcggtacgccagctctcgtcgaggcggatgttcatcgtgtagtcgggaagaggggtgggaggtctgcagagaggatctgatggacgaggccacgcaggtctccgtgctgtgcggtgtagaagagggcgtgccctacggcggcgagggcgtcaaggtcattggcaccatctcccgtatagagtgtcgaggcgagcgcccctgcagtccactcctcgaggaaggcacgcttgccctcggcatcaatgataccctcgggatcaagtccgtcgaagtcgccgtcagcggtatagcgtacggcactccctataaaggcggagagcccgactcgctcacagatatcttcgacgaagggctggtaagcccccgtgacgatagccgtggggagggagagctcctgaaggaggagtatggtgtcagtggggagggtgatgcttcggatgaccgagtgaagagcctcacgggagagcccgcgaaggagctcggtgcggtgcatgaagctctcacggaagggtgtggcgcctgccatagccgcttcggtctgggcggtcatctcctccgagcgacctgagagacgtgccagctcgggcagtagctccgtcgtcgtgagtgtgccgtcgaggtcgaaagcggcgtgtgtgatctcggctgtggcgctcgtggaggggaggtagaaggcgctgtgcgtagcgcgtccccaggggatgaggtccgtgaggagctcacggcgtagctccgtctcactcacgcttcgctccgtagggtagctgtagagtctgccctgtggagtatctgtgatacttgcctttggtgcagcgcctatcgtctcagagagaagggctctgagctgcaggtcctctctgtccgtagggcgagagaagagatagaggtgctgcacgtggggcatcgaggcggcgtgagggtatgtgtatataaagcaagagtgcctgacttcgataagccaagcactcttcagtttttagggtggaagatgggattcgaacccacgacacctggaaccacaatccagtgctctaaccaactgagctacaaccaccatataaatgctctgcttttcgcttgagcactgcaaaggtaatactactttctcaattcaccaaacctaccgctcaatggcggcttcgaggtcgtgccacagtcgttcgtcgggtacaggagctgtgagcgtgagggcttccttgctcacggggtgcgtgaaggatatctgtctggaaagtagactgatactcccgccagggttgctacgaggagcaccgtacttcaggtcgcccttgatggggcaaccgagggcagcgagctggcaacggatctgatgatgacggcccgtgtggagctcgatctcgaggagatgatagtgttcgcccgaggccagtaggcggtaggagaggcgggcgagcttggcgccaggcgtcgcagcgccttggcgagctacgtagctcttgttctgcgactcattgcgcacgaggtactgctcgagggtgtcggagtgcttcggcgggcgggcagtgacgacggcccagtagcgcttcgagacgtctcccgtgcggaagagctcgttcattcggctgagtgccttcgacgtcttggcgaagaggacgaggccacccacggggcggtccaagcgatggatcacgccgaggtacacgttgcctggcttgttgtacttctccttgagccaacccttgagggcttcgctcatcggctcatcgcccgtcttgtcgccctggacgatttcgccggggcgcttgctgacgcagaggaggtggttgtcttcgtagacgacggtaggcttatacatacggggatatggggaggggagacttagtccccgatgaaggtgcagttgagtacctcgcggtagctattgaagatcgcgctcttgctgatgaagccgaggtagcgcccttcctcatcgacgacgggcatcttccacgccttcgtctcgtcgaagaggcgcatgacctccgtcatcggggttgctgaggagaccttgacctcgggagtaaccatgatcttacgcaccttgtagcggtcgtagagctcggggcggaacatgatgttgcgcacattatccagctcgacgatgccgacgagcatgccgcgctcatcgaccacggggaaggagttgcggtggctcaccgagatgacgctgaccatctcaccgagggtcatgtcgggggagacgacctcgaagtcgcgctccagcacgctctcgagattcatcagcgtcagtacggccgtatccttctgatgcgtgaggagcttgccctgctctgccagacggagcgagtagatactgtggggcataaagatacggatcgtggcgaaggaggtcagcgacacgagcatcagcggcaggaagaggttgtacccgcccgagagctcagcgatgaggaagacacccgtcagtggggcgtgcatcacgccagccatcagccctgccataccgagcaggatgtagttcttcggagagatgaagacgttgagcgaactgaagtagttcaccagataggagaagatgaagcccgtgagcccgcccatgaagagggtaggagcgaagagcccgccacagccaccgcccgagttcgtcgctacggaggcgaagaccttgaagaggacggtgaggaggaagaaggcgaagacgacccagtaggagttcgagaacgcctcgaagatactcccatcgaggagctgcgtgtactgcccatccaagaggatattcactgagtcatatccttcgccatagagcggagggaagaggaagatgagcagggagaggatagcagccgagatgaggtagcgcaggcggaagtccttgatgcgcttcagctcgctctcgaagcggaacatcgtcttcgagaagtacagcgacatcagcccgcacaccacgcccagcaggatcatcagcgggatgcgctcgatatgataggggtcagtctggatgaactggaagaggatctccttccccgagaggatgtaggccgcggcagcagccgagacggagctgaccaggagagggaggacggaggccatcgtgaggtcaaggagtaggacctcgatgacgaagacgagccccgtgataggcgccttgaagatgcctccgagggcaccagcgacgccacagccgatgaggagcatgagattgcgctgctcgaggcggaagaggcgtccgaagttcgaccccacggctgcacccgtcagtacgatagggctctctgcccctaccgatcccccgaagctaatggtgagggcactggcgatgatggaggtccaggtgttgtggggcttgatgcggctcttacgctgggagatggagctaagcaccttcgtcaccccatggctgatgtcgtctcgcacgatgtagcggacgaagagcaaggagaggaggatccccagcgcggggaagagcaggtagagatagtgatgatcctcgatattctggaggatgaaggtctcgacgacgtggatgatgaacttgatgaaagcggccacaagcgccatcgtcaccccgatgagaaggctcaggatgaggaggaagtagcgctcgctgatgtggcgctctcgccagctgatgaggcggtcgagcagaggtgtgatggcttgactgaa

SEQ ID NO: 3316 - DNA, 20238 bp, synthetic construct
  source 1..20238: mol_type = other DNA
  misc_feature 1..20238: note = Synthetic
gcctacccacttcacttcattaatataggatgaataagctcaaacaaaccttggcgctactctccttcgctaccctctatttggtgcatgcccagcccgcacaagctaccggcttagcacgcacttgggatctgacgatggagagcttcgctaacgaagtaaccgacttcaccctcaccgagtataacgctgccccagcgcctgctcccgcacctgcacctgcacccaaaagacacacgaagaagaagcgatcctcatcggcgaagtatgagggtaagcgctctcgccatgaccgctctcattccagacggacggctggtggctctggcttctcctacgaacgtatggaagtagccgaatctattccctccctcatcaaaacgatcatcgaccatgggcaagagctcttggggctacgctatcgcacctctggtgtagcgaagtggcctctagactgctctggtttcgtgagctatatctgttcgctcgaagggattaagacccctcgttcttctggatcaatgtctctctacacagatcgcatcagtgatccacagcctggtgatctcctcttcttcaaggggcgtaatcgtggtgccagccgtgtaggacatgtagcgatggtgattagcaatgagaatggcgacatcaagatgatacatagtagcaatagccgaggcatcgtcatcgagagtctccagcagagcgcctacttctcctctcgctatctaggtgccggacgcttaccagaagtcaaggagcactgggacaagatctcttctacagctccagcgtcactcaactaacccactctttctacatgctacaagtagaccagctcgccaagagctttggggatcgtctgctcttcagtgacgtcacttttggtatcgagcgagaccaaaaggtcggactcatcgcccccaatggttcgggcaagtctaccctactacgcatcctcctaggccaagaagaagctgatagtggcagtgtcatctatgagcgagatattcgccgagcctatctcccccagctacctgatcttcccgaagaaggcacgatcctcgaagcctgcttcaatcgctttgaccctgtagctcagctcactctccaatgggagcaggcagtagagtccgaggatcatgctgcgatggagcgtctactccctgagatggaggcacagggtgggtggtcgtatgagcagcgagccaaggaaatactcggggctctcggtatccaagatcatcatcgcccgatcacccgactatctggaggtgagcgcaagcgtatcgctctagcaagcacactgatcagccagcccgatctcctcttccttgatgagcctacaaaccatcttgacctcaagagcatcgagtggcttgagggctacctcgctcgctcaaccatgggactgctccttatcacccatgaccgctacttcctagatcgtgtatgcaatgagatcttagagttagacggagggcaggcctaccgctatcgaggtaactatgactactacctcaccaagcgccaagagcgacacgaagccgaagatcaagctcgtgatcgtgccctcaacctctatcgcagagaactcgattggatgcgtcgccagcctcaagctcgtggcacgaaggcgcagtatcgtatcgatgccttccacgagctggagaagaagacccaagctcgccagcgcaccgagcaagtcgatttaggaggagcaaaaggaggctacatcgggaaaaagatcttcgaagctaagcacatcagcaagcgctttggtgacaaggtcatcctagaggacttcaactacatcttcgcccggcacgacaaggtcgggatcatcggagagaatggtgtcgggaagaccaccttcctccgtatgctcctcggtgaagtagctcctgacagcgggagctttgacatcggcacgaccgttcgctttggttattacagccagacagccccagactttgaccccaagaagcgagtcatcgatatcgtccaagacatcgctgacgacttcgtactcccacagggaagcaacatcgagagaatctccgcaagtcagatcctcactcggttcctattcccacccgagagacaatacacgcccgtagagaaactcagtggaggtgaactcagacggctctatctctgcaccatcttagtgacgagtccgaacttcctcatcctcgacgagccgaccaatgacctcgacatcctcaccctacaagccctagaggagtatctcgccgacttcgcaggatgcgtgctgatcgtctctcacgaccgcttctttatggacaaggtcacagagcatcttttctgcttcgagggacagggtcaagtcagggacttccccggtagctacaccctctatagagaagtacgtgaagtcgaggaacgggagcgtgccgagctagagcaggccaagcgcaagacaagcgaacctacaagcccaccacgcacctcgacaaatcgccctgcacggctctcctacgccgagaagaaggaactagagcatatcctcgctcaaattcctaagctggagcaagagaaagccgagctcgaagagaagcttagcacaggtatgcttgcccatgatacactcatgcaggcctccgagcgcatcggtcagctcatcgatgagatggacgaactgacgcttcgccaattagagctggaggaaaaggccagctaatccccttctccaaccctatcccgcttattattcatctactcatataccatagtctatatgataacgacagaccagttaggtagcctactggagcgcaagtctgcgctggggaggtacctttgacgtcgatagtcgacgtatccaactagaggaagaagagctacgcaccgctgatcccgccttctgggaagatcgcgatcgagcggaggctcagatgcgcaaggtcaaggatctccgtaagtggatcgcctactacgatgaagcggagcgactgaccgaagaggtcgctcttgccctggagtatttcaaggaaggcattaccagcgaagaggaagtcgatgaggcttacgcccgtgccatctccctctttgaagaagtggagctgaagaatatgctccgtgccgaagaagatactctcggagccgtcctcaagatcaatgccggagcaggaggcacggagagccaagactgggcttcgatgctcgcacgtatgtatgctcgctattgcgacaagcagggctataagaccaccatcaccaactggcaagacggcgaagaagcaggcatcaaaactatgaccatgcaggtcgagggcgatcaagcctatggctttctcaagagtgagacaggcgttcatcgtctcgtacgtatatctccctacaatgctcaggggaagcgtatgacgagcttcgcctcggtcttcgtcgtaccactcgtcgatgatacgattgaggtggaggtcaatcctgccaatatcagctgggataccttccgctccagcggtgctggtggacagaatgtgaacaaggtcgagaccggcgtccgcctacgctataaatacaaggatcccgagaccggtgtcgaagaggagatcatcatcgaaaacaccgagactcgctctcagaccgacaatcgtgagaatgcgatgcgcctacttcgctcacagctctatgacaaggagctagagcgtaggcgtcgtgcccaagccgaagtcgaagcaggcaagaagaagatcgaatggggcgcacagatccgaagctacgtcttcgatgatcgacgtgtgaaagaccatcgtacgggacaccagacctccaatgtcggagctgtgatggatggagacatcgacgacttcatcaaggcctacctgatggagttcgcagctaaggacgaagcctagccttccctcgctctctgaatgatcccagtagcccctctgctcaaagtgtagtcactaagagcagaggggctacgctatgtcggcacttccccgaggcaagcaggtagatcctaagacttatcccttaggtataaggggcaatgcttcatcccctacccaacctaaagggatcagaaattcccctaggaagacaaacaagatctacgggattgatgtaccccatccgaccttggccgaatacctaatgacttgcccagttcattactaatccctctaaatttcattcgtactgaaataaaacttcgttagtaatgagttgatcaattcattactaaccaaatgagacgatgctaagtatccaccgagagctatgattactcatccctctaaatgtgattctagagatcacgagggttctcacctgagatatgaggcattgagcgcatcatctcccaagctatgaatacctagtaagcaaacgtactttaggctacttcctcccctcacacagaaacaaaatagcggatttacccctgtacttccccgtactatcgggtagctagacttctcatttggcttaccagccgatgaattaagcaaggatagatcgcatattttgactacctttgtgccgattttaaaaggacttatcaatcaattaaagaacaataatgctacagccaattagcaagaccatcacactgcccgatggaagagaaatcgtcatcgagacaggcaagcttgccaagcaagccgacggatcggtagaagtacgtatgggtaacaccgtccttctagccacggtctgtgccgctaaggatgccaatcctggggtagacttcatgcccctccaagtagaatataaggagaagtacgcctccttcggacgcttcccaggtgggtttactcgccgtgaaggtaaggcttcagactatgagatcctgacctgccgcctcgtagaccgtgccctccgccccctcttccccgatgactaccatgcagaggtcttcgtcaatgtcctcctcttctctacggacggggtcgatatgcctgatgctctcgctggtcttgctgcttcggctgctttggctgtttcagatatccccttcaacgggcctatcagcgaagtgcgtgtagcacgtgtcgatggtcagttcgtcatcaaccctactttcgagcaactcaagaatgccgatattgagctgatggtcggcgctaccctcgacaatatcatgatggtcgaaggagaaatgcaggaagtacaagaagctgaaatgctcgaagccatcaaggctgcgcacgaagctatcaaggtacagtgtcaggctcagctcgaactctccgaagctgtcggcaaactcgtcaaacgcacctattgccacgaagagaacgacgaagatcttcgtaaggatgtccacgaagcatgctatgccaaggcttacgctgtagctacctctggcaccgataagcacgctcgtgcggaagcattcgatgcgatcgtcgaagagtacaaggctaagttcacggaagaagaacttgagaccaaggcttctctgatagctcgctactatcacgatgtcgagaaggaagcgatgcgccgtgctatcctcgatgaaggtaagcgtcttgatggtcgtaagacaaccgagattcgccccatctggatcgaaacggattacctcccaggaccacacggatcggctgtatttactcgtggtgaaacacagtctctaacgactgtcacacttggtacgaagagcgatgagaagctcgtcgacgatgtcctgaactatggtaaggagcgctttctcctccactataacttccctccattctccactggtgatgctcgcccacagcgtggtgtaggtcgtcgtgagatcggtcacgggaacctagcccaccgcgcactcaagcgcatgctcccagctgactatccctacgtcatccgtgtcgtctctgacatccttgagtccaatggctcctcttcgatggctacagtctgtgctggtacgctcgctctccgtgatgcaggggtacccatccagaagcctgtatcaggtatcgccatgggtctaatctctgagaacaagggtacgaactacgctatcctctctgacatcctcggcgatgaagaccaccttggcgatatggacttcaaggtcactggtaccgctgacgggatcacagctacccagatggacatcaaggtcgatggcctcagctatgagatcctagagcgtgctcttgctcaagctcgcgaaggtcgcctccacatccttggtaagatcctcgaagctcagcccgagacacgtgatgacctcaagccacacgcaccacgtatcgtcaccctacgtatcggtaaggaattcatcggtgccgtcatcggtcctggtggtaagatcatccaaggtatgcaggaaaagagtggagcctctatcagcatcgaggaagtcgatggcatgggtgtcgtcgagatcagtgcttcaaacaaggacgctatcgatacagcagtcggcctaatcaagggtatcgtcgctatgcctgaagtaggcgaagtctatcagggtaagatctcttcggtcatgccttatggttgcttcgtcgaattcctcccaggtaaggatggtctcctccacatctctgagatcgactggaagcgctatgaaaagatcgaagacaccgacctacaggaaggtcaactcatcgacgttaagctcatcgacattgatcccaagacgggtaagtttaagctcagccgtcgtgcccttcttcctaagcccgaaggctacaaggaaccagagcgtcgtcctcgccccgagcgtggtgagcgtcgccactaacatgtaggattcccgaaacggagccgtaggtgtttctaattatttacttacctttgcagttgtgaagttgtaaaatttggttaagtatgatgactagtagtcgggagtatatagagataaagacgctggggagcaatgcttctcagcgcctctctctttccgattgcagcttcatgtttaatataattctacccccccctaaaataaacagctttttacgaaggggggaagcagccacactgcatggcgatgtgtgccatgtagtgtgcctgctttgttatgtacaatcacaagtaattagtaatttatgaagaaagtagttatggctctctttgcaatccttgcacttgcttcctgtaagaaggaaactcctgagtcgcagcaaggacaaagagatttaatcccccaggggacagagatggagcttaatctatccgctggcttgaataaggaggatgcctcaccccgtagtctagatcatgagtttgttggcaatacctttgtcgctcagcttactgcaggggcaaaagtgcctgtgcatacgtacatttttaatggaaatgatcaggtatatgctgagaccctacagtgggtggtcaaggacgatggtaagacccttttctgtagagagaagatcactctagggaaggctattgatcctgctaaacagacaatcttgaaggcttacatcatagatgggacaaagacttctgatggcattgagataccagcgcatgacctcacaaaggttaagctctatgatgagaatgcatccatcaatatcaatcttccctacgagttgtataacgagctaaagattggtcgagggggaagcttgcataatgtggaatggccaaagctagttaggcagttcaggcctataggggctttggtgcgtatacgtctacgcaatgagttgagtcaggccgtaactgttagtaagatacaaactattgggcaggaatggatacctgttgcttcgacaacgctgcaaactaataatctaggcgtgcctccccttaaatctgacagagagaggcagagccaaagtaacctgaactcccttacaccacgtgagtacgtgatagagggaggcccaatatccttgtctccaggtcagacttacagtaaggtcctcctcttttggacttcttctggtggacaacaagctcaaattgatatcatgcctaatgaagctgttgctactccctactacaccagtacggcagaaaacaaccgtaagactccctatgtactccaagaggaaggagggaaagtgtacggtacggaaagtgcgctacggtatcgtgatggtctgttgcgtagggtaacccttaagctctgcccattccctgaacctctaagccttctctctgagtatgctcttaatagtggtggatcagactttctacatggtgcgagtgacccggctgtaggatacttcaacggtagagaccttatttcctccctcccaaccgtgaaagctccaaagatctatccaagtgggaatggtgctaagtggcatgtgccttcgtgggatgagatgagtgctatcttcccctttgaggcacatctgcatccctcaggtggtatggctggctctaatagtccgctgagagtacaggtgggaaattacaaagctgttgttgctaacagctgggttgcgtatcatggcgacaaggaaatctacagccttgcctttggctcagctaaagagacggcatattatcgacgtcagccagatggtacatttgaaacaaactttactggtgctgctatagagctaagggatgacaagcgatatgcctattatgctaagtacgatgaggcgaagcaggtgtttgtagtcaaatctaagtatgtgggtgtggatcctaccattaaggatgctgaggatgtaaaggcaaaaatagattggacgacacctggcttaacgacacgtactatcccgatgtatggatggaaggagtcggctaccagcacctccaagataggacagcatatcgttagcctccttctgaatcatactcaggccaaacaaggcaccactcagaggataccagggcctccccctgtttttaaatatgaaatcgaagacttctacgtagttcccatggggagatatgctagtggagccttggggcttgaacaggtttctatctcctctactcgtcgctatccagtcttccttgttaagagcttctaattgataagatatgtacaaagagatatatcaacagcctaaggctgagcgcatagagctagcgcatccactaagtatcctcattgacctctctgctgatggtacgataggagaatggggtgatggaggagaagaagactagtaacatcgagtgtaggactcctataaggatgcaattgatgctaccgttggtatgatcaagggcattgttgctatgcctgaggtaggcaaagtctatcagggtaagatttcttcggtgatgccttatgggtgcttcgtcgagttccttcctggtaaggatggtctactgcatatctcggagatcgactggaagcgccgagaagatcgaagataccgatctgcaggaaggtcagcaggtagaggtcaagctcatcgacatcgatccgaagacaggcaagtttaagctcagtcatcgtgctctcctacccaagtccgaaggctacaaggagccagagcgtcctcctcgctaaagccaccagcacttaatcctcctatacaatcaagccccaggcttaccctccagatattatgatggagagtgatgctggggcttgcttttagagggatttcgctatgtacgaaattattccgtactttgtagatacagaacaatacaacaacacataaacattgccactatgaagcagtatatcggtatcctcgtgatgctccttggagcgctccttcagctcttcacctatttctctgatcaggtcgagagcgcaaatatcttccttggcacaggacttgtgctagtcatcgtgggctacctcctccacatcttcctctccaagaagaatgcctagcgagcatcactagctctcagacataaacagacgcaactatcgcttctttatagaagtccatagttgcgtctgttgcttttgatacccatgaaaagcccagctgtcatcccctgccacataaaagaaaacgaggagtgctttcacactccccgctttagatgtttgcacaacggaataaatccttattgtgattggctttcagtttttagtaccacaaaggtaagcaaataacttataactatccaaatgaaaacgaagaaaattctagggcttgacctcggtgttagctctatagggtggtctctcatcgccctcaatgagaaagaagaaccagctgagatcctcagtatgggtagtcgtatcgttcccctatcgacagaagatgcagatgagttccaaaagggagctgctattagcaaaaatagtcgacgaaccctactgaggactatgcgcaaggggatcaatcgctatcaacagcgacgcacccgtctaacaaggatcctccagtctcagggaatgcttcctacccaagaactcatccagctgccaaccttagaactctgggagctacgagcaaaagcggccactgcaggagagaaactcaccctagcagagataggacgggtgctctaccatctcaaccaaaagcgaggctacaaacatgccaagggtgatagtaacccagatgaagatggtaaagggaaaaaagaaaccgactatgttgcggcagtcaaaggacgctaccatgagcttagagagtccaatctaacgatcggacagcactttgcacaagcgcttaagtctagcgaacagatcggcgaacatggaccagtctacacctaccgcatcaaagatcaagtctatccccgcgaagcatatatcgaagagtttgaccaaatcatggaggtgcaatcagccttctaccccgaaaagctcaacaaatcactcatccaagagctacgaagcacgatctatctacagcgccctcttaaatcctgtaaggggctcgtatcctactgtgaattcgagaagaaacaacgcctcgtaaaagttcggttagcggggaaagagggagaagaaattatcaaagagcaactcgtagatattgggcctaaagttgcaccaaaatcctctcctttggcagaagtatgccggatttgggagactctaaataatatccgcatctacttccccgatggaagcgatagacctatctctatcgaagagagacaacgcctctttgaagaactacagacgaccgaaaagctgtcttttagtagggttaagacgctacttaagatcaagaagcaagaagaaacgtggacgaatgaccttctcaaaggtggaatcaaggggaatactacctgccaaactcttcgtaaagccttcgtagattatcctcattatactgagttactcgcttttgacctcagcgagaaagaaggcaatgctgatccagatacaggcgagctacgtctcgtcatcgatgagaggtatcagcagacccctctctttaagctctggcatatcctctattctatcgaagatcgagaagctatgggaagggcgctagaacagcagctcggtatcactcgcaaggatctcgatgcagggctcctagacaaactctttcagatagacttcactaagcagggatatacaaacaagtcatccaaattcatctgtaagatccttccttatctccaaaagggatctatgtatagtgaggcttgcgagctagcagggaagcgacactctgcagctagcttgactacagaagagatcgatgaacgccctctgcttgatatgatccctatcctacctcgcaatgcgcttcgtcagcctatcgtagagaagatcctaaatcagatgatcaatctagtgaatgagctacgcaaacagcatggtgagatagaagaagttcgtatcgagctagcccgagagctgaagatgagtcgagaggaacgagcacaagccaccaagaatattaataagaacaagaaggagaatgagcaaatcgctaagctcatcgaagagcatcagctctaccctacccgctctcgcatccaaaagtacaagatgtggaaagagactaatgagcaatgtatctactgcggtaagcaagtgaatctagtcaccttcctccgaggcgaagaagtcgaagtcgagcatatcatccctcgctccgtactctacgacgactcactctcaaacaagacttgctcctgtaggacttgtaatcatgacaagggaaataggactgccatggagtatatccagacactagataccgacaggcaggatgaatacttcaagcgtgtccaaaagctatttgaagaaaagaagattagctatgccaagcgctctcgtctactcatgacgactgaggacatccctcaggacttcatcgagcgtcaccttcgcctctcacagtatatcgctcgagaagctcagcatatactccgacaaggtatccgtcgagtctatgcttctgaaggaagtgtcacagctacccttcgccacctctggggctatgacgagatactcaaggatctaaacttcgatcgctataaatcgatgggagaaacagaagtgatagaggtaggaggtaagctaatcgagcagatcaaggattggacaaagcgccgagaccatcgccatcatgctatcgatgccttgatcgtggcatgtactcgtcagagctacatccagcgtctcaatcgcatcaactctgctgaagatcgagatgagatgaatgacgctgtaaagggtaagaaatacaaggagaaacaattgctactggaacgctggctcatcgcccagccccatctctccacacagcaagtcaaggacaaagtgtctcagatccttatctccttccgccccggaaaacgaacctactctagaggcaagaataagttcaagcaacatgggaagaccttgactcagctcggaatactcatccctcggggtgccctatctgaagaaactgtctacggccaaatcctagatgggaagggtgtagaacagatcgtcgttaagtatcctctgcatagtatccagacaaaggatctaccctatgtcgtcgacctaggactacgaagactcctagaggagcgactgactcagtatagagatgatcctaagaaagcctttgctgagcctctctacagcgatcgagacaaaactcaacagattcgctctgtacgatgcttcactggaagagaacgagaaaagatgatccctctccgctttgatgagcaagggaaacccatttccttcgtcgcaccagggagcaaccatcacgtagcactctatcgcgatagcgagggaaaggctcatgaatcaattgtcaccttctggcatgccatcgaacgtctacgctatggcctccccatcatcatcaaagatccaacagaagcaatgaagcaggcgcaaagtatccccgatctgccagaagccatccaccagaagctacctaatccagactggaagcttatcgagaccctgagcagtaatgagatgttcctaatcggcatgacagatgaagagatacagcaagccataagtctgcaggactacagtactctaagcaaacatctgtaccgagtgcaaaagctgacgtccaatgactattacttcagatatcatcttgaaacaatgcttgccccccagaataatccgggtacaactcccaagtactaccgtgtaactagctttaagcgctatacgaaactcaatcctcgcaaggtgcgcatcaatatccttggtcagatcacattaatctaatctctcatgatcaagcgcacgatctacttcggcaatccagcttatctatccttaaaaaataagcagctcgaagtaagacaagcgcaagatgactctcctcaacgatccgtacggacgatcccgatagaagatatcggggtcgtcctactggaccatcagcagatcacgatcacccatggtctgctaaatgctttgcaggagaataactgtgctgtcattacctgctcctctaatcatatgccatcagggctcctcctgccactagatggacatacactacaaaacgagcgattccgatcccagcttgaagcatcgctacccctacgtaagcaactatggcaacaaaccattcaagccaaaatcacgaaccaagctcatctcctagcagaggtgctcggtgaaccagtacccaatatgcttgcttgggctaagctcatcaaaagtggagacactgggaatctcgaagctcgagcagctgccttctactggcgtaacctcttcatcacactaccggactttacacgagagcgagaagagatcgctcccaactcactactcaactacggttatgctatcctacgggcgatcatcgctcgatccctcgtaggctgtggtttgcttcccacactgggcattcatcatcataataagtacaatgcctactgcctagcagatgatatcatggagccttatcatccctttgtcgatcaactcgtcgtcgatctatgcaacgatggatttccagacaccctaaccaaggaaatcaaaggggagctcctaagcatacctaccctagatgtcgagatcgatggtcagcgacggccactaatgatcgcagcctctcaaacagcaagctctctcctccgctgtttttcaggagagagcagacgactcagctatcctttactcttatgaaacaccatcaccgcttaaatgaataccgtattatgtgggttttcgtactctttgatctccctacctacacaccactagagagaaaagctgcttcaggctttcggaatgagcttattaaagacggcttcaccatgttccagtactcagtctatatccgtcattgctccagtgccgaaaatgcagctgtccatatacgtagggtcaagaatatgctccccgaagaaggagaagtcgtcatcatgcaagtcacagataaacaatttgggatgatcgagcatttttcctcccatcatcccagctcttcaccctctccttccacacccgtcgagatgttctgataggatgagaattctctcctcttaaagaagaaaagcctgtggtttcccacaggctttttcttttctagaaatcgacctaaccaactgaataacaaacttctccaattggtcaggttgtcttgactagacgaaggtactaaaactgaaagccaagcacaactgtggagattgatatgtttgacgattcggagttgtcttgactagacgaaggtactaaaactgaaagccaagcacaacctctctatgccctgtccacagatggtgtatgttgtcttgactagacgaaggtactaaaactgaaagccaagcacaaccctgcgactgctcgactatctcgcgcaacggttgtcttgactagacgaaggtactaaaactgaaagccaagcacaacgggttcgggagtcggcacttcattcagcgcgttgtcttgactagacgaaggtactaaaactgaaagccaagcacaacgcgcaagcgcatctagcgccaataacataggttgtcttgactagacgaaggtactaaaactgaaagccaagcacaactcatcagcaaagatcgtttaaggagaaacgttgtctcgactagacgaaggtactaaaactgaaagccaagcacaacctaggctctactgcgttaatggtgctagggttgtcttgactagacgaaggtactaaaaccaaaagctaagcacaactcggcacgaagacaagaaaaaacgctgtaaaaataggcacttacagcagttttcaatttcaaaaagggcgcatcagcggacgattatgttgtttacagtcacaaaaagcaccgtaccatataggaaactttgtgtaccttcgctgtgcaacaagtacaacaaagtacacttaaggcaacatctactgctacactaagaaagtaaaagaccaaatccgatctcaggagtaagcctccttgtcgaaaacaaggagcatcatcaccctcttcgttgttggcttcaaatacctaacgtgagcaatgagcaagcacaatacgcaaagaagagccttctacaagaacaagaagaccgaccaggtctactggatcgaatccgaaaatcttgggcaatgcctcttctcttttgacaaaaagaagatctataacctcttcgcagactacccccacaacctatctgctaaggaagtagccatatttgacaaggagaacccctactgggcgaacttcttccgagacagaaaggggtagctatttctttccgcctcgtttccctttctgctgattaatcggtttggtattgatgtagcctagcatctcaccaaaccgatcgtccattccgtgtcttgactagacgaaggcactaaaactggaagccaagaataacaaagagatgatccttagcaatatccgtacccgaactgcaatcaggattaaaaattatcttgacaaaggtgctaaagctgaaagctaagaacaacttacagagaagtgactcatttactgctagctcatgattcttgagtttcgtgaccattcgatctaacaaattagaatcatcacgctatatcaaaatatagtcttacatttgttgtgcgagggactccgtatggggacgtcgctccgcctcgcccactttccatcattggttgagtgggtgaggccttttcattacgaacccaccttaggctctcctccgagggcaataagtagtatgcaatctacttgaccttctcctcctctcttggcatctatcgacataatacagtctgtagctctgcattgaatccatcgcaacgctcatctctttcttactactaatcatttcacccattcattactaatcaaactccggattcattagtaatcctagttacattagttactaatcacctaaagcctcgattcatacaataggccaaagtactcagagagcaatcaactaatataaaagaaacctccctaaagtctacagtaagcggactctagggaggttggttttagtaagcgtcggtatcagctcaccaagagcaatacctaggcttagttatagaagaggttatcctccgaagtcatcgaagaagagctgtgagcgctcaacaccgagattctcaagcatcaccttgacggcattggccataggaccaggaccgcacatgtagtactcaatatcttcgggagcatcatgatccttcagatagttatccaagataacctgatggatgaagcccgtatagcctgtccagttatcctcgggctgaggatcggagagggcgatgtggaagctgaagttggggaactgcttctcgatctcacggaagtcttcttcgtagaagatctccttcttgcttcgtgccccgtaccagtaggataccttgcggctcgtgtggagcgtgcggaagagatggaggatctgtgctcgcagtggcgccatccctgcacccccaccgatgtagagcatctcagcatccgtgtcctggatgtggaagtccccgtaaggaccgctcatgcggaccttatccccaggcttcagcgagaagatataggacgaggagataccaggagagacggggagccacttgtgcgtaacgcggtccataggaggcgtagcgatacgtacgttgagcgtgatgatatttccttcggcggggtagttagccattgagtaagcacggatggtctccgtgtcgttcttacacgtcaggctccacatgtcgaagtgatcccagtcgctacggaacttctcgtcgatatcgtagtcggcgtacttgatgtcgtagggagggatggtgatctgtgcgtagctaccgctcttgaagttcatcacttcaccttcgggaagcttgacgacgaactccttgatgaaggtcgatacgttacggttcgatatgacctcgcattcccattccttcacaccgaagacagactctggtacaatgacctgcatgtcttccttgaccttggtctggcaggagagacgccagtgctccttctgctccttgcgagagaagaagcccgtctcggtaggtaggatctccccaccaccctctacgacacggcaacggcactgaccgcaggagccactaccaccgcaggcggaggagaggtagatgttctgaccctgtagggtgttgagcagagtaccgccgatgggtacctctagttccttctcgccattgacggtgagcttaacgtttccagagggtacgagcttgctctttgcgacaagcaggatgaccaccagaaggagtgtgagcaggaggaagaccccgacactcaccagtataatggttgtgttcattatgacttatatacctgatctatgttagttcgcctctacccctgatggagcttgggtagcctcaacttgctctgtctggctctgctgtgccttgtcatctgcagcctggagcttaaccccagagaagcttaggaaggcgatacccatcagcgccgtgatgatgaaggtgatcccgaggccacgtaggggcttgggaatgtctgagtactggatcttctcacgtatggcggccataccgacgatggcaagcatccatccgatccccgacccgaagccgtagactgtggcctcaccaataccggggaactcacgctgctgcatgaagagtgatcccccaaggatggcgcagttcactgcgatcagtgggaggaagatcccgagtgaagcgtagagggaggggctgaatcgctcaacgagcatctcgacgagctgcgtgaaggcagcgatcaccgcgatgaagatgatgaacgagaggaacgagaggtcgatccccgaagcctccgcacctagtagccactcgagtgcgccctgcttgaagaccttggtctcgagtaggtagttgatcggtagcgtgcaggtgaggatgaaggtcaccgctatccccagtccaaatgacgtcttaacgttcttcgatactgctaggaatgagcacatccctaggtagtaagcgaagatcatgttatcgataaagatcgacctaaagaataaggctaatgaatccattctttcttagttctatttgtcgtgggagattagttttcctgtagctccttgttgtaggagcggtgtatccatatcagtacggcgacagatatgagagccatcggggggaggatcataagcccgttgtttacgtagccgtggataccatccgtagcgtagaagctctgagggatgatctgatagccgagtagcgtacccgagccgaagagctcacggaagaagccgacagctaccagtacggcaccataacctagaccattaccgatcccgtcgaggaaggactcccaggggccgttaccaagggcgaaggcctcaaggcgtcccatgaggatacagttcgtgatgatcagaccgacgaagacggagagctgcttgctcacgtcataggcgtaggccttgagcacttcgctcacgatggtcaccagcgtagcggcgacgacgagctgtacgatgatacggatacgattggggatcgtcttacgtagtagcgagatcacgacgttcgagaaggctacgacgacagtcacggagagagccatgacgatcgagggctcgagcttggaggtgaccgctagggcggagcagataccgagcatctgcaccatgatagggttgttcttgctcagtggccctacgagtgtttctttattcttcttgttccagagtgacatggctactgggcgttataggttaggagaaactgctgaaagggtgcaagcgaggctgcgagcatatcgtggacaccgttgctggtgagggtaccaccagagataccatcgacgtagtccttgtcctcggcgacctgtccactcttgacgacagcgatacctgtgaagacaccttcacggaagatctgcttgcccttgaactgatcggcgaagtgtggggtggagatctcagcacctagccctggggtctccccagcgttaccgaagtctgcacctacgacgctggagtggtctgcggcatcgatggcgatgtagccccagatcttattccagagaccagccccgttcataggcagtacgtagatggtcttgccattcacctctgctatgtagacgggtagggggcgcttctcgcccttggctatgagcttgtagtcgagctcggtgttagccctgaaggcttcgctctgtccgatctggtcgccctcagctgtggagacgacctgcccatcagcattgaccatcagctccttcttgataaggctcttgtaggtcgggatgacgttagccttgtcgggggtctgccctagggcacgtaggatctgctccatcttgtcgatgttggcattctcctcctgtgaaggcttgagtagtatattggcacctgccagtagcacggcagccaggatgaccatcacagctgcgtagatgatcacgtatgaattcttatctctattcatcttcgtagcgttgtgattagttctttgccttggaggc

SEQ ID NO: 3317 - DNA, 19065 bp, synthetic construct
  source 1..19065: mol_type = other DNA
  misc_feature 1..19065: note = Synthetic
tacttcagctagacgatagacgttagcttcacgagcgcggtagtcaccacccttgatcgtatcatagaagagacggtagacagagtcaccatcattctggtagttcttagcagcattgatccccccctgcgcagcgatcgagtgtgcacgacgaggagagtcttggatacagaagttcaggacattgaatcccatctctgcgagcgaggctgcagcagatgcaccagcgagacccgtaccgacgacgataatgtcgaggcgacgcttattggctggattgacgagcttctggtggtctttatagtttgtccacttctcggctaatgggccggcggggatcttagaatctatctgtgacataatatggatagggctaataacggatcgcttgcttatgcgctaagtctaggactaaaggctacaagcacccccgcagagggaacggaagaagtaacacaccacgacggctgcgaagccaaggatgatgatagtggcatagatgttcgagatcttgtgcagacgatcgaaccacaccttgttgttgaacccgatggtgtgtagcgagctccagaagccgtgggctaggtggaaccatagggctcccagccatacgaggtagagcacgacgaagatggggttagagaaggtgtagcggatgaggcctgcgccatccgtaggacccgtgacaccactgatcccgaggtcatgctgccccgtgatctctgctagctgcatcttggcccagaagttgaagaggtgtagggcgagcccgaggatgaccacgacccctagtgccatcatgttctgcgatgcccactcgacccccttggggcgatcgaccacctcgtagcggtcgttaccgcgcgcccggcggttctggatcgttaggatgaaggcatacacgatatgtacgacgaagagcagagcgagccctaccgtcgccaccagagcgtaccagttcgcaccgaggaactcacagacggcattgtacccctcctcagagaagagcgccacgagattcatcgacatgtggaaggtcaagaacaggataagagccagccctgagatactcatgaccagcttacgcccgatcgaagatttgattaaccacgacatacaagttctattttttatgatctgttgatacacatgacacatggccatagagacggagactacagcctccacccttcgcgctccctgataaagtcctcctctagggtatccctatcgctctacaaagatagctcaattaggtatatcaagtactattattagcgaaaaaaaggcataatcgtacgaactaacctcccaatatgtaggtatagataaggtataaatcggacttgtgtacccaaatctctacctaaaaggagctaaccatatcgctgtatatcacgtcccctgctccccgaaggagcctacgggatgacgtgtgaagacgctagagcagagggctggaggtcaaggtcgggggtgtcaaggtgcctcccccagatacggtgcatctgtcccctagggggcgacttaccctagcgtacacctatgcctgaggagggtggagtatacacgtgtgtacactatagtatacccacgtgtacacactagtgtacacgcgtgtacactcatgcgctctcggtatgagccccagagggtgctctaggaggggataactatagagggtagtactagcgctacagagctatgagtgagggactctcgggtatacaatgcctcccaaggaggggcatactggaggggtatgtgtgcagcctctggcctacgtcgtagcctctgaggggcgggtactccaggggcaacaggcgcagagctgctggctacagtagtggcgatgtagatagagtagggcttggctgtccgaggcggtctctacggggagccccgccgaggcgaagagacgtgtgatgcgattgctctctgccgagagtccgtccagcagggagaggggagcgtactcctctccttcgcccccatagtgtcgcctccaggtgaggcgataggggataaggacattgatgatcagtagatcacagctcgccggactgaggatgctactggtgtctccctctccctcttccctgcgatcctctcgggagggacgaaggagctcataagcctctgttaggctgtccacacggaggctctcctcggctaggctctccctctggcagagcagtcccgctagctgtaggaggcgacgctcggggaggttgctggggcgggtacgtgctcggcgaaatgtacccggagggaggggactcagggtatacttgtgggagaggaagtgatattcgcccctcaggagctcggtgtgctccccctcggcgaggtagccgagcagaccggcctgccccacgagtagagcctcgacctgctcggggtgatcccgatgcttcatcagcgtggtgtagggcaggctgagggcgagtcgctccatagactcgctattgagcccgaagccatagtagcgcaggagtagggtgtagaaggtctgtccccagtcccctccacagcgctgtaggagatcctcgacggcctgcaccttctccctgagccgactatgtaggaggcactggagccaggcacgacgagcctcgtgggggagctggccgagaggggctagtcctccccctagggtgacgctctgggtgcaggggagtgctgtgggggagcattctcggggggcgtcctcgccctccagttgatggggtaccatgagtaggcaagtcgggagcgaggctccgctggctagagcgatggggcggttgtcctgctccacgacgtgtaggatcaccgagtggtaggcgggatcactgtcgtggtggtgatggtaccactcggcagaggcatggtggatctccacacagcctacccagaggaggtcattgatgcgtatcttagcggcaaagaagtccgggcctgcatctgtatttagctctccgggctccagcacctctatgcgagcccctgcgagctcccctgtcgggatgagtcggtcgtagaggccatagcgccagatgtagtgtaggtaggcttctcggtgtctcatggtggtcgtcggtcgtcgggggggaggtcagtcggtgagctcgtcgtagggggggatatgctcgaggaaggtatagctcccctgctcatagtccagccggcaggcgaagtgctccagaccattgctgaggatgaggtaggggacacggagcgtatagttgtagcggaggatctgctggagcactcggtcggtgatgcggatgtggggagccttgtactcgatcagtactcgaggggtgagctgacggctatagagtatggtatcacaccgcttggtcgtcaagccgacctgtatggtcacctcgttcatcatcagctctcgggggtagcctaggtgctccatcaggtagtgcacgaagtgctggcgcacccactcctcgggggtgagagagacgaaccgctggcggaggtcatcgtggatgtagggcttaccctcttccttccggagtcgtagacggtaagccgggagatttagcttgatcattcttatctttgtcgtacgtgtcccctagggcacgtccacgaagttagacaataaataccgatatggctacctacgatgatatcgccaaggcgatcaagaagggggcactccagcccgtgtacctcctagcgggggacgaacccctctatatcgaccgcctcgccgagctcttcctggcgaaggtcatccccgaggaggagcgggacttcaacctcaccgtcctctatggtgcagaggtcacgagccgagacatcctgctcgatgctctgcgcttcccgatgatgggggagcgggtcctcgtccttgtgagggaggcgcagcaggtgcgagacctcgaccagatagctagccacctagatgacctaccgcagagtacctgcctcgtgctctgctacaagaagaagcccgacaagcgcaagagcctctacaagaccctcaatgagcgcaaggccgtctacgaatccaccaagatctacgattccaaggtccccgacttcatcgtgcgtaccttcgccgagcaccatctgacgatcgaccagcgcacggccttcctcatggccgaggctacgggtaacgatctggagaagatcctaggcgaagtcgggaagattgccctagccctcgaggggaagagtaccatcgtgcgccccgaggatatagagtactatgtgggggtgagcaaggagtacaacaactttgagctcctctccagcctcatcaagcgggactcagctcgtgcctaccgtatagccttctacttcgcagccaacgagcgtagtcacccgatccaggtcaccttggctacgctctttggcttcttctccaacctcatggcggtctactacatcccccagcccaacgagcggtcgatagccgaggcgctgaagatctctccctatgcagccaaggactatgacctcgcccgccgtagctataccgctagccaagtcttcgccatcgtccatcatctgaggatggtcgatgccgcctccaagggggtcgatgcctccctgtcggcctcggagctctacaaggagctcgtctccctcatcctcaccgcctagtacccctcagggcgagcgctatcccgccctaggtctaccctacagataactaaagaggctacctcccagtcggggggtagcctctttatctggtaggctatacgagatagcctagtggatcaccttaggggattagcgacggatgccgagttccttgatgatggcacggtaacgctcgatgtcgatcttctggaggtagtcgagcatacgacgacgcttaccgatgatcatacgtagcgcacgctgggtgctgtagtccttcttgttcttctgtaggtgacccgttaggtgggcgatacggaaggtgaagagtgcgatctggctctcaggagacccagtgtccttagcgcccttaccatgcttttcgaagagctcggccttcttagctgaatcaagatacatattacttgtacttattatagtgaaacaaaataccgccgtcgcaagctatccctaccatccctcacagggaggaggaaagacagacgacgcatcggatcgtggcgcaaagatacaaagaaagaaggagataagccccccgagggctactccgtggcgaagatgagggtctcggtggcagaggtcagtacacgatgcttgggggctgggcggtgctgcggatgggagcgtgaagagtaacttgtgaattagctgggaagtcagtaacttagcccgcgtaacgaggagacctcaaggactggtgcatacgggcacaaaaaaaagacgaggaccgaagtccccgccttggatgttttcacaacggaataatccttattgtgattagcctttcaaatcagtaccacaaaggtagccaaaatatttataatccaaactaaacgcagagtacaatggcgagaaaagtacttggcctcgacctcggtgtcgggtctatagggtggtgcctaatcaccctagacaaagatgagaaaccacagagtatcctaggtatggggagccgtatcgtgcccctctctacggatgatgccacggaattcactcagggaaaggcgatcaccaagaacaagatgcgtacggtggcacgtaccatccgcaagggtatggaccgctatcagctacgccgagaggctctaaagaaggtgctccgtgagcatgggatgctccccgacgagtccctcatcaagctccccctactcgagctctgggagctacgggcacgagctgctacccgaggagagcagctgagcctcacggaactgggacgcgtgctactacacatcaaccagaagcgaggctacaagcacgcaaaggctgatgaagctgccgaggctgaggccgagggcaagtccaagaaggaaaaggagggctatgtagctcaagtcaaaggacgttaccaagccctgaaggagaaggggcagaccatcggtcagcacttcgctgaggagctaagggctaatcaacagactgcccccagaggaggagtctactacacctaccgcatcaaggagcaggtctatccccgtgaggcttacctcgaggaatatgaccgtatcatggcggtgcaacgagagttctatcccgagatcctcacggatgaactaattcggaggatacgagaccgcatcatcttctatcagcgtcctctgaagtcgtgcaaacagctggtctccacctgtgagtttgagaagaaagagcgggtcgtacaagtgaagcgcatcaataaggatggtgtcgaggagctcgtcgagagaaccatcaccattggccccaaggtagccccaaagtcttcccctatctttcaggtctgtaaggtctgggagtccatccaaaacatccgccttttctatcctgatggcacagagcgagtgctggaacaagaggagaagcaaaagctcttcgactacctccaaaagaacgataagcttagccttacggctcttcgcaaggtactcaagattaagccaaaggagaagctctggtgtgacaagctactcgagaaggggatagcagggaatactactgcagctatcctgcgcaaggcgctgaagggatatgagcagtatgaaggtctacttaggttcgatctgacgataagggatgggcataaggctgatgaggatggtgttattcgccccatcgtcgatgagtcttatcaaaacgaaccgctctacaagctctggcatatcctctactccatcgaggatagggctgatatgtatcgtgccctagtcggacagctcgggatcaagagagaagacctagacaatggactgatggatgccctctataagatagacttcgtcaagcagggctatgggaacaagtctgccaagttcatctgtaagctccttcctcacctccaggagggtaagatgtacagtgaggctgccgaggctgctggagtacggcactccgatagtatgactgctcaggagcgagatgagcgtagcctgctggaggaaatccctctcctgcagaagaatgccctacgccagcctgtagtcgagaagatcctaaaccagatgatcaacctcgtcaatgcgctcaagagggaacatggtgagatcgatgaggtacgtgtcgagctcgctcgtgagctaaagatgagccgtgaggaacgtgaggaggccactaagagcaataatgcacgtgaaaaggaaaacaaggatatcgccgaggatatacatctgaagggggaaggccttactcccacgaagtcacgcatccagaagtatcgcttgtggaaggagtctgccgaaagctgtatctactgtggtaagcatgtagatctcgtgcagttcctccgaggtgaggagatcgaggtagagcacatcataccgaggtcaatcctcttcgatgactctatgtcgaataaggtctgtgcctgtcgcacttgtaaccaagagaagggtaatcgctttgccatggagtacatccagtccaagggatggaagcagagctatattgagcgagtggatagcctcttccaaggtaggaagatatcctactctaagcgtcagcgcctcttgatgttgcctaaggatctacccgaagacttcattgagcgtcatctacgactctctcagtatatctcccgtgaggcacagggcattctccgtaaggggatacgactggtgagtgcctctgagggcagtgtcactgctaagctgcgtcagctgtggggctatgacaatatcctgcgagacctcaacctagatcgatacagatctatgggcgagacagaggtcgttacggtagagcatcgggatggagagcgcaccgatgagcgtatcaaggactggtctaagcgaaaggatcatcgtcatcacgccatcgatgccctcgttgtcgcttgtactcggcagagctacatacagcgactcaatagggtgaatgcagaggctgatcgtgaggagatggatgcattcatcagggagcaacagcaaaagccgactcattctaggggagagaagctctccttactagagcattggcttatccgacagcctcacttcacgaccggagaggtgaaggggcaggtagataagatccttgtctcactccgcccaggtaaacgcaccatatcccgaggtcgtaatatctacaagcgttcgggtaagaccgatgtgcagagaggggtacttatcccacgaggagcactctccgaggagaccatctatggtgtgatccgcgtcgatggagaggataaggtcgtatgcaaatatccgctccagagcctgaaactcaaagatgtcgaatacatcgtagacgaagtactgcgcgaaaaggtcagagagcgtatcgagcagcgtggagagaaggaggccttcgctgaaccgctttatttcgatgaggcacagacgcaagaggtgcgtagtgtccgatgctttacgggtaaggatcaagccaagctcatacccctcagatacaacgatgagagtgaggcggtcggctttgtcgccccggggagtaatcaccatctagccctgtatcgggatgtggacgggagattggtcgagtcggtggtcaccttctggcaggccatctctcgtattcgctatggcttacctgctatagttacccacccgagggaggtgatggagcaagccttctccatacccgatctccccgaggaggtcctaggggcgctccccaaatctaggctacgcttgatggaggtgctacgtatgaatgatatgttcctgatcgggatgaaggatgaggaaatcgaagctgcgatagaaggcgaggactatcctacgctgagtcgccacctctatcgggtacagaagctttcatctatgtcttatgtcttccggtatcatctcgagacagaagtcaaagatgagaagaaggcaggaggcaaagacgaaaaagaggaagaggtgaaaattcctaagttctatcgagttcagagtatgaaagcatatgtgaagcttaaccctcgcaaggtgaagatagacctcctagggagaatatcccttgcctaagtcaatagcctagtatcatgatgaagcataccctttacttcgggagccctgcctacctcgcccttaggaataagcagatcgaggtgcgtcagccctgtgagggggaagctaagcgtccagtacggacgatcccaatagaagatattggggtcgtcctactcgaccatcagcagatcaccatcacccatgggctcctgcatgcactcctggagaataactgcgccgtagtaacgtgttctcctagtcacctgcctgcggggcttctacttcctctcgatggacacacactccagaatgaacgcttccgtacacagctggaggcttcccttcccctgcggaagcaactctggcaacaaaccgtgcaggcaaagatcctcaatcaagccacgctcctcgggcaagtcctcggggaacctacaaagaacctacttgcctgggctaagcaggtgaagagtggcgactcggagaacctagaggctcgagcagcggccttctactggcgcaacctcttcgtctctctgccaggcttcgtccgagagcgagaggaggctgctcccaacgccctcctcaactatggctatgcgatcctaagggctatcgtcgcccgtgcactcgtcagctgcggcctcctcccgacgttaggtatccaccatcacaacaagtacaacgcctactgtctagcggatgatatcatggagccttaccgcccctatgtggatcagttggtcgtcgagctctgtgaggaggagatccctacggtgctcaccaaggagctgaaggtacagctcctctccatccctactctggacgtcgagatagagggacagcgtcatcctctgatggtcgctgtttccctgacggcgggctctctactgcgttgcttccagggggaagctcgtaaactatcctatcctatactccgatgaaagcaagtcgtctaagtgaatatcgtgttatgtgggtctttgtattctttgatcttcctacctatacgtcgctggagcgtaaggcggcctcgggcttccgacagagcctcctcaaggatggcttttcgatgtttcagtactctatctatacccgccactgtgctagtgccgagaatgccgctgtgcatgtgcgacgggtgaagagtatgctccccgacgagggtgaagtcgtgatcatgacgatcacagacaagcagtttgggatgatggagcacttctcctctcactgtacgacgaaacccccagaagcgcctcctccccttgatctcttccctgacgaagatatttttctcctctaaccaaaggaaaagccggtggtactccaccggcttttctctttctataaatcttcgtaagctactcatgcctagtctactatacgtaatcagttgcattagcgatacgaaggtactgaactgaaagctaatcacaactggtcaaggcgtcgcttctagcggtgcgcagttgcattagcgatacgaaggtactgaactgaaagctaatcacaacccctaatcgtcgctctgtcagcggacactcgttgcattagcgatacgaaggtactgaactgaaagctaatcacaacaatagaggctcactttggtgaaaaacttccgttgcattagcgatacgaaggtactgaactgaaagctaatcacaaccatacgctcagaaggagctccttatgaagagttgcattagcgatacgaaggtactgaactgaaagctaatcacaaccaccaataaggctaacgctcttgcccagcagttgcattagcgatacgaaggtactgaactgaaagctaatcacaacagtactcgttaataacgacggctcgtgcgtgttgcattagcgatacgaaggtactgaactgaaagctaatcacaaccagaagacgatagtcgtgcaggtgttgtggttgcattagcgatacgaaggtactgaactgaaagctaatcacaactttttgggatggaactatgtaacaacataggttgcattagcgatacgaaggtactgaactgaaagctaatcacaacgaaagaagcggtgtataagtctttgcttacgttgcattagcgatacgaaggtactgaactgaaagctaatcacaacaggcacggacacaaccgtcggacaaattttgttgcattagcgatacgaaggtactgaactgaaagctaatcacaaccaggacacgtcggcggtctagacctcgagggttgcattagcgatacgaaggtactgaactgaaagctaatcacaacaactgcgttgtcatattgctctcttctggagttgcattagcgatacgaaggtactgaattgaaagctaatcacaacttatggcagaattcgagcgtacacacatgcgttgcattagcgatacgaaggtactgaattgaaagctaatcacaactgtttgcgatggagttgtgcaacgacatagttgcattagcgatacgaaggtactgaattgaaagctaatcacaacccgcttgttggacatgctcggctacggtgtgttgcattagcgatacgaaggtactgaattgaaagctaatcacaactgccctctcgtctagtcgtcagcgacgatgttgcattagcgatacgaaggtactgaattgaaagctaatcacaacaaaagacagatagctttcccaaacaacgtagttgcattagcgatacgaaggtactgaattgaaagctaatcacaactcagaaacagcaagtcgaagctaatatcggttgcattagcgatacgaaggtactgaattgaaagctaatcacaacccccgcggagcggaatactgtcactccaccgttgcattagcgatacgaaggtactgaattgaaagctaatcacaacagtgctcgtcgtgcagtgggtagacgatcagttgcattagcgatacgaaggtactgaattgaaagctaattagaaccgaaacactctcacattatgcggactctgggacgtttaaatgggagaataatacactatgggatggttcggataaggaaagactaagacaagagatggagtggataggacaacggggcacaaagatgagagccctcaaaatcgaagggcagacaatttacctcaagattgtagagtaaggccttcaactgtaatgtcgagcaagaaaactagggaatgcaatcttagcttcttgggtactctggtaccctttcgcaaatcgattaaagagtaacgccttcagtgatgtgggtataaagatattgtcagtgctgatatgtaacctgtgatagtcagatagcatatcttcacttgtgcctgacatcacccagtgtgactcatagaaccaaagcatatccttgtcttgatccatgccttcgtatgggctctcttcctctcccttatagtatctgcactgcttgattagttcttcctttgtaggcatatctcaaaattctcctctaagttctatttcttattctttttttcgtcttatttcacccttccgcacttcacacagctttcctatgtaggggcaagcctccgtacttctatacgcccagagagtgtggatggacaccccaagatcatcaggggtacaagcctcgtatatagaagctatcgagccaaagtggtaataccttctaccatatgctgcattagcgatacgaaggtactgaattgagagctaatcacaacggtacggccatcagaacgaccattctaccgctgtgttagctatataagggtactaaattgaatgctaactacgaacaaaagtcgtctctatcgtgatgcttggtgatgactactaccttatgggacgggtattgagctccgtctagccctctttgattacactgtgtgatggaacacaagtagtcagattacattgtcaggataattggttacctttgtgtcggctcgaaagagttagagatgcgggtaaaactgcgtaccgattcctgaggcaggcatcaagggtgcttgcctcttgtattttatagctctcgttgtacttgtcatcttcgtagtaataggagatacgcttgtctggaaataactatttgcggtacccctagagctcttactagctcttctgactttctcctatttactcctgctctgtgacgacataaccacctgaggtatcaatatcagtatacactcagctgcattagcgatacgaaggtattgacgtgagggctgatcaccaccgacgagggggacttttttctccgtgtgtaatttgctctgtaccagacacggggagagggccaaaacgctcttaccgagagcgcaagtgcgctctcggtaagagcgtccccatcaccttacataggtgatgggagcgttctttataggagcgtaagaggggtcttagtatgttcgtttgtagcccctcggtatgctgagtaggaaggggtgcgatatgtcgcagtgattcggggaattagccctgtcaatcttcctaggattatctaccttcgtgctgtggctatctctattctcgtggagtggggtgtcgtcatgggtagctctatcctcgtatgggtgtctgctatcgctaccttcagtagcatggggtagggggaagtattcccacggggaaggagggttggagggatagcctacggggaagggtaggggcgaatgccctatctttgcgctcgtgatctatcctgaggggtggattgttcagtaagtctatggatacagctcatctcatcgctccactgcaggagcgtatcgcccgtagtggtctctctgacccacgcatcgctgtcctcgtctctggcggggtcgatagctccgtggtcgtgcacctgctctgtacggcaggctatcgtcctaccctcttctatatacagataggtatggaggagcgaggcttcacggactgctcgtgggaggatgacctagagatcgtgcgtcacctagcccgtcagtatgactgtcccctagaggtcgtatccctccatgaggagtactgggcgagtgtcgtacagtacacgatagatacggtgcgccgagggctgaccccgaaccccgatatgatgtgcaacaagctcattaagttcggctgcttcgagcagaagtgggggcatgagtacgactttatcgctacggggcactatgctacgacgaccttcgtcggggagcatctcttcctcgctactgcacctgacccggtgaaggatcagacggacttcctcgcacagatcaacttcgcacagattcgtaagctcctcttcccctcgggacacctcctcaagagtgaggtacgagccgtcgccgagtcagcacacctcgtcagcgcaggccgtaaggatagccaggggatctgcttcctcgggaaggtgaactataatgagttcatcgagcgtgccctaggtacgaaggagggactgatcatcgagcgggagacggggcgtgtcctcgggaagcatcggggctattggttccatacgatcggacagcgcaagggcttggggctaagtggaggcccttggtttgtcgtcaagaagaacatccgtcgcaacatcatcctcgtctctcagggctacgacccacgagatcagtatggacagcatatagagatggagggggcggacttcatcagtctcgatccctggagctatgctcggctcgtgagcacggggatagatgcccccgtagcggaggccgatcgagagccgatcgccatcaccttcaagatccgtcatacccctgagttcacccgaggcaccctccactatgatcccactcgtggctatcgcatcgatagcgagcaggagatacagggcattgccccggggcagtatgccgtcctctatgatgaggggcatcgcatctgcttcggtagcggtatgatcactcggggctactgaccccaagccgtaagctcttccttttccccctccgtggggagaccataaaaagaagcgaaggctctgtgcaggataccgcacagagccttcgctccttttgttacttagcctctgggtagggggctagtagttgtgtgactcggggttctgtacttccttcctcgtgatcttgtgcaggtcgagtgctcgccaagcatagatgatatatgctaggacgaaggggatgagtagggaaacaaagctcatagccttgagggtaaaggggctggaggagctattgcggatattcagcgagtggtggatgagctcgggcatatcggcactgtaggctgggtagtaggaggtgttgttccatccagcgatgaggaagagtgcgagtgccgtgagtaccacacctgccccctcgagccagatccccttcctgtacccctcccgcaggagcgtcagcaggatacctccgatgacgaggagcaccccgatgacgaagataaggaagacgatgggcatctccacgagattgtaccagtacttgtagtccacgaggtaggttagctcggggttcgagggggagtaggcaaagcccttcttcgtcagtaggaagaagaggtaggcgaggaagagcagtaggaaggctgctgcattccatgccagtgcactgcgtgaacgcttgtagatcgtctcgtcctcgatattgttgatgaagaagaggagtgccgtcgtccgtgagaggaagaagacggctagcccgaagaccacattccacacgttcagcacagcctccagcccatgtagctgtagcccccgataggggagccactgcgagatcacctggctgctgcccgacatatcggcgatggcctcacgattgaccgtgaaggtcgagccggtgaagaaggtagagacggctgcaccgaggaggatcggggcgagtaggccgttgatgaaaaggaaggtctgataggtcttgctccccagcacattcccattcttattctgatactcataggagatagcctggatgatgaagcagaagaggatcagcatccacacccagtaggcgcccccgaagcttgtcgagtagaagagggggaaggaggcgaagaagccccccccgaagacgacgagtgtcgtgaaggtgaattcccacttcctgcccaccgagttcactaggagcttgcgctcgagtggctccttgccgaggctgaagaagaggctttgtccgccctgtacgaagaggaggaagactaggagtgctcctaggatggagatcagtagccaccagtattcttgatagaatgcgtagtccatttgtcgtgttgtagtttggattgaatgagatggacggagtgcttagtgggcatcaggaccctggcggatggccttgcgcatgatgttgatctctgccaccagcatgatcgtgaagagtaggaagaagagcatgaaggtgatcatcaccgacgaagcctcgatcttggagatagccgcctgcacgggcaggaggttctgtatcgtccagggttggcgaccgacctctgctacgacccagccagcttcgctagcgatccaggcgcagggggtgaggacgaggctagcccataggagccacttggcctgggcaagcttctcattacgcttgtaggcataccacgtcagtagcaggaagagcaggaggaacgcaccccctagacccaccatgatgcggaatgagtagtaggtcagcggtatattgggtaccgtctcgtacttgctcgtgaagtagccgtagccgtagtaggggaagttctcctccagtacggcacggtgctgggcagcaccgatactgtccccagccttgcgtgctgagcggaaggcattgagtgcgtcgatagcgatacgtccacggcgcatcatctcttcggtggagagggctacgctaccgtcgggcttgtggtagccaccctccaggatgttgtttaccccggggacgtagcagtcgggagtgccgtctaccatgtaggagagcagacgagggacctctatactgaagaggtgggaggccttcccatcatcgggacgacccttgctggggttcagtacacctaccatacctagggggagtcccttgccatcggccgtcttcccctcgggggtagaggcaccagcgtcgtagagggcctccatagcggcgagcttcatcggctggttcttggcgacatcgacggcagagctatgtccagtagctgcggagagtagggctgcgacgaggccaaagggggcgatgatcttcatgttgcgccgagcgaactcgaggttcttcccccgtagtaggtacagcacacataccccgagggcgaagaaggtacccagcgtccaagaggtcgtgatcgtgtggaggaacttgatgatggccgtaggggagagggctacggcccagaagtctgccatctcgttgcgcatcgtctcggggttgaagaccatccctcgtgggttctgcatccaagcgttggccacgaggatccagactgccgagatcgtcgctccgacgatcgtgagccagctggaggcgaggtggaagcctcggctgaccttgccccagccgaagaacatgacagcgatgaaggtactctccatgaagaaggccaagataccctcgatagccagaggagcgccgaagatgtcgccgacgaaccagctatagttcgaccagttcgtcccgaactggaactccagtatgatcccagtggcgacaccgatagcgaagttgatcccgaagagcttctgccagtacttggtagacttcttccagaactcatcgccactgcggaagtacttcgtctccgccagcgacatgatgatacctagccctagtgtcagaggcacgaagagccagtggtacatggccgtcagggcaaactgtgccctcgaccacgatacgagtgattctagatccattgtatatagtatttagtccttatgattacttgattggttcgttcgtccccccgtgaagagtatcagtgggggatactgctcggcgctggaggagctcctgctcgacgaactccgagcgggacatatgctgtcgctctgcctcctgcttgaccacgttggggaagaagaaggctcttaggatagcgaacatgacgaagagcttgatgcagatgatgagccagagcttacggctcgtaggggttagggttttgaagccatcgcggtagaagcgataggtacgtatgaggatgttcggtctgcccgggtcgttactcatgaggggggcggagtctttataatgttagtaatgaagtgataaacgcaaatcggcgacaaaggtaggaaataactagcaaatgtaaaggagcctaaagggcctccacgccaccccagcttcactactccagagggcgcatgtgactcatagtgaggccgcccccacggtggggagaccatcctagaggctatgctctagggctgtacggcgggcagtgtaggtcaccttggtagttttagttgtacctttgtgcccaagggtgtgtatggggctcccccagctagcacccttcatccatcactacagagagcattgacagctatagcgatcgatagcacgagcgtgctacagccctctcgtcgggggcaaagccaagcggagggacggcaatgagactcaccttcgctatccattaccatgcccagtggggcgagaccttatatatctcaggcgaaggctccatcctcggcctctgggatgaggacaaggcatgtccactaacctgcgccgagggtgatatatggcggatcgaactcgatctaccagagcctatcccccccacactctcctactcctatctcgtgcgtaatgcggcaggccaagtcacccgccgtgagggtatgctccagcatcaccttgacctccccctaggggctagcaggataatgatcctagatgcttggctgcataaccccgaggacgcacctagctataccacagcactactcgataccctgagaggacatcggccatcaccgctgaacctaccagcaggagactccccttatgtttgccttcagaccttcacctcctcggtaggtaggggacgagggctctatctcgtcgggagcactagcgagctaggcgcatgggatacccatgctgctc

SEQ ID NO: 3318 - DNA, 17646 bp, synthetic construct
  misc_feature 1..17646: note = Synthetic
  source 1..17646: mol_type = other DNA
acacagcgatgaaccaatatggcgtagatctctccgatccaatcgccgcctccgaggagatggcgcgcatgatgaatgtcatggctgctgcaggtaaggagggctcggctgagctcccccaaatcaaggaggcactcgagcaggcaggtatggctgccaaaggagcgggtgtcagcttcgaggaagcgaacgccgcgatccaagtccttgacaaggcggggaagaaaggcagtgagggcggtattgccctccgcaatgtgatagcgaccctatctcaggggcgcttcatccccaaggatgtccagaaggagctaaagaaagctggcatcaacgtgacggaccttgctgaccgtggtaagagcctcaaggagcgactggagctcctgcgccccgtcatgaatgatgctgcgctcttcgccaagctcttcggcaaggaaaataccaacgccgctatggctctggttggtggcaccgaagaggttggtcgctacaccgaagctatccagggcacgcagtcagccaacgatcaggccgccgtcgtgatggagggctttgccgagagacaagcccgcatacgtcagcagatagaggacctaaaaatagggctctttaataggatcggagacttgtccctatgggcatctgccctaggagatgctgctatacccatcgcccagctattacccctcctacaatttgcaggagggggagtaaagggaatctatacatggatcgtaggaggctcatggcgcacatgggtaggcacactgcgctcggctgttacgtggatgggatcacttgcactcaaagctggccaggctgcaattcagatactcggcctctcacttaaggctataggtcaaggactcatagccttgggttcatacattgcctccctcgttacaagtggagctgcccacgtgggatttgcgcttaatgcccagatttcctttgcatcctttgctgccgctgggcgtgctgcctgtacggctgtatcaacggctatctctagcatccctatcatcgggtggatagccggtcttgtagcactaggtatatacttttggcagacatcggctaagttccgtgcgattgttaagggactctgggctgcgattaaagaggcatttaccaacatttggacactcgccaaggatgtatttggtggagtctttgacctcataaagtctgccttgagttttgatggagatggtattgatgctgctcttaagcgtgtgtcgggagcctttggtaagtttggcaaggacaccgctagtgccttcaggcaggcgtatgatgaggagatggagcggagtgccaaagaggagcaatctgacactcctaagctccagatgaacatgacaaatcttgatggtggagggctcgggattccaaaaataaagccacccaagacagacaactctggtggtggcactggtggactaggagcgcacggtacaggaggagcaagcaatgccagtggcttgcgtaatgtgaccatccatataggcaagctagtcgagagcctcaccgtgcagacgactaacctctccagcgacacctccgagatcaaggcgcttatcaccgagacactcctctccgccgtcaatgatgcaaatctagcaatacaatagctatgcaacagataatattgggtaacgacaccactctatctctcatcctctacgcccaagcgctactgctcccagacccatcaggtagcagccattttgagcgtaggcagatagatctctctcttgctcgcgaggtctcagtacaactcataccctatatgagatggcagcccgttagaccagagtggcgtatacgtcagagcatcctagaggtagactttcccgctacattgcagcttccaggcaagtgggatattgaggtgagttactttgccccctctatctcaggaggtgatacatacataggacatcgcctgcgccaaggactgtgcgaggttcttccccgtcatgagagaggatataccactccagaggcctatataatcacagcggatataacgaccgccatgcaaggagcgactggtctcagcgcatttgagttcgccaagagtcaaagatgggtagaaacggagcaggagtatgccacctttatcaagggcgatcctggcaatgatggtcgagacgcttatgctagctacctagccaccacaaaagatgccccaaagctgacggaagaagagtgggcgacgggcggatggctcattatactggaaatgttgaagaagctaagaggtacaaaacgatgaatacaccaaaagctgtagcagatgaactgctagctcttatgcgagataaggaggagataaggattgctctagtagaattgggagcgtccgtggctgaagaagacgggctatccagttactcagacaagatacgtggcctaaagcccactcctgtaaagatatacaaatcgcagcagttctatcagtggatagatgaggttcttccctcattaaagatagatcaggggtatgttgcccctgacctatcctggtgcctaggcaggtgtcccaaccttgtccaaataccagatattgatgggattaagcgtgcagtgaatatggagagttttatccaagaaagtaaaaaaatcaaaaggatgatacttccagatatgcctaacctgactaacgctagaaacattgcaagtaaagcgttggggatggaagctgtagagattggagatatgccacaagttactaccctctactatgccttctcagagtgctcctctctaaaaatggtctcgcttggagatactccagctgtgactgacgtgtttgcgttatgctacagctgcggtggcttgacacgggtaaagctgtctatgtccggtggacatataagtaacgcacaatacatgtttaacaaatgtgtcgagttagaggaggtggaaggtatcatacacctagcggataatgcggaagttggccatcttatgacagagtgccctaagctgcgagaaatcaggataaagggtctatctaaagatattattgcctttcagagtcccgaaatctcccttgagagcgttcgctacctcataactgaggcaagatccatcacaacaaaacagactatatatctaccccaaaagctagtcgatgatcacgaggaggagatggtaacacttggagagattgctagtagcaagggctggagcatcaactacagataacaaatgtaatcatgggaaaatcagtaagaattaaagcaccgagtggtaagatggtggtgagccgtgagctcaagaccattggccgtcttgtacgtacgccgaaagagtacgcacacctgtatgagatcatggacgaagccgaagcttatgccctcgatcgtgagtggcacccagaattctacgggctacccccgaaatcccctgggccaggacctagccctgtaccaccctctacccccaatcctcagccataatgacagccaaggaacgagccgaaaaaaaggactttgcccgtctgctctacctccagggggaggagcaaaagagcatctcgcagcgcatcgaggtgtctgagacgaccatcagcaagtgggtaaaggagggtgggtggcaggagctacgtgcagcccagaatatcacccgtcctgagctagctaataagatcctattatcaatcaataagctccttgatagagctatcgccagcaatgaggtggatgcagggctggtcaagcagctcaagaccttcagcgacgctattgccaatatcgacaaaaaggcaaacatagtagatacgatagacaccttcattgcctttggcaaatggctggagcaccgtatgactattgatagctccctcacccccgattttgtcaagcaagtcacctactatcaggacttatacatccgtcaccgcctaggtggtgctgaggactagtaacacgattaccctatgcccctacagaccattgtacccccagccatcacggctggcaaggtgctcctctatcgcttcccccagcagagcaaggggagcttcccccagcgcgaggaggcaggggagttcactccctcacccatagcctcgcccatcaccgaccccgcctggtgggagggcaggtacgtcctctgtccccttcgcctgcgcctagaggatggcacgaccctagagcttgctgatgccgtcgtggcgatgacccgcaccaagcagatcattaccacccaggtagtcggcatgacgggcacggttaaggagtacatcagctctggcgactacgacatcaacatagctgtcggcatccaagggctcgaggacggcaagatcgccgaccgctaccccgaggaggggctgcgagagctcctgaggtacctcgaggtggacaaacccatacaggtgcagagtgccttccttgatctctttagggtcaatcgtatagttatcaagagctactcactcacccaggacacggcgaccaactaccaggagcttaccctctccgccctctccgatgatgagtacaacgtctacagcacagactactagcctatgtaccgcctaaccgcccgtgtagagatagagagctcccgtaagtgggtgatcactcaggtcactgccctacagatagagcgcagcaccgaggagcttaccgacacgtgtaagatcacactacctaagcgcatgctctgggatcagcgagagggtgtgcccctgaggcgtggggacaaggtgcgggtatccctcggctatgatgatgacctgcagctggctttcgtcggatacatccgggaggtgggcttcaaaacacccgtggagctcgtctgtgaagatgagatgtaccgtctcaagacccagccgaccctccccaaggcgtataagtccgctaccctggagggtgtcctccgtgaccaaggcatcgcaacgccgatccgtgtgatgggcgagcaacatctcggtgcttaccgagtgcaagccgacaccgtggcgagcctcctcggcacactcaaggagcagggcattcgtagcttctttcgctacgaggacggacaagctgtcctctactcaggggtactctttgatcatgatgtgggtaaggctacaaggcaggtcattgcgacaggcatcaaccttattagtgatagccaactcaagcagcaacatgcagacaccctacgtctcaaggttaaggccatctccctacagcccgaggggcgaggaaagaaaaagaaaatcaaggtggaagtaggcgataaggacggagagctccgcaccctgcacacctacaataagtcggagagtgagctacgccagtgggcggagcaagagctacagcgtctcaaacaagacgggctaacagggagcgtcaccacctttggcgcacacctcatcgataagctcgaccacgtggctatccgcctcgagggtaagcgcatgggcgtctaccaagcaaaaaaagttgtcattaagtatggtgctgagggcctccaccaagaggtgactctcggctacagagtagcacagtaagcaatatgagccagatagcatccatcatacgctccttggcagggcaatcatcctccgtcctcaaggtctgcgaggtgacgagccttgaccgaggagcccgtaccatcgactgccagccactcgatgagactgcccctatcttaggggcgagcctccaggcagacagcggaggcactcagggcttgaccctctaccccaaggtgggctcccttgttatcgtagggctcgtggagggcacgcctctcggtgccgtcctcctcgccgatgagcttgaggagctcaatgtgcagataggtgaccagcagatctcgatcacccgtgagggtatcaccctcaatgagggtaagctaggtgggataatcaagatagccgacctcaccagcaagatcaataccctagagcgagagttcaacactctcaagcaagtactcacctcgtggacaccagtcccccaggacggaggtgcctccctcaaggcatcagccgcctcctgggcaggtcgccagctacagcttacccaacaaagcgactacgaggatactaaggttaagcactaactattagccatcatgataggtatacagatagacactactacgggcgacctagccctgcctgagggacgcatgaccctcggggaggtacgagagcagaccgcccaattcctcctcgagggtgtgcccggatccttcggcgagtaccccacccttgggctagctgtacgtcgccagctaggtgcccctcacgacccgatgttccccactctcgctgtcaagatgatgcgccactgcctcatacccgtagatcgcattgtagccacctcagatggctatggcattacctttaaggactaacccctatggcacgtacaacacaagacatccgccgatccatcagcgaggcattcattgccgaccctacgatacagcagggctatcatctcaccccaggcaagacgtttgaggagcagttcagcaaggtctccctcgaagctatcctattctgggtctttgcctccgccatccacgccctcgaggagctgtttgacttccaccgcaaggacgttgctgagctcgtcgccgaggcggagccccataccttgcgctggtacgcccgcaaggctaaggcgtacctccatggctataccctcctcccctacagcgaccaatacgatctctccaccctcactcctgagcagattgataagctacgcattgtgcgctatgctgtagcctcagagcagaacaacatcgtctacatcaaggtcgctggtcgagatgaggagggtaagcctaaagtgctccctaaggataccctcgaggctctacgcctatacatgcagcaagtcaaggatgcaggtgtacccgtgcgtatcatctcttcccctggtgatgaactacgcctctcccttaccatctacttgcaacctgttctgctctcgccacaaggcaagcctaccccagggcgagacaaggctatccgcaaggttatcgaggacaatatctctaccctccccttcgatggggtattccgcccatctgacctcattgtagccctttcatcccaatccggtgtagaggcttcagatgttacctcggcaaccacagcacaagcaggctccgatagctggcaatatatcttcggatatcatcgccctaggtctggatactaccatctcaataagctcactattaattatcagccctatgtccctggatctctatagtattgactggcataaggtcatctcagataccttgccttccttcctccgcaagcctagactccttgcactgctccttgtgtgcctaagcccactcatctggctatacggtcgatttgctcaagaccgcgataaggatctacacaagctacagcacaacggacaggtctgctctctacaggggctacttgaggagcaatacccctcatccctaggtttacgatacaagatagaggatgttcgtcaatccgggctaatcatctacacccatagcgagtctcgcaaaggggtgcctctagctatccctgagagttcccatgggctcctcattacgagtggagagatcaaagccgtagaaacgtcacgcttcctcgtctatgtcccccaagatatatacgatacccacctccctgaggttcgctggctcgtagagcagtacaagctccccaccaagcaccctatcttcctacccataaagagtaattaacccttgtttaactaacggatgcaaaccaatgaacatcgcaaacttcaccacaacagctaatgcagcaggagaggtaggacactaccctctatctactgagaccttggacttccttcaaaagcaaatcctcctcgtccagggactagctcagcttataggcatagtatctaccccctgggttattacctcgcccacatataacgcacctggtctgatggtatacaatgacgagcttctacccattgaccctctcccctatgacctccagcccaacacagactattgcttctatcttatagaggaaaaacaagatatcaccaccgaggacaatcgcttcatcgaggcacgaaccatccgtaaggtgcaggtagagtccaaacaaatggttctggggccggtcctaggaccagcctatgcacgtaatgggtctgagctagacacatcaaactctcccagcctctcagatctacataacatgactctaaactatgcaaggctactacaaggtgacctagaggaattagatagagaggcaccgccaaagcgtatgcaactcttcctagcacccgagcgagcggatacaagttctttaccaatgagcctgcctgagctcaagggggctatggtttttacacgcctcctgcccgatagtaccaagagctttatccagacgttagaaacacccgatggagttaagtatcagaggacggtcatcagtacgagggaggttgatcggtttgaccgtatggggatcaatgattttggttggcactgcctacctaatcaagtaataggctccatgcatattgtccttcttccacaaagccgaaatatcgcaatacataccacaactggtatctgtacagaggcctcaggtgcaaatgtgggtatttggggtggagaaataatacttaagcacggcacgacactcatcagagaggagaaggtccgcgtagaggtatctgcagggtatgatgaagctgctggtgcgaaccagcctaaggtctttgctaccattcggcaaggtaagattgccttgtttgtctataatcaaggtggttacaatgcgctcacccatacgcttcatgtgaggctcgtctcactatagcatctaactccaaacgataagagcgataaggggctttacctttatcgctcttatgttttcctaggcggttttgttttcgtgttttaggacgcttcgtttcccaaaggggcaatatttcgttttcccgattataacctcgaggaatatgaccgtatcatggcggtgcaacgagagttctatcccgagatcctcacagatgaactaattcagaggatacgagaccgcattatcttctatcagcgtcctctgaagtcgtgcaagcagctggtctccttctgtgagtttgagaagaaagagcgggtcgtacaggtgaagcgcatcaacaaggatggtgtcgaggagctcgtcgagagaaccatcaccattggtcccaaggtagccccgaagtcttcccctatctttcaggtttgtaaggtctgggagtccatccaaaacatccgcctttactatcctgatggcacagagcgagtgctggagcaggaggagaagcagaagctcttcgaatatctccagaagaacgataagcttagccttacggcacttcgcaaggtgcttaaaattaagccgaaggataagctctggtgtgataagctactcgagaaggggatcgcagggaatacaactgctgctatcttgcgcaaggctctgaagggatatgagcagtatgaaggtctacttaggttcgatctgacgataagggatgggcataaggctgatgaggatggtgttattcgtccaatcattgacgagtcttatcaaaacgaaccgctctataagctctggcacatcctctactccatcgaggatagggctgatatgtatcgtgccctagtcgggcagctcgagatcaaggaagcagacctagacgatggactgatggatgtcctctataaaatcgacttcgtcaagcagggctatgggaacaagtctgccaagttcatctgtaagctccttcctcaccttcaggaggggaagatgtatagcgaggctgccgaggctgctggagtacgacactccgatagtatgactgctcaggagcgagatgaacgtagtctgctggaagaaatccctctcctgcagaagaatgcccttcgtcagcctgtagtcgagaagatcctaaaccagatgatcaacctcgtcaatgcgctcaagagggaacatggcgagatcgatgaggtacgtgtcgagctcgctcgcgagctaaagatgagccgagaggaacgtgaggagaccactaagagcaataatgcacgagagaaggagaacaaaaccaaagctgagcgtatagcagagtatggccttactcccacgaagtcacgcatccagaagtatcgcctgtgggaagagtctgccgagagctgtatctactgtggtaagcacgtagatgtcgtgcaattcctccgaggtgaggagatcgaggtagagcacatcatcccgaggtcaatcctcttcgatgactccatgtcgaataaggtttgcgcttgtcgctcttgtaaccaagagaaaggtaatcgctttgcgatggagtacattcagtccaagggatgggagcagagctatatcgagcgtgtgaatagtctcttccatgataagaagatatcctactctaagcgtcagcgtctcctgatgctacctaaagatctacccgaagacttcatcgagcgtcacctacgactctctcagtatatctcccgtgaagcacagggcattctccgtaaggggatacgactggtgagtgcctccgagggtagtgtcactgctaagctccgtcagctgtggggctatgacaatatcctgcgagacctcaacctagagcgatacagatctatgggtgagacagagaaggttaaggtagagcatcgggatggagagcgcaccgatgaacgtatcaaggactggtctaagcgaaaggatcatcgtcatcacgctatcgatgccctcgtcgtcgcttgtactcggcagagctacatacagcgactcaatagggtgaatgcagaggctgatcgtgaggagatggatgtgttcatcaaggagcagcagcaaaagccgactcattctaagggagagaagctctccctactggaaaattggcttatccgacagcctcacttcacgaccaaagaggtgatgaagcatgccgaagaaatcctcatttccttccgtccaggcaagcgcaccgtgactcgagggcgtaatgtctacaagcgctcgggcaagaccgatgtgcagaggaatgtgcttatcccacgaggtgcactctccgaggagaccatctatgggacgatacagctccatagaaaggatagaagtggtacggaactagtgagatcctacgtcaagcgaataccgctgagcaaggttaatcagagtaatgtcaaaaatattgtagactctcagattagagaagttgctcaagctgcattgctatctctttcaggtcgaaaaggagttcttcctacagagttgtatctagatgactctcgaaggagggtggtgaggtctgttcgctgtctagtgaggtcaaatacccttattcctattcgatttaatgcggatggagaggcaattggttttactaagccagggttgaaccaccatgtggctttgtatagggatggggtagggaacataagagaatcagttgtgccgttctttagagcagttgagcgagctcgctatggcattcctatgattatttcagatccaagcaaagcaagagagcaggcacgagctaatcctaacctaccagaatctgtccttttgtcgctaccagaggaagattggcagttagaagaatttctgcaaggagatgaaatgttccttttgggaatgactgatgaggcaattgatagggcaatggagaccaaggattatactactctgggccgccacctctacagggtgcagagtctagcagcaggcgactatatgtttaggtatcacttagagacaacacttgatggcaaagataacgtggggagtatcccaaagtcttataggattcaaggcttaaaaacatataggaagcttaaccctcgcaaggtgaagatagacctccttgggagaatatctcttgcctgagtcaataggctagtatcatgatgaagcataccctttacttcgggagccctgcctacctcgcccttaggaataagcagatcgaggtgcgtcagccctgtgagggggaagctaagcgtccagtacggacgatcccaatagaagatattggggtcgtcctacttgaccaccagcagatcaccatcacccatgggctcctgcatgcactcctggagaataactgcgccgtagtaacgtgttctcctagtcacctgcctgtaggacttctacttcccctcgatgggcacacgctccagaatgaacgcttccgtatgcagctggaggcctcccttcccctgcggaagcaactctggcaacaaaccgtgcaggctaagatcctcaatcaagccacgctcctcgggcaagtcctcggggaacctacgaagaacctacttgcctgggccaagcaggtgaagagtggcgactcggagaacctagaggctcgagctgcggccttctattggcgcaacctctttgtctctctgccgggcttcgtccgagagcgtgaggaggctgcgcccaacgccctcctcaactatggctatgcgatcctaagggctatcgtcgcccgtgcactcgtcagctgcggtctcctcccgacgctaggtatccaccatcacaacaagtacaacgcctactgcctagcggatgatattatggagccttaccgcccctatgtggatcagttggtcgtcgagatctgtgaggaggagatccctacggtgctcaccaaggagctgaaggtacagctcctctccatccctactctggacgtcgagatagagggacagcgtcatcctctgatggtcgctgtctccctgacggcaggctctctactgcgttgcttccagggagaagcccgcaaactatcctatcctatactccgatgaaagcaagtcgtctaagtgaatatcgtgttatgtgggtctttgtattctttgatcttcctacctatacgtcgctggagcgtaaggcagcctcgggcttccgacagagcctcctcaaggatggcttttcgatgtttcagtattctatctatacccgtcactgtgctagtgccgagaatgctgctgtgcatgtgcgacgggtgaagagtatgcttcccgatgagggtgaagtagtgatcatgacgatcacagacaagcagtttgggatgatggagcacttctcctctcactgtacgacgaagcccccagaagcgcctcctccccttgatctcttccctgacgaagatatttttctcctctaaccaaaggaaaagccggtggtactccaccggcttttctctttctataaatcttcgtaagctactcatgcctaggtcactatgcgagatcagttgcattagcgatacgaaggtactgaattgaaagctaatcacaactcaaggacgtatctgtcgcaccatacaaggttgcattagcgatacgaaggtactgaattgaaagctaatcacaacacgcagaagaggttataggcgacctcatcggttgcattagcgatacgaaggtactgaattgaaagctaatcacaacactaatacagcttttgaggttgtaatataggttgcattagcgatacgaaggtactgaattgaaagctaatcacaacagatgctcaatggtgatgaggacaagatacgttgcattagcgatacgaaggtactgaattgaaagctaatcacaactgcaagcaccatcactaaaaaacccactagttgcattagcgatacgaaggtactgaattgaaagctaatcacaacagacccctccaaaggaggaacaggagcgcggttgcattagcgatacgaaggtactgaattgaaagctaatcacaactgactctgctgtcagagttgtgccgtgttggttgcattagcgatacgaaggtactgaattgaaagctaatcacaacagaaactacagaaagaactcctcgagcagggttgcattagcgatacgaaggtactgaattgaaagctaatcacaacgagaacacctcaactgccttatctcctaaagttgcattagcgatacgaaggtactgaattgaaagctaatcacaaccagtcgccgaggaagtccccgcaggctctcgttgcattagcgatacgaaggtactgaattgaaagctaatcacaacagaaggtagctaagcctcttacccccgagggttgcattagcgatacgaaggtactgaattgaaagctaatcacaacgttgcgccatactaacctttgaggacttcagttgcattagcgatacgaaggtactgaattgaaagctaatcacaacgtacatagtgtggacacccctacctacaagttgcattagcgatacgaaggtactgaattgaaagctaatcacaactcttcttcaacggtcgtggtgagagacagagttgcattagcgatacgaaggtactgaattgaaagctaatcacaacagtgccgtggttctcgctgcctgtgataaggttgcattagcgatacgaaggtactgaattgaaagctaatcacaacaaccggataaactatctccgcacgaccacgttgcattagcgatacgaaggtactgaattgaaagctaatcacaactagatgcactactaaagtatacagaggattgttgcattagcgatacgaaggtactgaattgaaagctaatcacaacacgtattagccctagctattaccagtaccgttgcattagcgatacgaaggtactgaattgaaagctaatcacaacttacgggcttcagggtctcccgatggaagagttgcattagcgatacgaaggtactgaattgaaagctaatcacaactcgttgcgctgcgcaaagtttgtgagcttggttgcattagcgatacgaaggcactgaattgaaagctaatcacaacagcagtgctaccaatggaaagatgaggtccgttgcattagcgatacgaaggtactgaattgaaagctaatcacaacctaaagtaaacacttccacctacaccagagttgcattagcgatacgaaggtactgaattgaaagctaatcacaactcatcgcaacttattttccgtaggtgttggttgcattagcgatacgaaggtactgaattgaaagctaattagaaccgaaacactctcacattatgcggactctgggacgtttaaatgggagaataatacactatgggatggttcggataaggaaagactaaaacaagagatggagtggataggacaacggggcacaaagatgagagccctcaaaatcgaagggcagacaatttacctcaagattgtagagcaaggccttcaactgtaatgtcgagcaagaaaactagggaatgcaatcttagcttcttgggtactctggtaccctttcgcaaatcgattaaagagtaacgccttcagtgatgtgggtatagagatattgtcagtgctgatatgtaacctgtgatagtcagatagcatatcttcacttgtgcctgacatcacccagtgtgactcatagaaccagagcatatccttgtcttgatccacaccttcgtatgggctctcttcctctcccttatagtatctgcactgtttgattagttcttcctttgtaggcatatctcaaaattctcctctaagttctatttcttattctttttccgtcttatttcacccttccgcacttcacacagctttcctatgtaggggcgcacctccgtaattctatacgcccagggggtgtggatggacaccccaagctcatcaggggtacaagcctcgtatatagaagctattgagccaaagtggtaataccttccaccatacgttgcattagcgatacgaaggtactgaattgaaagctgatcacagccgacgagggtgacttttttctccgtgtgtaatttgctctgtatcaagtgtgagtagagggccaaaacgctcttaccgagagcgcacttgcgctctcggtaagaacgctcccatcaccttacataggtgatgggagcgttctttataggagcgtaagagaggtcctagtatgttcgtttttggcccctcagtatgccgagtatgaagagggtgatatgtcgcagtgattagcgtgattagccctatcagccctgttgggtttgacgaccttcgtgctgtggccacctttggtctagtggagtggggtgtcgtcataggtagctctatccttgtagtaatgcgtgcagtgggtatctctatgctcgtggagcggggtattgtcgtaggtaactctatcctcgtatgggtacttgatgcgggtttctctatactcgtggagcggggtgtcgtcatggatagttctgctctcgtattggtgtttgctgtcgctaccttcagtgccgtagggtggggggaagtattcccacggggaaggagggttagcgggatagcctacggggaagggtaggggcgaatgccctatctttgcgcccgtgatccatcctgtgcggtggattgtttagtaagtctatggatacagctcatctcatcgctcccctgcaggagcgtatcgcccgtagtggtctctctgacccccgcatcgctgtcctcgtctctggcggggtcgatagctccgtggtcgtgcacctgctctgtacggcaggctatcgtcctacgctcttctatatacagataggcatgcaggagcgaggcttcacggactgctcgtgggaggatgacctagagatcgtgcgccacctagcacgtcagtatgactgtcccctagaggtcgtatccctccacgaggagtactgggcgagtgtcgtgcagtacacgatagacacggtgcgccgagggctgaccccgaaccccgatatgatgtgcaacaagctcatcaagttcggctgcttcgagcagaagtgggggcatgagtacgactttatcgctacggggcactatgctacgacgaccttcgtcggggggcatctcttcctcgccacagcacctgacccggtgaaggatcagacggacttcctcgcacagatcaacttcgcacagatccgtaagctcctcttcccctcggggcacctcctcaagagtgaggtgcgagccgtcgccgagtcagcacacctcatcagcgcaggccgtaaggatagccaggggatctgcttcctcggcaaggtgaactataatgagttcatcgagcgtgccctaggtacgaaggagggactgatcatcgagcgggagacggggcgtgtcctcgggaagcatcggggctattggttccatacaatcgggcagcgcaagggcttagggctaagcggaggcccttggtttgtcgtcaagaagaacatccgtcgcaacatcatccttgtctctcagggctacgacccacgagatcagtatggacagcatatagagatggagggggcggacttcatcagtctcgatccctggagctatgctcggctcgtgagcacgggtatagatacccccgtggcggaggccgatcgagagccgatcgccatcaccttcaagatccgtcatacccctgagttcacccgaggcaccctccactatgatcccactcgtggctatcgcatcgatagcgagcaggagatacagggcattgccccggggcagtatgccgtcctctatgatgaggagcatcgcatctgcttcggtagtggtatgatcactcggggctactgaacccgagcccctcgtaagtac

SEQ ID NO: 3319 - DNA, 17132 bp, synthetic construct
  misc_feature 1..17132: note = Synthetic
  source 1..17132: mol_type = other DNA
tctgctatcttgcgccaagcgtctatttgctcattgctcacagagaactctccagagataagatggaatagagctattgtgcctattacattagccttattctcttttagagccttttcatatctcttgatacattcgttttggtaagcatctgatattttctgttgctctgcctccttggctttcccgaaggctgtgtagatgctatctgagtataagtttagtgccttctgaaactgggcataacggtcattaagcttgctcccctgcgttagtcctttagtgagattgacattcaaatctccagcttcaaggatgatgggggcttgctgtctgatgccaagacgcacttgataagtagcaatagtatctacatcaaagctcttggtgaaagtaaagttttgtcctttgaccacgcttgtagcgatagtatccactaggtctgcattagaccgtagaagcagtacagtgtctccattattcttcttgttttcaagaaatcctttgatgcgtactgtgtttttaggggttttgcgcacttgtggactatgggtaaatgatgatagtccgataactccagctaagagtaggctgatgctttgtaattttctcataagtggtaattatttctttagagctttaccttgtctaatccaattaaggctaacctcagtaaagtaaatatcgtatgcagggcggtcgttctcttcgctaatgatgccgacgttcccattttttagacgtgtaacctcgctataggctgcttcgccatcgcagacagtttttcctagagaccatgttttgccttcgtcttcactcatatagatgcgtaggtggtctcggctagggctctctaggagcgtatgcaggagaatattcttttctccctttgtacgttcgcttgagtagcgagtaagggcagcattacaagcattacccattagctctgaccaagtcttaggctcagaccatgtttgtccgtggtcatggctgagtacgaaagtacgagcattggctcctccagcacgattacggcttgagatgagcaaatcgccattgctaagttcgatgactttactctcatcaccattggcacgagccacaggcgaagcttgccaagtagtgcccttatcatcagaataaacgaggacattatccatacgaccaccccatttagcttcggtacgtagagcggctacgaaagcaatgcgtcctttgctcgtgataataccattacccgaaccaaagaatcctccattaggatatttgtctgtataaacttgctctgtgatattttttactggcgtccacgtaagtccgccatcgctgcttttagagaaatacatctctagaggcttcttggcttgactagggtagtgccatagccctgagcctgcaaccataaccatatagatgtttttgccatctgtggtaatcgctgcatcgccataaccatgctcggcagtacccttagctactgtaataggtttactccatgtgcgcccattatcacggctgattttaacttcgatatcaatgttagagggaaggtcattgtccgtagtcttgcgcttatctatcgaggctacgaggttaccattgctgaggcgtacaatagcaggtatgcggtagtgagcagattggttctctccgggagtccatacgagtgtacgctgtagtacgatttcatgtgtgtagcgcacggggcgagcttcataagctgatgctccagcgagtttgatgcacttaatctccgttgaaacctcatcaccttcctgagcagtgctagccacatcagcaacgagccataggtggtcatacttgctaatgagaggagtattcttaaccgccttaagagtagtgatgccccctgcattgggtttgccttcggctacaagtgtgtgtgctgtgcgagggtcaaagcggtcaccgttatccgtcttgtataggcggtagcgtgtaatattttgcttttggtttgcttctggagtgagtacttcgatgtcttctagtcggctaggttgctcaagacctaagcagaatgtgctgatagcttggttagcaccacgcccaataagctgcccattactgcgttgctcgctataactagcaactagagcgtgtcccgtagattgtggaaatcctatgagttgggctgtgaacctgcctgtttcatcagtataagttgtagctccaggcttaagtccatcaaagtcaaaagcggctataagtccttccgtttgaggtgcaatgcgctctgtagctctgtctttaagtagttcttcggtagatagagctttattgtataggcgcacattatccagacgaccagagaagaagcccataggtttattatccctgctacctgctccgatgtataaaggtaattggttatctgccacccaagcacgaatgtccttatccttagataaaacttctttaccatcaacgaaaagtttaatcgtagagttggctctgtttacgaccaaagctccgtggtaccatgtgcgcaggtaggcaccttcgggagatgcgccccagccgtctatgctttggttatagagaccagcgccattaggaaggctagctgcaaggaagttattcgcagtcgttctaaatgccataatctcatagcctgagcgattgaggctatcgaccttattgcttaggtctcgtttagagaggatgcggaaagagtctccataaatcattgtacggtcggctgacatccaaaaggtataggtatagctttgtcccaacaacatattgagttgagggcttgagggaatacgtagacactgattcttaccatttagttcgaggtaagagttatgcttaatatctgtttgtcctaatatgctggtagcgcttagggcaaggcctatgcacggcactcgctgcgttattttcgatattcaggcttggtcatttacatgagtaaactccctgcgccctcaatctcaatgccttgcgattaccgcattctacaaaaccccacaaaaggacaagtaaaacttgtcctttatgagaccgtcgggcggtctcataaaagtatgataatctgtgccttttgttgagcagaagaataagggggatagatgtgaagcaaaacgggtgcatggattgggggcatgagtcccctcctaaaaacttgtttttgacagtcttataaattggtttagattattcaatttttgcttttaagtagttgataaatagtttgtttactgattaaagattttgtgcttgttgaataatctgcagacttcagctgaagtctgtacaaacttcagccgtagtttgtacagactacacgtgtagtctgcacagaccacgccgaagtttccagaaagtactacgtacttacaaatttaagtacgtgtactcactaaaataagtacacgtaactaccgaaataagtacgcgcacttacgacaacacagtattcatctacattcttagttgttttgaggcggttgccctaaggttgggtaaagacgattatctttgcgcgagaataactatttatagatatatgacttacattttattgcttatcgtgctaattctattagccttactagtttttattctgatgcgtaagcctcagaggcaaggcgttgagaacgagttaatagccctgcaggcgaagctgagctatcaagaggaggaattacgctcattaaaggcggagaaattacaacttgctgaagagcaacaatctttaagcatacagttagcgaaagccgatgcaactattgaccagcttgtggagaggctcaaagaggctgaggagagtaaagctgatttggcagatttacttgaagagcgtttccgaggtatcacaaccaagataatagacgagcgagcagagcaaatccgtacacgtagtgaagagagtttgcagccccttcgtgaggacctaaaacgctttggcgaacaggttcagaaggtgtataacgatgaggcgcgtgagcgcacctctctgcagaccgagatacgtatgcttgtagagcatagtcagaagatgagtgaggaggctaatagcttgactagagctcttaaaggggataataaggtgcagggcgattggggcgaaatgattctagagaatatccttgagagtagtggtctcaggaaaaatgaggaatacacgctccaaagtactctaagagatgatgctgggggagtcctcaaacatggcgaaacgggtaaaaagatgcgtcccgatgcgattattcattaccctaatggcagagatgtggtgattgatagcaaggtgagcttaaaggctttctctgattatatctcagcagagacagaagaagagcgtgagcttgctcagaaggcacatttgcagagtgtgcgcagacatatcgatgaactcgcgagcaaggagtatcatgcttacttacctgatagtgcagactttgtgatgctatttattcccaatgagcctgcttatatcctagcaatgaaagaagctccgaacttatggaatgaagcatacaagaagaatgtagttctaataaatgggactaatcttttagccgctctgcgtatggctaaagacctgtgggtgcgtgatgcgcaaataaagaatgtgcaggatatatttaataaggtaggtatgctgtacgacaattgctgtgcctatctagagagttttgagaaagtagaaaaggattttaagacggcagagaaatcgctcatagaggctaaaaagaaactctatacgggagggcagggcaagaatatcatcacacgcatggaacgcttgcgcgatatgggagctaagagtagtaagcagatttcaagccgttggttagatgctgatgagcaggatatagattaaatcgccctagctctataagtttagttagatgaggtgcaaaggactcattaggcttacttttcttacctttgtgccaaagaaatacagaatacaatatgaaattacctatttacctatacggtcaccccatacttcgagaactctgtcatgatataacagccgattatgaaggcttagataagctcatcgctgatatgtgggagaccatgtacattaccgatggcataggccttgctgctcctcaaatcggaaaggatatacgccttttcgttattgatgcagagcctatgggagaggattttcccgaatgtcgtggatttaaaagatgctttatcaatgcgcacattgtggagtatagcgaagatactttgacggagacagagggttgcttaagtatccctagcgtacatgagaaggtagagcgaccagctactattacgatagagtatgtaaacgaaaagtttgaacctcaacgagaaaccttcacaggttttgctgctcgtgttatacagcatgagtatgaccatatcgagggcgtgctcttcattgataagatttcagctatacgcaagactatggtcaaaggtaagctgatgaacatagccaagggcaaggttaatgctggttatcgcacagtagctgcgccacagaaaagaaagtaatatcagatatataactcaaacaagattaactgttatggaaaaagtagcacaactgattgctcagaagctcatcgaagttgaagccgttaaattgcaaccagataaaccttttacatgggcttcaggctggaagtcgcctatctactgtgataatcgtaagacgctcagttatcctgccctccgttcgttgattaagttagagttggctcgtgtgattgcagagcagtacccagaggcagaagctattgctggggtggctactggagctattgcgcagggagcactcgttgctgatgcgcttggcttacccttttcatacattcgttcagctcctaaagaccatggcatggagaaccttattgagggcgaactgaaggcaggagttaaggtagtagttgtggaagacctcatctctacaggcggaagtagccttaaggctgttgaggctgtgcgtcgccatggtgccgaagtgcttggtatggttgcgatttatacgcatggtttcccagatgctgttacgagctttgaaaaggctggcgtaagactcattacgctcagcaactacaatgcagtacttcaggaagcagccaagacaggttatattagtgctagcgaccaagaggttttgcgtgagtggcgtgagtcgccctctacatggacgggtaagagcaagtaagcttctttccctaggtatataaattaattatggcagattatacaagtaacatcaagagtatcgcttctacacaagagcgcgtatataacaaactaagcgacctcagtggcatggcagccattggggaagcccttaaaaatcatcctgaagcaagtaaaattggcatcgaaggaatagatgctgataactgtgcttttattatcgctggtgcaggtcgtttgcatctgcgtatcgtggagcgtgaacccaataagacaatcaagttagaggctgtagatgcgcccattgatttaactatgtggatacagcttgtccctgcagatacatacgacacaagactgcgcttaacactacgcacagagcttaacttcatcatgcgtaagatgattgggggtaagctccaagagggtgtagagaagcttgccgatatgatggcaatgataccttactaatctataattaaggtcattatggctaaagatataagctacaaggaggcttctctaagacttgatgagattttgcgctatatcgagggcgagaaccccgatgtagatgagctcttcaagctagtgcaggaggccgttgaactgaccaaactttgtcgcaatagactcacagaagccgataagcagtttgaagctcttatggctagccttgatgagagttctaaataatatatttgcatgcctaagcaatatgcagttattgtagctggaggtaagggcttgcgcatgggaggggacattcctaagcagtttgttcctctttgtggcgaacctgtcctcatgcataccattaagaaattttctagttgctctgagataatactcgtattaccctcagagcaattggcttattgggctgaactgtgtcagacttacaagtttgattatcctcataaggttgtctgtgggggcgagacgcgctaccactccgtttactctggcttgcaggctttagcggagcaaggtatagccgaggacgacctcgtcgctgtacatgatggtgtccgtccgttggtcgcaactacgctcattgaggaatgctatcgggttgcagcgcaaacaggtgcagcccttccttatcgccctttggtgaatagcttgagacagtttgaagaaagtgaagtaactcatgctgtagagcggagcgactatgttacggtgcatacgcctcaggtttttaagcttgctcctctgatgaaggcctacgcaagaggttataagccatcttttacggacgatgcttctgtctgggaggatagtggagagtctgctccgtccttagtcttgagcaatgccgagaatattaagctgacgactcctattgatttgaagttagctgagctatttctcactgattgatactatagatgtcctctatacttgctactgatattacttatttgactggagtaggtcctaagcgtgctaaggctttaggagatactttaggcctgcgtacctttggcgatttgcttcatttctatccctatcggtatgtggaccgctctcgtgtctataccataagagagctaaatgccgagatgccctacgttcagctcaaggggtatataagggattttacgacagagggtataggacgtaagcagaggttgataggttctttctatgatggtacaggcgtcattgaacttatttggttcaaggggctgcagcatatagagcgtatgtatcagctggggcaggagtacatcatctttggcagaccaagtgtattcaatggtcgggtaagtatggtacaccccgaggttgatgaggggagcaaagaagaacaagtgtctggggggctaatccctatttatagcagtagcgagaaggctaaagggcaaggagtcaataataggcagatgcgccaactcctgcaagccttacttactcaggtgagaccttatcttagtgagagtctacccctacaactgttagcgcagagcggattgatgggatatgccgaagccttacagcagatacatttccctcagaatgcacaggctttagagatggctagacgccgtcttaagtttgaggaactattgctcattcagctcaaacttatagggcagaaaattcagcgaaaagaaagttttaagggtattatcctagagaaagtagggcattacttcaatacgctctatagtcagcatcttccttttgacctaactaatgcgcagaagcgtacgcttagggatatacgttcggatgtcctctcaggcaagcaaatgaatagactggtacagggtgatgtgggaagtggtaagacgcttgtcgccctcttcgctatgctgatggcgcttgatagtggctatcaagcttgtatgatggcgcctactgagattttggctagacagcatcatgccggtctgagcgaactcttagcccctcttgggatagaggtggctttgcttatcggtagttgtacgaaaaagcagagagcaagtgtattacctcgtttgcttgatgggagtctgagcatagttgttggcacacacgctttgctagaggagggagtccaatttaatcgccttgcactagcggtgattgatgagcaacatcgtttcggggtacagcaacgctctcgcttatggactaaaacagaccaaatactgcctcatatcctcatcatgagtgctacgcctatacctcgtactctagcgatgaccctctatggcgacttggatatatccgtcatcgatgagctaccacctggtcgtaagcctattgacacttttcatcatacagaagaccgcatgtatgaagtgtatgccttcatgcgtaaggaaatcatgcagggtaggcaagtttatgtcgttttccccatgatagaggagaacgagtcccaagatttgcgagacttggagagcgggctggagcgttaccgaagtatgtttcctgaatatcgcatcgcttatgtgcatggcaagatgaagcccaaggataaggatgagcgtatgcaggagtttatatcgggtagggctcagatattgcttgccactacggttattgaggtcggagtgaatgttcctaatgcaagcgttatgattattgaaggggctaatcgctttggactctcacaactgcatcagctaagagggcgtgtagggagaggctctgataagagttactgcatactcgtaacgggtagtaaagtaggtgaagactctcgtaagcgcatcgaaatcatgtgtgaaacgaatgatggctttgtcattgccgaggaggatatgcgtttgcgtggatttggagaattagaaggtactcggcagagcggtaaagaactaacgcttagacttgccaatcctgcccgagatggtgctttggtacagtactgccgtaatatggcagagtatatccttagcgaagaccctcatctagagaaacccgaatacgcagtccttaagcaacgcttgaccgagagttgtaatttcgctcttggctgggggagtatctcgtagtgctatgtaggctaatgtcgtttagtctttgctccttttgaaaccattgcataatagggcactcgctacgttattatcgacattcaggcttggtcatttacaagagtaaactccctgtgccctcagtctcaatgccttgcgattaccccattctgcaaagcttccccaaatgacaagttttacttgtcacttggaagaccgtgaaacggtcttctttgtacacgatggtctatatccaaacatttggatatagaccatcgctttttgtttaatatcatgaaaaataactaacttgctctcaatagaactataattctttaggataattatatatgaataaaaaagtactcggtcttgaccttggtgtaagctcaataggttggtctcttataacgcttgatgaaagagggcatcccgcagaaatacttggtatgggtagtcgcatcgttcctttgacttctgataataagaaaaaaggaagttattttacggattttgaaaatggagaagctgcgactaagaaccaatataggacgatgaaaaggtctgcacgcagaggcttagaccgttatcagcaacgtagagccaagctcagtcgtttgttgagtgagtttggattagggttcccccgtcctttgatgagtctatcgcctttagcactatggggattaagagccgatgccgctacagagggtaaggtgatttccttagctgaactagggcgtgtactctatcacctcaaccagaaaagaggctatcggcacagcaaattcgatgaatcttctaagcaagatacaaagtatgtagctgccgttaagacacgctatgctgagctaagaaatgagtcgcttactatcggtcagtacatgtataggtatttatcaagttctgccgaagagagagcagatgcactatcgtgcgtgcattatagggtaaaagaccaagtttatcctagagaagcctatatggaagagtttgaccgcattatggctgttcaacagaaagcttatcccgaggttttgacttctgttgttctgcaaaaactgagagattgtatcttcttccagcgtccacttaagagctgtaagcatctagtgtcttactgcgaatttgaacgtaagactagagaggtgcaaatacctgtagttggtgctgatggtacgacttcatataagactaaaatcgtcgatataggtcctaaggttgcgcccgtatcctctcctcttgctgaggtttgtcgcctatgggagtcaatcaataatatcaggatttattatcccgatggagctgtatatccacttagtctagagcataagcaagccttcttcaataaacttcaagagagtgagtcgctcaagttctctgatgccaagaagattataggagccaaagctaaagataaactttggtgtaatgacctcctcaagagcggtatcaagggcaaccgaacaactgctactctgcgtaaactgatagaagattatccccaatataaggctttgcttcgcttcgacttgaagcaagaagacagctgtcgggtagacttgtctactggggaagtgcttccccttattagtgtgagctatctaaatgaacctctgtacaaattttggcatatcctatactctgtggctgagcgtgaggccatggggaatgctctgagaaagcagttgggcgtagagcaaggcgaccttgataaaggcttgcttgatgcctgtatgaagatagactttactaagcaaggctactgcaataagtcagccaagtttatgtgcaaactactcccttatctccagcaaggatatatgtatagcgaggctgcagatttggctggttataagcactccgacagcaaaactaaggaagagctagagcatagagagctcaagcctcgcatagagctcttgcctaagaatagtctgcgtcagcctattgtagagaaggtgcttaatcaaatgataaatctcgtgaacgcactaaaagataagtatggcgagattgatgaggtgcgtgtagagctagctcgagagcttaagatggggcgtgaagagcgaaagaagtatagtaaccgaaacagcaaaaatgagaaagataataagcgagtagcaaaagagatttctaaattttgcactccgacgaagaaccgcattcagaagtataaactatgggaagaggcgaaccatgcatgtatttactgcggtaaggaaataactaaacctagtctttttagcgatggagaggctgagattgagcatatcataccacgctcagtactgtatgacgactctatgagcaacaagacctgtgcctgccgtagctgtaataaggctaagaataaccgtgcagctatggattgggtacttactcagacggaagagtttcagaacgagtattttaagcgcctagaggaactagccaagaagagtctatctaatgggaagagacagagattgatgactctgcttaaagatatacccgaagacttcatagagagacatctcagactaactcaatacatatcacgcaaggctacagaaatccttaaagatagtattcgctatgtctggtcaagtgagggtagtgtaacctctacgctccgtcacctatggggctatgataaaatcctagaagatttgaactttgagcgttacaagtctatgggtgagactcataccgtacttgttaagagaggttcggcagagcaagaagtggagcgcattaaggaatggaataagcgtaaagaccataggcaccatgctattgatgccttagtggtggcttgtactcggcagtcttatatacagcgtctgaatagactcagcagtgaagaggataggcagtctatgcagtctgaacttggttcttcatactcaccctcaaaggaagagcgtatgcaattattagataaatggctgaccgctcaacctcatttctctgcacaagcggtgcgtgactatgtgcgtggcatcttagtttctttccgtcctgatagacgtacctatacgaagagccgtaataaggtcaaaatcaaaggtcgtgtgagcttacaaacaggtatcctaacgccaagaggtgcgctctctgaagaaactatttatggtgctatacatgtagatggtggaaaagagattgtttgcaagtgtcgcttagagaatttgcagaccaaagatgtccctaatatagtagataagggtatacagcgcattattaaggctagactagaggcatacaataatgatgctatgaaggcctttgcagagcccttgtactccgatgccgctcagacgaagcaaatacgttcggtgcgttgcttttctcgttgcgtgtataagaatatgataccattgcgccggaatgatgctggcgaagagattgcttttgtcaattctggaagcaatcatcatgttgcattctatcgggatagtaaggggcggctacaaaaagcagtcgtttcattctatcaagcgatagagcgtgctaagtatcaattacctatgattatcaaagactctagagcggtggtagaggaggccttggagcgtaatgtacctgactctgtgctctcggctttgcctcactctagctggacttttgtagagagtcttcagaagaatgaaatgttcttaattggcttgagcgatgatgaaatcgcaagggccataaaggaggcagatagggctacgcttaatgaccatctctatcgtgttcagactatttcagatagagattacaggtttcgttttcacctagaggttaagcaaaataaagaatctgataagattaatggaaaatttattcctaaattttatcgagtacgatcccttaaaacttatttagaacttaatcctcgtaaggttagggtagatttattgggtaatctaagccttctggagtagtattttcttctctccccacatcaccacttaattagcatcttaatcatgattaaacgaacgctttacttcgggcaggctgcctatctctcactaagagatgggcagttgctcgtaaggcttcccgcagaggagggtagctgtagtattcccatcgaagatatcggagtgctcatcacttaaagagcgcttctcagtgattgcgcgtacttgtttcagtgagtacacgtacttattgttgtaagtgtgcgtacttacttcagtgagtacgtcgtacttatttttgtaagtacgtagtacttttgggagacttcagctgtagtctgtacagacttcgccgagattttgagtttaggaaacgcaagccttgttttctctttgtgtaattcagatattttgatgccgcttgccgtgagtctgattagttgtaattagctttcaatttaagtcactttatctcgcgattacaatagatatttgctaaggtcaagtgttgctgtgttgtaattagctttcaatttacaaagttactacaaaaaagtgaaatgcggaaagatatagtgatagaattgagttacaagggttttagttgaagtggcgataattcgtgaagccattacaatccctgccgaagccaaatcctgacgccgcaacgttacttgttcgtaaccatgcccgaaaatgcgacaaacgggcacggagggcgaaacaagacactaaggaatagtgagttaccgacaactcacgcgaaaaatccggttacggaaaaagattgcgccgttcctctccgttttgcgtaccgacaccggactcttcaccaactaattttgaaaccaaaaaattaaggacaatgaagagtacattttcagtaatctactacctcaagcgtcaggtagtgaaaaaggacgggacagttcccgtcatgggacgcatcacagttgacggcagccaaacgcagttcagctgcaagctgactgtcgatccgaaattgtgggacaccaaaggtggacgtgtcacgggcagaagcacggcggcactcgaaacgaaccgtatgcttgacaagatgcgggtacgcatcaacaggcactatcaggaaatcatggagcgtgataatttcgtcacagcggagaaagtcaagaacgcatttcttggactggaacaccgccatcatacacttatgcaggtgttccgccagcacaacgaggactacgagaaacaggtggaggcaggcatgaaagccaaaggcacgctgttgaagtaccgcaccgtttacaagcacctgcaagagttcctcgacatccgctaccatgtgaaggacatcgccctgaaagagcttaccccggctttcatctccgatttcgagatgttcctgcgcacggacaagcactgctgcaccaataccgtgtggctgtatgtctgcccgctacggacgatggttttcatcgccatcaacaacgagtggctgacacgcgacccgttccgcgagtatgaaatcaagaaggaggaaacgacacgcagtttcctgaccaaagaggaaatacgcctgctgatggacgggaaactgaaaaacgccaaacaagaactgtaccgtgacctctacctgttctgcgccttcaccgggttatcgttttcggatatgcgcagcctcacagaagagaatatccgcacctacttcgacgaacacgagtggataaacatcaaccgccagaaaacgggcgtggtgtccaacatccgcctgctcgacatcgccaaccgcataatcggcaaataccgggggctgtgcgaggacggcaggatattccccgtaccgcattataacacgtgccttgccggtatccgtgccgtcgccaagcgttgcggcatcaccaagcatatcacgtggcatcagagccgccacacggcagccacgacggtattcctctccaacggcgtacccatcgaaaccgttagttccatgctcggacacaagagcataaagacgacgcagatttacgctaagataacgaaagagaaactcaatcaggacatggagaaccttgtggcaagattgagcggcattgaggaatttgcaggttgcaccatctaaaaaagaggagccatgaaacgtgacataatcatcatagataacaaggcggtcagcgtaaccggtaacgacgtatggatggccgccaccgaaatcgccggactgttccatacgaccgtcccggcagtgaacgccgccatcaaagctgtccgcaagtcggacgtgctgaacgactacaaggtatgccgttacatgcaacttgaaaacgggctgtacgcggacgtgtacgcgcttgaaatcatcatacccgtcgccttccggctgaacacctacaacacccacctgtttcgcacatggctggtgggaaaggcactctcacaagagaaacggcaggcatacgtgatgttcatacagaacggaaaaactgggtattgctgattgcgcataccccataagacaagaaacgggcagcaccacaaaaggtgtcgcccgtttcctttttcatgccagcgtcactccagcggcttgcggtagttcgcttccagtacctcgcgcaaccccgtttccgggtaaagcaccttccctcccaaaagtatgaagggcaacacgcggttgttgcggtattcctgcaaggtgcgtcggcttacacggagcagttccgccacctcgccgtccgtcaggtaacgctccccgtccagcggaggacggtaattctccagaaatgcggacagccattttgagcctttgcgcatatcctgcatcacagaggctatcggctcgtcttccatcgtaaaaacatcgttgttctcgtttatcataacttcggattcagtgggtaaataaatcaaatcatctgccgtgcggatagagtgtaccgataagcggtatcaaccgctttacctcctccggcttgtaataaaacctgcggtttatctgcgagtagccgataagccgcctgtcacgcagcgtctgcaacgtacgcgggcttattctcaactgcccgcagacctcctcgcccgtgagccatctttccatgcgccccgtgtcgcttttgcgcctcagtgcggcgaccttctccgagagtgcgccgaatgtcgccaccatcatctcgaaagtctttttctcaattgatactatttccatattcatgcaattatcggtttgcccgcaaaggtaacgatacactcccggacacgtgccgttttccactgaaaggctgcctgttgcgccgtttgaccgggttacggagccatcttccgtaaaaatcttacgtgagtcacgtagtgagttgttaaagccccttttgtttattgccgaattttgccgcagatacaaaaagaaaggactgaatatgaaagtgataacaatggaaagttccgtcttccggtcattgacggaacagatagcggagattgcggcacacgtccgtgccgtctccggtgacaagagagcggcatcgcccgacaggttgctcaccacacgcgaggcggcgcacctgcttaacgtgagtacccgcaccctccagcgtatgcgcagcgagcaacgcat

SEQ ID NO: 3320 - DNA, 15152 bp, synthetic construct
  source 1..15152: mol_type = other DNA
  misc_feature 1..15152: note = Synthetic
gaggcggaagtgaccaccgcagctctcctcacggtcgtgagcatcacgagccatgagctcaccgatctcgatgaagtctgctaggcgaagagccttctcaagctctacgttgaggtcatcagccttacctgggatgcggacatcgctccagaactccttcttgagtgccttgagctcaacgatggccttctcgaggccttctcgctcacgtcccataccgacgaagtcccacatgatgtggccgagcttcttgtgtaggctgtctacggactgcttccccttgatgctcatcaggcgagctatacgatccttgattcccttctctgcttcgtcgaactcaggacggtcggtgctgaagcgtggtacctggatctggtcagccagatagttctggatggtgtaggggagtacgaagtatccatcagcgagcccctgcatcagagccgaagcaccgaggcggttagctccgtggtcggagaagttggcttccccgatagcgaagagcccgggtatggaggtcatcagttcgtagtctacccagataccgcccatggtgtagtggatagcggggtagatcatcatcggagtctcgtaggggttgtcgttggtgatcttctcgtacatctggaagaggttaccataacgagcctctacgacatccttccctaggcgctggatagcggaggagaagtcgaggtaaacggctagacccgtgttgttcacaccgaagcctgcatcacaacgctccttagctgcacggctagctacgtcacgaggaacgaggttcccgaaggcggggtagcgacgctctaggtagtagtcacgatcttcctccttgatctctgtaggacggatggtaccagcctggagcttcttggcgtcctcgatgttcttgggtacccagatacgaccatcgttacggagagactcggacatcagcgtgagcttggactggaactctccgtgtacggggatacatgtggggtggatctgcgccatacaagggttggcaaagtaagcacccttcttgtagcactgccaagctgcagagccgttggaggccatagcattggtcgagaggaagaaggcgttaccatagccaccagtaccgatgactacggcatgggcagcgaagcgctcgatcttacctgtgacgaggttacgagcgatgataccacgggcacggccgtcgatgatgacgacgtcgagcatctcgtagcgggtgtacatcttcactgcacccttaccgacctgacggctaagggcagagtaggcaccgagtaggagctgctgtcccgtctgaccacgagcatagaaggtacgtgagacctgcgcacccccgaaggaacggttgtccagtagaccgccgtattcgcgagcgaagggtacaccctgtgcgacacactggtcgatgatgctattggcgacctctgccagacggtagacgttagcttcacgggcacggtagtcaccacccttgatcgtatcgtagaagaggcggtagacggagtccccgtcgttttggtaattctttgcagcgttgataccaccctgagcggcgatggagtgtgcacggcgaggggagtcctggatacagaagttgaggacgttgaatcccatctcagccagtgatgcagctgcagaggcacctgccagccccgtaccgacgacgatgatatcgaggcgacgcttgttggcaggattgaccagcttctggtggtccttatagtttgtccacttctcggctaatgggccggcggggatcttagaatctatctgtgacataatatggatagggctaataacggatcgcttgcttatgcgctaagtctaggactaaaggctacaagcacccccgcagagggaacggaagaagtaacacaccacgacggctgcgaagccaaggatgatgatagtggcatagatgttcgagatcttgtgcagacgatcgaaccacactctgttgttaaacccgatggtatgcagcgagctccagaagccgtgtgctaggtggaaccatagggcagccagccacacgaggtagagcacgacaaagatagggttggagaaggtgtagcggatgagtccagcaccgtccgtaggtccagagacgccctcgatcccgaggtcgtgctggcccatgatctctgctagctgcatcttagcccagaagttgaagaggtgcaggcctagtccgaggagtacgattacacctaggaccatcatgttctgcgaagcccactctacgcccttggggcggtcgatgacagcatagcggtcgttgcctcgtgccttacgattctggttcgtcaggatgaaggcatatgcgatatgcacgatgaagagtagggctagccccttcgttgccacgagggcataccagttcgcaccgaggaattcgcagacagcattatagccttcctctgagaagagggctacgagattcatcgacatgtggaaggtcaagaacaggataagtgcaaggcctgagatactcatgaccaacttacgcccgatcgaagatttgattaaccacgacatacaagttctatttaattatgatctgttgatacacgtcacacatggcaatagggatatggaccattcacccatacccatcctcctcactagcatagatctcctcaaggggttccctatcgccctacaaagatagcttaattaggtatataaagtactattattagcgaaaaaaaggcataatcgtactagcctatatcccaatatgtaggtagatgaaggcttgtagagtgctcttattcccttattttatacctagaataagctaaccatatcgctgtatactatctcccctgctccccgaaggagcctccgggatgacgtgtgtagggcactaggatagagggacgaaggccgagggtgggggtgtcaggagcctagcctagatacaggtgtatctttcccctaggctctgcttaccctagtgtacacctataccctaggagggtggagtatacacgtgtgtacactatagtatacccacgtgtacacacttgtgtacacgcgtgtacactcatgcgctctcggtatgagcccaggagggtgctctaggagagaataactataggggataacactggcgctacagagctatgggcgaggctccctcgggtatacaatggatatccccgagggggtatgcaggaggggtacatgtgctggctttggcctacgtcgtagcctctgaggggcaggtactccagggacaataggagcagagctgctggctacagtagtggcgatgtaggtagagtagggcttggctgtgcgaggctgtctctacgggtagcccagccgaggcgaagagacgtgtgatgcgattgctctctgccgagagtccgtccagcagggagaggggagcgtactcctctccttcgccaccatagtgtcgcctccaggtgaggcgataggggatgaggacattgatgatcagtaggtcacagctcgcaggactgaggacgctaccggtgcctacctcgccctcttccctgcgaccctctcgggaggggcgaaggagctcataggcctccgttaggctgtccacacggaggctctcctcggctaggctctccctctggcagagtagccccgccagctgtagtagacgtcgctcggggaggttgctgggtcgggtgcgtgctcggcgaaatgtcccgctaggtagagtgcgcagggcatacttgtgggcaaggaaggtatattcacgctctaggtgctctctgtagtctccctcggggaggaagctaaggagacttgcttgcccgaggagtagcgcctcgatttggtccaagtgatcccgatgcttcatcagaatggtgtaggggaggctaagggctagtcgttccatggcttcgttgttgagcccgaagccgaagtagcgcacgaggagggagtagaaggtctgcccccagtctccttcgcagcggtgtagtagatcctctaccgccttcgtcttctctcgcacgcggcagtgcagtagacatcgaagccaagcctcacgtacgacaggactgagctgggcaaggggggctgggctgcccagggatccccctggacagcagggtagggctgtgggggagggactatgcagtacgttcttcggctctaggtgctgggggatcatcagcaggcaggtcggtagttgcgctccactgtccaacgctatggggcggttgtctagctccacgacatgtaggatcaccgagcggtaggcgggatcagtgttgtggtggtgatggtaccactcggcggaggcatggtggatctctacacagccgacccagaggaggtcattgatgcgaatcttggcggcaaagaagtccgggcctgcatctgtatttagttctccgggctccagcacctctatgcgagctcctgcgagctcccctgtcgggatgagttggtcgtagaggccatagcgccagatgtagtgtaggtaggcttctctgtgtctcatggtggtcgtcggtcgtcggggggaaggtcaatcgctgagctcgtcgtagggcgggatatgctcgaggaaggtataggagccctgctcatagtcaatccggcaggcgaagtgctccatcccgttgcttaggatgaggtagggtacacgaagcgtatagttgtaacgaaggatctgctgaagtactcgatcggtaatgcggatgtggggtgccttgtactcgatcagtacccgaggggtgagctggcggctatagagtatggtatcacatcgcttggtcgtcaagccgacctgtatggttacctcgttcatcatcagctctcgggggtagcctaggtgctccatcaggtagtgcacgaagtgctggcgcacccactcctcgggggtgagggtgacgaaccgctggcggaggtcatcgtagatataggtcttaccctcctccttcctcagtcgtaggcggtaatccgggagatttagcttgatcattcttatctttgtcgtacgtgtcccctagggcacgcccacgaagttagacaataaataccgatatggctacctacgatgatatcgccaaggtgatcaagaagggtgcgctccagcccgtgtacctcctagcaggggacgaacccctctatattgaccgccttgccgagctcttcctgacgaaggtcatccccgaggatgagcgggactttaacctcactgtcctctatggggcagaggtcaccagccgagacatcctgctcgatgctctgcgcttcccgatgatgggggagcgggtcctcgtcctcgtgagggaagcgcagcaggtgcgagacctcgaccagatagctagccacctagatgacctaccgcagagtacctgcctcgtgctctgctacaagaagaagcccgacaagcgcaagagcctctacaagaccctcaatgagcgcaaggccgtctacgagtccaccaagatctacgactccaaggtccccgacttcatcgtgcgcaccttcgccgagcaccatctgacgatcgaccagcgcacggccttcctcatggccgaggctacgggtaacgacctagagaagatcctcggcgaggttgggaagatcgccctagccctcgaggggaagagctctatcgtgcgccccgaggatatagagtactatgtaggggtgagcaaggagtacaacaactttgagctcctctcgagcctcatcaagcgggactcagctcgtgcctaccgtatagccttctacttcgcagccaacgagcgtagtcacccgatccaggtcaccttggctaccctctttggcttcttctccaacctcatggctgtctactacatcccccagcctaacgaacgttcgatagcagaggcgctgaaggtctctccctatgccgctaaggactatgacctcgctcgccgaagttataccgctagccaagtcttcgctatagtccatcatctgaggatggtcgatgcggcctctaagggggtcgatgcctctctaccagcctcggagctctacaaggaattagtctcacttatcctatccgcctaagttccccctccgctggggctctaccattcccaaggcttaccctattccgtatatataactaaagaggctacctccaactcatggaggtagcctctttatctggtaggctatacgagatagccggtgaatcaccttaggggattagcgacggatgccgagttccttgatgatggcacggtaacgctcgatgtcgatcttctggaggtagtcgagcatacgacgacgcttaccgatgatcatacgtagagcacgctgtgtgctgtagtccttcttgttcttctgtaggtgacccgttaggtgggcgatacggaaggtgaagagtgcgatctggctctcaggagacccagtgtccttagcggacttaccatgcttttcgaagagctcggccttcttagctgaatcaagatacatattacttgtacttatatagtgaaacaaaataccgccgtcgcaagctatccctaccacccctcacagggaggaggaaagacagacgacgcatcggatcgtggcgcaaagatacaaagaaagaagaagataagccccgaatgcctcagttggatctgcatttgagaccgaatcctaaacgatcagggtgggtatatggcatgctgtggccagccagtgcggcgggtggagggtaggaggtaacttgtgaattagctaggaagtcagtaacttaggccgtgtaattgggagacctcttgtactggtgtatggacacaaaaaaagacgaggaccgaagtccccgccttggatgttttcacaacggaataatccttattgtgattagcttttcaaatcagtaccacaaaggtaaccaaaatatttatacttcaaactaaacgcagagtacaatgacgaaaaaagtacttggtctcgacctcggtgtcgggtctatagggtggtgcctaatcacccttgacaaagatgagaaaccacagagtatcctaggtatggggagccgtatcgtgcccctctctacggatgatgccacggaattcactcagggaaaggcgatcaccaagaacaagatgcgtacggtggcacgcaccatccgcaagggcatggaccgctaccagctacgacgggaggctctaaagaaggtgcttagtgagcatgggatgctccccgatgagtccctcatcaagctccctctactggagctctgggagctacgagcacgagctgctaccccaggaaagcagctgagcctcactgaactgggacgcgtgctactacacatcaaccagaagcgaggctacaagcacgcaaaggctgatgaagctgccgaggctgaggccgagggtaagtccaagaaggaaaaggagggctatgtagctcaagtcaaaggacgttaccaagcgctaagggagaaggggcagaccatcggtcagcacttcgctgaggagctaagagcaaataaacagactgcctccagaggagtctactacacctaccgcatcaaggagcaggtctatccccgagaggcttatatcgaggagtatgaccgcatcatggcggtgcagagggtgttctatcccaaggtcctcacagatgaactaattcagaggatacgagaccgcatcatcttctatcagcgtcctctgaagtcctgcaaacagctggtctccacctgcgagtttgagaagaaagagcgggtcgtacaagtgaagcgcatcaacaaggatggtgtcgaggagctcgtcgagaggaccatcaccattggccccaaggtagccccgaagtcttcccctatcttccaggtctgtaaggtctgggagtccatccaaaacatccgcctttactatcctgatggcacagaacgaaagctggagcaggaggaaaagcagaagctcttcgactatctccagaagaacgataagcttagccttacggcacttcgcaaggtgctcaagattaagccaaaggagaagctctggtgtgacaagctacttgataaggggatagcagggaatacaactacagctatcctacgcaaggccttcaagggctatgagcactatgagcacgataaggatcataatccattccaatttgacttggttcgtagggattctcacgaggttgacgaggatggagttattcgccccatcgtcgatgagtcttaccaaaacgaaccgctctacaagctctggcacatcctctattcaatcgaggataaggatgatatgcgtcgtgccctagtcgggcagctcggtatcaaggaagaagacctaaataatgggctgatggatgccctctataagatagacttcgtcaagcagggctatgggaacaagtctgccaagttcatctgtaagctccttcctcacctccaggaggggaagatgtatagcgaggctgccgaggctgctggagtacggcactccgatagtatgactgctcaggagcgagatgagcgtagcctgctggaggaaatcccactgctacagaagaatgcccttcgtcagcctgtagtcgagaagatcctaaaccagatgatcaacctcgtcaatgcgctcaagagggaacatggtgagatcgatgaggtgcgagtcgagctagctcgtgaactaaagatgagtcgtgaggagcgtgaagaggccactaagagcaataatgcacgtgaaaaggaaaacaaggctatcgccgaacgtataaaggagtatgacattactcctacgaagtctcgcatccaaaagtatcgcctgtggcaagagtctgccgagagctgtatttactgtggtaagcgtgtctgtgtcgtgcaattcctcagaggtgaagagatcgaggtagagcatatcattccgaagtcaatcctcttcgatgactctatgtcgaataaggcctgcgcctgtcgctcttgtaaccaagagaaaggtaatcgctttgcgatggagtacatccagtccaaggggtgggagcaggactacatcaagcgagtggatagcctcttccacgacaagaagatatcctactctaagcgtcagcgcctcttgatgcaacctaaggatctacccgaagacttcatcgagcgtcacctacgactctctcagtatatctcccgtgaggcacagggcattctccgtaaggggatacgactggtgagtgcctccgagggtagtgtcactgctaagctccgtcagctatggggctatgacaatatcctgcgagacctcaacctagagcgatacagatctatgggtgagacagagaaggttaaggtagagcatcgggatggagagcgcaccgatgagcgtatcaaggactggtctaagcgaaaggatcatcgtcatcacgctatcgatgccctcgtcgtcgcttgtactcggcagagctatatacagcgactcaatagggtgaatgcagaggctgatcgtgaggagatggatgcattcatcaaggaacagcagcaacaaaagccgactcattctaagggtgagaagctctccctactagaaaattggctaatcaaacagcgtcccttcgcgactgaagatccgactaaagatccgactgaagaggtgaagaagcacgtcaagaaaattcttatttccttccgcccaggtaagcgtaccatatcccgaggtcgtaatatctacaagcgttcgggtaagaccgatgtgcagagggagcgggtacttatcccacgaggagcactctccgaggagaccatctatggtgtgatccgcgtcaatggagaggatgaggtcgtatgcaaatatccactccagagtctgaaagcaaaggacgtcgtctccattgtagacgaagtactacgcgaaaaggtcagagagcgtatcactcagcacggagagaaggaagcctttgcaaaaccgctttatctcgatgaggcacagacgcaagaggtacgtagtgtccgatgctttacaggtaaggatcaagccaagcttatacccctcagatacaacgacgagagtgaggcggtcggctttgtcgccccggggagtaatcatcacctagccctatatcaggatgaaagagggaccttggtcgagtcggtggtcaccttctggcaggccatctcccgtattcgctatcgtttacctgctatagttacccacccgagggaggtgatagagcaagctctctccatccccgagctcccagaggaggtcctaggggcgctccccaaatctaggttgcgactcatggaggtgctacgcatcaatgatatgttcctgattgggatgaaggatggggaaatccaagctgcgatagaaggtgaagactatcctacgctgagtcgccacctctatcgggtacagaagctttcatctatgtcttatgttttccggtatcatctcgagacagaagtcaaagacgaaaagaatacgtcgggggaaatccctaaattctatagaattaaaagcttaggaagatatcaggagcttaaccctcgcaaggtgaagatagacctcctaggcagaatatcccttgcctaagtctataagctagtatcatgatgaagcataccctttacttcgggagccctgcctacctcgcccttaggaataagcagatcgaggtgcgtcagccctgtgagggggaagctaagtgtcctgtacggacgatcccaatagaagatattggggtcgtcctacttgaccatcagcagatcaccatcacccatgggctcctgcatgcactcctggagaataactgcgccgtagtaacatgttctcctagtcacctgcctgcggggcttctacttcctcttgatggacacacactccagaatgaacgcttccgtacacagctggaggcctcccttcccctgcggaagcaactctggcaacaaaccgtgcaggctaagatcctcaatcaagccacgctcctcgggcaagtccttggggaacctgcgaagaacctacttgcctgggccaagcaggtgaagagtggcgactcggagaacctagaggctcgagcggcggccttctattggcgcaacctcttcatctctctgccgggcttcgtccgagagcgtgaggaggctgctcccaacgccctcctcaactacggctacgcaatcctgagggctatcgtcgcccgtgctctcgtcagctgcggtctactcccgacgctaggtatccatcatcataacaagtacaatgcctactgcctagcggatgatatcatggagccctaccgcccctatgtggatcagttggtcgtcgagatctgtgaggaggagattcccacggcactcaccaaggagctgaaggtacagctcctctccatccctaccctggatgtcgagatagagggacagcgtcatcctctgatggtcgctgtctcgctgacggcgggctctctactgcgttgctttcagggagaagcccgcaaactatcctatcctatactccgatgaaagcaagtcgcctaagtgaatatcgtgttatgtgggtctttgtattctttgatcttcctacctatacgtcgctggagcgtaaggcagcctcgggcttccgacagagcctcctcaaggatggcttttcgatgtttcagtactctatctacacccgtcactgtgctagtgccgagaatgcagctgtgcatgtacgacgggtgaagggtatgcttcccgaggagggtgaagtcgtaatcatgacgatcacagacaagcagtttgggatgatggagcacttctcgtctcactgcactacgaagcctcctgcagtgtctcctccccttgacctcttccctgacgaagatatttttcttctctaatcaaaggaaaagccagtggtactccaccggcttttctttttctataaatcctcgtaagctactcatgcctagtctgctatgcgagatcgggttgcattagcgatacgaaggtactgaattgaaagctaatcacaactcacaggatatctagttatgacacgtgcaggttgcattagcgatacgaaggtactgaattgaaagctaatcacaaccccgctacaactcaaggagttgcaaactatgttgcattagcgatacgaaggtactgaattgaaagctaatcacaactgtaggccaaaagatacaatctgaaatacggttgcattagcgatacgaaggtactgaattgaaagctaatcacaactcccgtctagttgttaacgatgacgtagatgttgcattagcgatacgaaggtactgaattgaaagctaatcacaactaccgccaactctggcgcggcttcgagaacgttgcattagcgatacgaaggtactgaattgaaagctaatcacaacacttgtattataaggatgtgcaagactattgttgcattagcgatacgaaggtactgaattgaaagctaatcacaacacggagagtttcggcgaaaaggccaattttgttgcattagcgatacgaaggtactgaattgaaagctaatcacaacttacgttcatcagacaattctcccccagcgttgcattagcgatacgaaggtactgaattgaaagctaatcacaactacgcctaccaagatgcgcgtgctagttacgttgcattagcgatacgaaggtactgaattgaaagctaatcacaacgcgcctgctgcaatgcacttttagtcattgttgcattagcgatacgaaggtactgaattgaaagctaatcacaacccagctgaactaaagaagttgcagtctgatgttgcattagcgatacgaaggtactgaattgaaagctaatcacaacggtgaatgtcttgttgtattcgtatgtgaagttgcattagcgatacgaaggtactgaattgaaagctaatcacaacctttacatagtcagcatcgaactcttctgtgttgcattagcgatacgaaggtactgaattgaaagctaatcacaacagtctcgaggtactagtgtggatttcccaagttgcattagcgatacgaaggtactgaattgaaagctaatcacaacactggagagggtgaaggcttcacgagatgggttgcattagcgacacgaaggtactgaattgaatgctaattagaaccgaaacactctcacattatacggactctgggacgtttaaatgggagaataatacactatgggatggttcgagtaaggaaacactaaaacaagagatggagaggataggacaacggggcacaaagatgagagctctcaaaatcgaagggcagacaatctacctcaagattgtagtgcaaggccttcaactgtaatgtcgagcaagaaaactagggaatgcaatcttagcttcttgggtactctggtaccctttcgcaaatcgattaaagagtaacgccttcagtgatgtgggtatagagatattgtcagtgctgatgtgtaacctgtgatagtcagatagcatatcttcacttgtgcctgacatcacccagtgtgactcatagaaccaaagcatatccttgtcttgatccacaccttcgtatgggctctcttcctctcccttatagtatctgcactgcttgattagttcttcctttgtaggcatatctcaaaattctcctctaagttctatttcttattctttttccgtcttatttcccccatccgcacttcacacagctttcctatgtaggggcgaacctccgtacttctatacgcccagagggtgtggatggataccccaagatcatcaggggtacaagcctcgtatataggagctatcgagccaaagcggtaataccttccaccatacgctgcattagcgatacgaaggtactgaattgagagctaatcacagccgacgagggtgacttttttctccgagtgtaatttgctctgtatcaagtgtgagtagaggaccaaaacgttcttaccgagagcgcaagtgcgctctcggtaagaacgtccccatcaccttacataggtgatgggagcgttctttataggagcgtaagagaggtcttagtatgttcgtttgtggctcctcagtatgccgagtatgaagagggtgatatgttgcagtgattagggtgattagctctatcagacctgttgggtttgatgaccttcgtgcagtggctatctctatactcgtggagtggggtattgtcgtaggtagttctatccttgtagcggtgcgtgcagtggctatctttggtctcgtggagtggggtattgtcgtaggtagctttatccttgtagcggtgcgtgcagtgcctatctctcttctcgtggagtggggtattgtcgtaggtagttctatccttgtagcggtgggtgcagtggctatctctatactcgtggagtggggtattgtcgtaggtagctctatcctcgtagcggtgcgtgcagtggctacctctattctcgtggtgcggggtgtcatcatggatagttctgctctcgtattggtgcgtgctgtgggtaccttcagtagcatagggtgggggaagtattcccacggggaaggagggttagcgggatagcctacggggaagggtaggggcgaatgccctatctttgcgctcgtgatccatcctgtgtggtggattgttcagtaagtctatggatacagctcatctcatcgctccactgcaggagcgtatcgcccgtagtggtctctctgacccacgcatcgccgtcctcgtctctggcggggtcgatagctccgtggtcgtgcacctactctgtacggcaggctatcgtcctacgctcttctatatacagataggtatggaggagcgaggcttcacggactgctcgtgggaggatgacctagagatcgtgcgtcacctagcccgtcagtatgactgtcccctagaggtcgtatccctccatgaggagtactgggcgagcgtcgtgcagtacacgatagatacggtgcgccgagggctgaccccgaaccccgatatgatgtgtaacaagctcatcaagttcggctgcttcgagcagaagtgggggcatgagtacgactttatcgctacggggcactatgctacgacgaccttcgtcggggagcatctcttcctcgccacagcacctgacccggtgaaggatcagacggacttcctcgcacagatcaacttcgcacagatccgtaagctcctcttcccctcggggcacctcctcaagagtgaggtgcgag

SEQ ID NO: 3321 - DNA, 14879 bp, synthetic construct
  misc_feature 1..14879: note = Synthetic
  source 1..14879: mol_type = other DNA
aacttgcccgtggggttgacgtagagcttgaagtccgcatgctcgatctgctcgaactcggcggcgtagccagcgaagacgcggggcaggaggtgctggcggatgtcggccgtgatcttggcctgcatcgcagcgtcggcagctgcctgtgcctcggggctcttgtcctcgggctggatgaactcatcgtgctgcgtgctgatgacgatggtgtcgatacgcagaggcttaccctcctggctgtactcgaccgtgacctggctcttggcatcggggcggaggtagggcatcagctcgggctcctccttacggatgcgtgctagctcctccagtagcgcgtgcgagaggtcaagggtcaggggcatataggaaggggtctcgcggcaggcgtagccgaacatgatcccctggtcgcctgcgccctgctcctcagggtgcgtgcggtctaccccgcggttgatgtcggcgctctgctcgtggatggaggagagcacggcgcagctattgccgtcgaagcagtagtcactcttgttgtagccgatctggcgtatgacctcgcgggtgatctcctggaggtctatgtaggccttgctcttgacttcgccagcgaggatcacctgccccgtcgtgacgagggtctcacaggcgaccttggactgtgggtcgagggcgaggaagtggtcgaggatggcgtcggagatctggtcggcgactttgtcgggatgtccttcggagactgactccgaggtgaagaggtagctcatagctatatatcttgtagttatttggttgataggaggctgagcgcctataacgtaaaaagccttggctgcagtggggcaaccaaggcgcgataagggcgttcactctgtcctgccgcagcgctcgagccgctaggctactgggggcgacgtgacgggtttagcattttttcgcgtggttgcaagcatcacaaatctgtccacgtactggtctcttagccgctgcaaaggtacgaaaaaaagtgatgtagctcatctcgccccttgtgaagcgtcctagggagcggggtggggtgctaagtgcctcgcttccctcagggcgcttcggacagaatatgggagctatgggctgctatacctcaaggtcgtggggcgtaagggatttggcatttttctcagttttggctacgtttgtagcaagccctgaacgtgtaaggcactaataacagtatagcatgcaaaaagtcttaggtctcgacctcggggtcggatccatagggtggtccctcatcgccctcgacgaagacgagcaccccgccgagatcctcggcatgggctgccgcatcgtcccccttactaaagaggaaaataagtttgccagcggtggagggattagcgagaatgcaaagcgcacgcagatgcgcaccatgcgcaagatgctcgaccgctaccagcagcgccgcaccaagctcgccaacatccttcgcgagcaccagatgtaccccgacgaggcactcatgcagctgccactcatgcagctctggcagctgcgtgccgatgctgcaacgcctgggcgacagctgagtctacccgagctggggcgcgtcctctaccatctgagccagaagcgtggctaccgacacagcaagagcgacgagagcggagagaaaaaggacacggagtacgtcgccaaggtcaagagtcgctaccagcagatccaggaggagggcctcaccgtgggacagcactttgccaagctcctcaaggataacaagcagcacagcgagcgcggcggcgtgtactacaactaccgcacgaaggatcaggtcttcccccgtgaggcctatgccgaggagttcgatcgcatcatggcggtgcagcgcggcttccaccctagcctgacggatcgccttatcgcgaagctaagggactgcatcttctatcagcgtccgctcaagtcctgcaagcatttggtctcttactgcgagttcgagcgcaagcaggtcgagctcgccgtcaagcaagtggagcgcgacggcacgatcacctacaagaagcagctcgtagacgtcgggcccaaggtggcgcccaagtcctcgccgctggccgaagtatgtcgcatctgggagaccctcaataacctccgcctctacttccccgacggcagcgagcgcaccatcacgcaagaggagcgccagcggctcttcgactacctgcaggagaacgatgccctgagcctcgcccagacgaaaaagatcctgaagtgtaaggacgaagacctcttctccaacatcctccttgaaaagaagaaaaaggagaagccgacggaaaagaagaagaaaggaggaaacgaggaagacctctccttcagtgccctccctgaagaggagcaggcaaagatggaggccgaaacagcaaaggatagagaagaaaaagggaatcccgaagtaaagatcaaaggaaacacgactaccgcgacactgcgtaaggcttttaagggctataaacagtacctggagctgctgtccttcgagctctccgaggaggagaaggccgatcccgagacgggtgagctgcgtcctgtcatcagcgagcgccatcagcaggagcctctctacaagctatggcatatcctctactccatcgaggacaaggaggctatgagacgagcgctgacgaggcagctcggtatctccgaggctgatctcgacgcagggctcctcgatcagctcttcaaggtagacttcgtcaagcagggttacgccaacaagtccatcaagttcatcagcaagctcctcccgcaccttatgcaggagcagacgtatagcgaggcagccaagcgagcaggcaagcgccattccgagagccttaccgcggacgaactccagcagcgcccgctcctagacaagatccccgtgctgcagcgcaactcgctccgtcagcccgtcgtggagaagatcctcaaccagatgatcaacctcgtgaaccagctcaaggcagactacggggagatcgatgaggtacgtgtagagttagctcgcgaactcaagatgagccgcgaggagcgcaagcgcactacgtcgaatcagcgtaagaacgaggaggaaaatcagcgtatcgcaaccttgatcactaaggactacgggctccatcccactaagaccaggatacagaagtacaagctgtggaaggagactgaggggcactgtatgtactgcggtgaggccgtagacatcaagcaattcctcctagggagcgaggtcgaggtagagcacatcatcccacgctccatactctatgacgactcgctgtcgaataagacttgcgcttgccgcaagtgcaacagtgaaaagaagaatcgtacggccaaggaatatatcctaagtaagaatgaggagactcagaagaagtataacgctcgcgtgcaggagctcttcgagcgacacaagatcagctctgccaagcgcagccgtctgcacatgacgctcgctgatatccccgaggactttctcgagcggcacatgcgcttgacccagtacatctcgcgtgaggcacatagcatcctcaccaaggggatacgctgcgtggaggcctcctcggggggcattaccgcgaccctacgccgcctctggggctacgacaagatactcaaggagctcaacttcgagatctacaaatcacgaggagagaccgagacgatactcatcgaaggggtacccaccgagcgtattgcaaactggtccaagcgcaatgaccaccgtcatcatgctctggacgccctcgtcgtggcctgcaccgacaggaaatacatccagcgactgaaccaccagaatagcgaagcggatagtgacagtatgcatgatgaactacaagaaacaggggggaagcatacagaccaaaagcaactactagatcgctggctgagggtgcagccgcactttgccccgcatgtcgtgcaggccaagattgcagagatcctcatctcccttcagcccgaagaaaagacctattcacgaggacggaatatcatcaagcggaagggagaacgctttgtccaggagggcatcctggtgccacgtggagaactatgggaagcaaccctttatggctctatccagcagaaggggctacagaggttcgtctataagtgctccttgcaaaaactgaaggaggcgaatcttaagtccattgtggatcaacgcctgcgtggtatcatcgctcagcgtctcgccgagcatggcaatgatcccaagaaggccttcgctgagccactgtactcagaccaagctcagacacagcaggtacgctctgtgcgctgctttgcaaaattccgttctggcaccctcgttccactacgccatgatgcccaaggcaaagctaaagccttcatcgctcctgggaataaccatcatgttgccttctatacagactctaagggacaactacgagaatatgtgaacagcttttgccaagttatagaacgggtacgttttggcctaccgcccatcatctataaccctcgcgctacgatggagcaagcccttaccatcgctgagctccctgagtctgtcctcaaggcgctcccgccctcggattggtctctgaaagagtttatccgaaagggtgactccatcttactaggaatgagtgacgaggagatagcagccgctctagaagctaaggactacagcctcctcagcctacatctttattgtgtaaggagtgcatcgaggggcgactattggttccgccatcaccttgagacaaatgacgagaaaaagaagaatgcggtagggaatgtccccaaattttataggaagcgtagtccaggctcctatactgaactcaatcctaggaaggtgaagatcgaccgactcggaaggatcagcctcctctaagccatcaaagcttgtatcatgataaaacgcacgctttactttgggaatcctgcttatctgtcgcttagggacagacagcttgaggtacacctaagacaggattcccctagtaaaggaccatcacagacgatcccgatagaagatatcggggtcgtcctccttgatgatcctcagatcaccattactcacgctgcgctgaatacccctcccgaactcgggttggatcgctactgcgaaggcacataaacgagagaccaatcacaacctaaactttggcaagtgcaggatcgagagccgcgcggcgggctactctagacagtggcacggcgggcgacaaaaggactccccccgcggagcgagctgctcaaggcagcggcgcttcgcggggggagttcgtgtttagggggcggggcagcggagtacctcagccttggagggggaggcttagcctaccgcagccgtgagggcagggattagctcacctagccttgggccttattgcacctcgtcgttagcttacttcacctcgcccttgatgcggagggtgaagccgccatccttgccgttgctgtagacagcgatattcttgtagaaggggccggggcggcctgcggggttgtaggtcacgacgaccttgccctccttgcctggggcgatgggctcgcgggtatgctcgggcgtggtgcaggagcagggcgtggagacgcgcgtgatgatcagcggagcgtcaccgatattcttgatgataaaggtatgcgagaccttaccattagcctcgaggatcgtgccgaagtcgaactccgtcacgggcgccgagatgacagcccccttggtagcctgagctagggcaatccccacgaagagcaggagcgcgctgaggataaaagcaaatcgtttcataatctatcgttattaagtgatcacagccgtcccccatcaaaggggagggctagcaaaggtaagtaaataacgcctagcgggcaagctagcgtatctctgaggcctcggcctcgggcagatcgtcccagtcgaactccagctcttcgccttcgtcccactcctcatcccactcgtcctcttcctccagctcgggcagctcctcatcctcgtcctcccagctgaggctggtgacgtcgatggtctgctggatgaggctctcggggcggtgcttggtctcacgattgagctcctgccacagcaggtccttgagctcggtgaggcccatgtgcgctgccgaggagatgaagacgatggtcagatccgcgtccagctccttgtggagctcgtccagcagccagccctggatctcctcgtcgatgaggtcgcacttggtgatggccagcaccttgcgcttctccacgagctcgcggttgtacttgaccagctccccgagcagcaggcgatactcgtcggcgatgtgctcggtgtcggcggggatcatgaagagtaggagggcattgcgctcgatgtgacggaggaagcgcagccccaggccacggccctcagcggcaccctcgatgatcccggggatgtcggccatgacgaaggagcgatcgtcacggtagcgcaccatgccgaggttgggctcgagcgtggtgaagggatagttggcgatcttgggcttggcagccgtcaggacggagagcagcgtggacttcccagcgttgggcaggcctacgaggccgacgtccgccagcatcttgagctggaggataatggtacgctcacgggcgggctcgccgggctgtgcgtagcggggcgcctggttggtggacgtcttgaagaaggtattccccttcccgccacgaccgcccttcagcaggagctcggtctgtccgttgcggttgaggtcagtgatgaactcgcccgtctcagcatcgtagaccgccgtacccacgggtacctcgatgacctgatcctctccgtcggcacccgaggagcgcttgccgctgccgggggcaccgctggtagcgatgacgtggcgctggtagcggaggtgcagcagcgtccaatagttctcattggcacgcaggtagatgtccccgccgcgaccaccgtcgccgccgtcggggccacccttggggatatacttctcgcgtcggaagtgcgtcgagccgcgaccgcccttaccagagcggcagtagatcttgacgtagtctacgaagtttgattctgccatagtcggctatacattgataataaggaaaggcggacatccgaggcgtagcccctcgggagcgaggacgactactcttcggatgccgcgccttgtcctccaaccgtagtggtctggcccctccccgctcggggaagggccgagatgagggggcttagcctagtgcgtcgatcaccgcagcgatgcgcgctgtgatgtcgctgatggcaccgctaccggcgatggcgtggtgcacgcccttctgggcgtagtactgggcgatgggcgccgtctgtgcgtggtagacctcgaggcgcttcttgatcgtctccaggttgtcatcgctacgaccgctctcctggccgcgcttgagcagacgctcgacgagctcgtcctcagcgacctgcaggtcgaggacggcgtgcacggccgtggcgtgcttggcgagcagcgcatccagcgcctcggcctgaggtaccgtacgggggaagccgtcgaagataagacccttcttgggctggcgctcctggagcaccttctcgatcatgtcgatgatgaggctgtcggggacaagctgccctgcgtcgatatagctcttggcagccttccctagttcgctctcggccttgatctcagcgcggaggatgtcccccgtggagaggtggtcgaagccatactgagcgatgagtacctcgctctgcgttcccttaccagagcctggggctccgaagatcactaaattcagcatcgtgggtatgatgtttagtctttgagttggtaaatgtccttgtacatgcggccgtactcatcgtagtcgaggccgtggccgaggatgaacttattctcgatgtccatggctacgtagtcggtgtcgacgtcgcagctcacagcctcgggcttgcggagcatggcggcgatatgcacctcggctgcgccctgctcgaggaagagcttcttgaggcaatacaccgtatagccggtgtcgatgaggtcctcgacgatgacgacgacgcgccccttgaggtcctgagtgacgggcatcagctcctggagcctacctgtgctctgcgtgccctcgtagctcttgtagcgtgcgaaggctacctcccactcctcgtcgatggtgtacatcagctcggaggcaaacatgaaggagccgttcatgatgcagacgaagagcggatcacgatccttgaagtcattctttaggcgcagccccagctctctgacggcagcactaacctgctcgcccgtcagatagggctcgaaggtgcgaccatgaagtactacttctttcatctttgtatcgttactattctatacggtctattacgaagataccttactaagaagccacaaagataatgctattccctgagacacagctccaggcactccatgcggcctccagcgcagacggagtagcccaccctcccctaccctagtgcagcctcgtccctactccagttaaggcctagcagcagcctagcgcggcagcagcctgaggccagctcggtgagggatatccattatccgcctgagggacgtcagtcagcgtcacgagggatagcagtcagcacgctgagggatatccatcagcagcgcgcgggctaaggtgtaagggagggcaggaagtacgggggtatcgatcaaggccaggagcggccgcgcgtagagcccttacgggctagagcccatagcagttgcgtaggacgacccagccaagcgtcaagagccccagcaccaggagcgtcacggggtggcgcagcaggcgcgccagccgcggccagcgctccccgtagcgcggcagggctaggtagagcagccccagggggagcataatgaggaggaagtagttataatggagggcttcgcccagccgtccgccgaggagcgcatgcagcgcccgctgcgtcccgcagccagggcatcgtaggcccgtcgagcgatagatcagacagctggggaagtagcccagcgccgggtctacaagggcgtagagcaggagcagcagccctaggcctataagccaatagtccctagcccaccgcctgaggcgtgtgaggtagggactaagtcgtagggcaggccggcgccgcatgatgcgtctcggagcgcccgctaggagaggatggagaagtactgtgcgatggtctcgaagttcttctggcgggccttatcctggatctggaaccagtctatgacggtccagatcccgcagccaccagcggtgatgagcttgagcgcgcccatcgggatatcccccagcaggaagcgatcgatgccgaggtagccgccgaagatcgagacgaggagcatgaccgtaggatccattagctcgaccccattgatcgagtggaactgctcatcggtcagctgcatgagacgctcacggatgtagggcaggtgttcggcggcgaaatacttctgcttcatgacaaggtagaggtccaccatttgcttgtccataatctatctaatacttatgtgaatgaatgcttggggctaaggagccctagcgcaaagatagtgctattgagcgatgatacagcgaggcctcagcacgctaccaccagagatcgtagacgacgatctcactgcgagtaccgatgcggtaggtagcccccgccgaaccgatcccctgcgagatatagagctcacgctcgccctcgcgacgcaggcccgaggccataccgacgcgcgcccagaccagcagctgccctggccagatctgtccgccgtgcgtatgcccacagagcatgaggtccatgggatagaggctgaggctgtcgatggacttcggcgtgtgctccatgaggatggtagggaggctgctgggtgcccccgcgaagaaggactccagcggacggcgctcctcgttgaccgcatcgtcgcggccgatgagcctaaggctgtccccgcgagggctaacgatgaaggctgtgctgtcgcgcaggagcgtggcgcccgtctccgccacgtagcggatattggccatcgtatcggcacggtactcatggttgcccagcacatagtaggcaccgctgggggcgcctgcgtggaggcgccgcatcagcttcatcacgcgcggatcgtaggcgtactcgctgaggtgatcgatgaagtctccccccgagaggatgacgtcggggtgctgggcaaggatgaggtctacggcacggcctacgtagtcaggggtcatcgcctcaccgatgtgcaggtcagagaagaagaccagcctcaggcgctggcgcggctcagcccccgcgggcgtcagccgcgagagcaccatgcggcggtgcactacctgcgggtagcggacattgcgatggcctacgaccatgaggccgaagaagagcaggacgagccctacgaaaagaccctgcttgagccaccgctgcccacgcagcccgaggcgtccatagcagccccagtagcgcgcgtccaggcgacgcagcccattgatcaagaagaccgcccccgcgacatagagcgtggagaagaagatgtagaccatcccattcatcacggcgctcatccagtctgcctggaagaggcgatgcgtcgccagacccacaaagaagaggacgaagatcgtcgccagtagcccccagaagaggcgtcgtgcacgcgcgccgagggcttggcctccgcgccagcccagataggggaagaggaagaggcagcagagtaccgaatagatgtagaccataggaatagtgatgcttagcgccgaggccagccagcgcgcctggggcctagcgcccttcgccgaactgacggtcgaagatgcggaactggtagtacatcagcgccatccccagtaccccggaacagatgtccgagaagggcagcgccagccacacgcccgtactcccccagaggcgcgggaagaggaagagcgcggggatgaggaagagcgtctgacgcgagatactcagcaggagtgccttccctccgaagcctatgctctggaagaactgcgtggccgtcacctggaagcccacgaaggcaaagccatagaggcagaggcgcagcgcatgcaccgaggcctcgatcatctcgggcgaactggtgaagagcgaggagataagccctggcgccaccacggccgagagcgtcatcagcagcccgataccgaggttggtcgtcgagcagatctggaaggtctgccgcacacgaggtagggcacgcgccccatagttgaagcccacgatcggctgcatcccctgcgcgatacccaccatgaacatgaagcccaccagcgccgcgctattgatgatcccataggcgcccacagcgcggtcagccatcagcgggctctcggcgtagtcggccagtgtcttattgatcaggaaggccacaccgctactgaggagctgcaggaagaagggcgacatcccgatcgagaggatggagctgatctgctgccaggagaagcgtagattgcggcggcggaagtgcacctcactatcagcgctcaggaagtggtgcatcacgaaggccatagacaccgccatggcgatgaccgtagcccaggcagcaccctcaatcccccagccaaagccgtagatgaagagcgcgtctaggagggtattcagcaccgctccgatgagcatcgtcaccatggccttgtagggatagcccgaggcgcgcatgatggcgttgaagctgaagctgagggtggagaagatgttccctgggatgatgatcttgaggtagtcgtaggcgaaggggagggtcctatcgttcgcccctaggaggcgcagcaggtcctccagccagatcatgacggggatgatggtcgccagctgcgtgacgagcgtcagcaggaggctgttccccaggatgcgctcggcctcgtcatgcttcccctcgccgagcaggatggacacgcgggaggaggcccccacgccgatgagcatgccccaggcctgcatgaagatgatgatggggaaggtcagcgcgaggcccgtgatggcgaattcgctgacgccctgaccgatgaagacgcggtctacgacgctgtagagggcgttgaccatcgtccccacgacggcggggataccatagtggaggaggaggctagggatacgctcgtgggcaaggcgctccgtgcgctcggtatgaggggtggctgtagccgacatatcgggaggggtatgggaggtgcggagggatcgaggggataggggtgatacccctaccgagggcgcgcgggcgcggcactgggcaggagggctggggagctacacagaagaggctgcccgcagtatgggacagcctcttctagggtagctatacacacagcataggcctatcagggactaaggtctgtgtgggaggggaaggtcggcttaggagaagaactccttgacagcttcgttgggtaccatctcttcctggaagacgtaagcgcccgtcttaggggacttgaccatcttgattaccttagagtaggtacggccgtcagacttcttgaacgatgcgactgctttctttgccattgtcttatctccttatccttacttacttgatttccttgtgaacagtcatgcgcttgaggataggattgtacttcttcagctcgagacgctctgtcgtgttctttctgttcttggtcgtgatgtagcgggacgtaccgggtagaccgctttccttgtgttcggtgcactcgaggatgacctgcactctgttgcccttagctttctttgccatgtcgtttatctccctactttactttgatttcacttagatagcccttatctgcagcctgacggatagcagcatcgagaccgatcttgttgatgatacggagcccagcggccgagaccttgagggcgacccagcatccttcttctggccagaagaacttcttggtaaacaggttgacatcaaagcggcgcttcgtcttgcggttggagtgcgagacgttgttgccgaccatggccttcttgcctgtaatctgacaaatctttgacattactctttatatttagtttgtttggttcaaacgcttgggcgactgcgggaccgatcctcacggacacaggaccctacaatcggtttgcaaagtaagtaaaaaaaacgcacttcagcaaatgaatacgcctctgccttgtgcctaggcgcactctgccctcatacggaagtgcgacagagcgtggacggacggcctttcccgtctagctttagtttaagaagcaggcttaggcgaagcacttgaagcaccttctcgaacgctcgcgacgcccctcccctagcccagcctccctcgcctcgcgctcgggcaatagagccagctggagcgcggtcggcgcgcctccccaaggtctcgcccaagctcctcgctctcagccaggccaagggccgcggcgccttgtgctcagggcaggggccgtgagggctatccgtcagcaggctgagggacgtcagtgggcggcgtcatagctatccctcaaagtgctgaaggatatccctcagcgaggcaagtgcaggtgacgagcgcgctgcccctcccacgggtaagcgctgggagccctccgccgagatctcgactaggagggcaaggtgcggccgaagcaaaggaggagaaaaaggagcaaaggctaggatacagggaactaagggacaggatacaaagaggacgcgcccccaggcggcgtcagctcgagggctggcgtgcctgggggcgcgtcctcagtatagggactatacgcccgtgcttacttcagcgcgtagggcttgtccgtgctggtcggccagttgatattctggtagaagtagctggcgtcgaccttacccgtaggcgagcagagctccatcgtctgtatagtgacaggcgcgaggtagtgcgcgaggtagaaggtgtagccgtcgtacatcacgttgttattctccttggagatgatctgatagggacggtggtacacgccgaggctgcgggccgagaggttggacttagagctaccatcggcgacgatacggctcttgtactggccgccttccttgacgaagttaccgttcttgtcacgctcgatgaagtaagggtaggtgtacatcttcgtccagatgttgacgccctcgatctgatagttcttcacctggtccatagcacaccagcggacgaggtcctcattgcgcatgccttcgccagcgaactcacagcggcgctcgcggcggatgctgtagagcgtcttgtccacgggctgccctgcggagaaggcaccccagtcgtaggaggcgcggttgacgttggcctccttgctcatatccgtagccgcgatcgtctggtcgatcgtacccgtgatgccggcacgcttacgcagggcatcccagtacttgcgggcgtcggcgtcgagcgtcttggtcagctcgtagctcgcctcgatgtagttgaggtaagcctcggaggcacgcaggatgggtacacccgagacgtcgttcatctcagagccagcacgcatggcagggtcgtagttgtagtacttgcgctgcgcgtagcccgtgacgtcacgtacctcaggcttgtcgatcatattggggaactcgtaggcacgcacctcacgcttctccgtgtcgtagaagcggggggtcttctcatcgaagaggaagagcgacaggcgctcgtctctgtccttcttgacatcctccagcgtggcgtcggtgtagctacccgtcttggcgtagtagggcttaccatccttcatcaggaaggactcgacgagcccacgcgtccagcccgagttggtccccgagatcagctggtgggagacgaggtgcacgataccgcgctccttgttgtactggcgccacagcaggatctccgggtagcccgccaggcta

SEQ ID NO: 3322 - DNA, 13422 bp, synthetic construct
  misc_feature 1..13422: note = Synthetic
  source 1..13422: mol_type = other DNA
agcgagttgtggtaagtcgtttttccttccttttgttgttttgtatcttatttgttatcagtttgttgtgtttgtatttgggagtgctatcctgtggccttttattctgctggttggagatcagtggctgaggatcgttttgggttgcttctgctgccacattgggtcggtgaaaatgctctgtcacgcatcgctttactagattggtatgctaatctagtgaagcagatgcgccgtgttttttctttgttttttattttgcaggggtctaaccctgagctacagttatgcaggggtgaagggtgtttgaaggggggagtgtttttcctgccctcatctaggattgttcgtttctcaatcttgttttatagacttctatttgtatcataaggtggacaaaagacattgttaaggttgtttttaaggaaatttattttgtttctcttgtttcttgtttgaaaaactattgctaactttcgcccaagatcaagggagatcccttgtgagaagcaagcaaaaggtataacgtatcataaaacaagacatgacgagatgattacccgctcctagccctcataccagcacacgagggggcggccgcccatcgtgatagtacctaaagaggacaggggtatatgcataaccacaaacgcatgacccaggccagtctacataagctatatcaggaaaagtaaggtcgtacgcaggaggtatatacctctcctgcatctgatcacgccctcgatggcagatttagcctcaggcagatcacgctcacacacactacgactctggaggtaataccatactcctctcagggtgaacactgaaatagaatcaaacttatgagacagaaaatgaaatacgcgatagggctattggctctcttactatttattccagcctgtaagcagaataatgatatagaagagccaacgctagagctttcgacgagctcgctgaccttcgcaaagaatgcatctgaacagaccgtatcagtgcagacaaataaggatagctggaacgctttctcttcccaagaaggatgggttaccctcactcaggttgggacgagccttcaggttaaggtcaaggctaatgacctcggggtagaacgtacagcgtctgtaatcgtgaatgctggtggcttacagcgccgtatcgccgtcaagcagagtgctgctgatgtaatcatagacctcgataaggaagcggtgacgctacctgtcgcaggcggaacggagaaaataggcttctatagcaatacggagcaggtgaaggtggagcttgcctccgccgtagactggctcacgctggataaggtgacgaagaatagcttcaccatcacagctaaggctaacgatgggacggctaaacgctctgtgaaagttgtactcactgcaggtactgtaaccaaggaagtcgaagtcactcaagaagcaacaagcatctacgtacttcccctccttaagctccctgctgatctctccagtgtttgctcttatgaagtaggccgtggtcacacattggtcaagatccctgatggtctgtttaacaagaccttctatcgcttcttgacaaaaagtgctgcgatgccctttatccagtattccttcgcatcagagaccgcaaagggctatacctctgcagctactgtttgccttgatgtgagcttagttaaggataacgcaaactttgatgccttcctcaaggaaaatggtcttgataaaaagactaagagtcaggatgagaaggtgattacctatacgggtaccgaggtgctcttctctctaaaggttgccattgaagccaatggagcagtaattacagctgagtacacaccaaagggacaggacaaggattacgctacgtttaaggctctacctatgacggatcaggtacagtacatgggtgatcgggatcttaagctaccaggtaagaagcaagaagaaatgcggaagatagaggaagaaacgtggggtgcagagcgagatccctctgtcactcagaataactacgaccgcttcatcgccaaggggaaggtgtttgacaacgaaagccaccgaggctacttctacgttgtccctagcgcaaagattcctaaggatgatgaatatatcggcgtcgtagaggcttgccaagctatctatccgaatacgacccttgccttctggtctgatgcaatgggacgctactacctgactaaggaagttaaggcactctttgctgatgcacagttccgttactttggtcagcaagaaggagtagatgtcttcctgaacaaggcaaagaaccaagcttatttcctccgtgtcgctaccttccagggtaagcctgctattgaaatacagtgcatctatcaggatctaagtaagattaaggattcttatagccagagcggtgaactctctgtcaaactgctcactgattataaggccttcctcaaggtcaagaatgaagaagccgctacggtacgtagccttgtgcagcaagttgtccgcagacaggtgcgctcactcaagtagctagtactgataatctttccttgagagagggctaggagtagccctctcccaatccaatcaagtgaatccaaaaccctattcttgtttgggagagaaggcttagtgcgcctctctcccatgcaggaggggtgaatggtaataatattctagagaaagtagaatgccctaaccgctctgtaccctttcgtatggtagtaagactaccttctctacatgcagctccttggtaagcactctgcttgtgaaagaatgaatttctttcgtcacccaagaggaaaagaagcatacgcgaggggagcaaatgaacgaatatgcaatcaacctgattagattacgacaatgaaaaggactatactaaccctgtcgcttctgtcgctctgtgccctctcttcatgtaagaaggattttgatgaagcacaacctcgaggtggggagcttcgctctgaagtggcggagacctcttcgtctgctagagagttactccctaccgagggggcagagcttggtgtcttgtacatccgcttacagaaaggctcagagaaaagccttcgtgctctaacctttgagcccaaggagatcgagctaaaagccctctcttcacctctagctacgtcactccgtagccttggtgcaagtggtatggaaccattgttccccatcgatcctcgctatgaggaacggatgcgtcaagaggggcttgatcgttggtttatcgtgcgctttaatgagcggcatgacctaagagctgccatgcagaccctcctcgataataaagaagttgactacgctgagcccgtatatcccatagcttatcctaatgctaagcctgtggggatatccacgcttcctgagacgtcgatgtctcaatcgagaggttcctcgtttaatgacccaaggctgaaggatcagtggcactacaacaatactgggtcgatcagagggagtgtccctggtgccgatattagtctcttcaaagcatgggagaccgaagtgggtaagtcgaacgttatcgttgctgttaatgatggtggtattgatgtcgagcatccagacctcgtcgataacctctatgtcaacctagcagagaagaatggggtgaaggataaagatgatgacaacaacggcttcgttgatgatatcaatggcttcaactttattaagaataatggtactctttatcctgatgatgcctcacatggcacacacgtagcagggacagtcgccgcccgtaataataacggtatcggtgtctgcggtgtcgcaggaggcgatggtacagcaggtactggcgtgaagctgatgagttgtcaagtcttcggtgttggtaaggaaggggcagatgcagcacgtgcttttgtctattcagccaataacggagctgttattagccaaaactcttgggggtatcgctatacggcaaatatcactgttattcctccctctatgaaggaagctattgactacttcatcaaatgggcagggtgtgataagaatggcaatcaaaaggcagatgcaccgatgaagggagggattgtcatcttcgctgcagggaatgatggtcgtgactacaaatcatatccaggtgcttatgaggctgtcgttgctgtgtcctcgatgaacccggccttcacaaatgctccctactccaatcgtggtgactgggtagatataatggctcctggtggtgatgtgaacttcggagatgcagggcaggtcattagcacgctctccaaaaagattacaaagggtgatgagtatggtggtatgcaaggtacgtctatggcttgtccacatgtctcgggtgtagcagctctgattgtctcacacttcggggggcaaggctttactagtgagaaatgtaaacagatcctacttggttctcttaagagcaagagtattgatcagacgatctctcgatatgctggtcgattagggcgtggctacatagatgctagtgcagcctttgcaacgaataagggtaaggctccagcgaagattgcttctatctccatcgataaagtttcctttatcacagctgacctttccttccaagcggtggcagacgaagacgatggtacacctgtagagtatcgtgcgtatctctcgacgagcacgattacagaagcgaaccatgccaactacctaatgcgtacgattaatggtatgggatatgctcctggacataagcttttcctcccacttgcgaatctgaaagagaacacgacatattcagtcgctgtcgaagcggttgaccgctggggacttagctcgggtctaaccatctccagcttcacaacgaagaagaataacccaccgcttctcaagctctcacgtgaagacaagattcgagtctctgctgtatcgaagcaatccttctccgtggcgtactctgatccagatgggcagactgtaagcattgacatcagcggagagaagcgtggtgtcagccatcaggtgctagatggtaagattgaatttacactgcgagcagtagcccctgcaggtaactacagtattaaggtgacagctacggatgagcttggggcaaagaccacgctggatatccccttcgaagtctacacatataaggctccagagttcactgcttcgatgggtaatcagattgttggtgccagtcagcagattaagcttgatgtcgcctccatactgacgtataccgagggaattaaccttacttactctgctagtgcactggacggagcggttgctacggcatcgatctctaagacgggagaactcgttatcacaggtcataagcccggtaccactcaggtacaggtggaggtctcagatggtattagttcctctgtacagacgaccatacccgtacgtgtcgtgacgagcacagctgatgcagtctattcggtttatcccatccctgctactacagtactaaacctggtcatggatccatctcttgatagggtgcaggttgagattgttagtacgctcggtacacgggtatttgataagacctatacggtcaagggtattggctcaatcaaggtgcctgtgaagacgattgctccaggggcttatgtcctcagggtaaaatctgctaagggtacatatacgaaggggtttgtcaaacaataagtattctgaatagaccatgaacaagttatccatcctgctacttgggactctttgtagcgtagcctctctctccgctcagacgacgaaggctcgctcactacccatcctcgagatggcagttgatacacgctcagccgcactaggggggaatcactatggtgaatcccatacatcgtacctatacgctaaccctacgtcgctactctatagtgatgaaggcaatctctctgcctctgcgagcgcacgcttcttaggtaagattgagggctttgacggatcccgtaacctgtttaatctcgctctaggggcacggctcggagaccatgggttcttcttgggtggacgctatctaggtggactcaagttccaagaggttgaccaagctgagcgggttaagaagacatataccatcgaggactatacgattgatgttggttatacccttcggttatcttccttgtcagcctatgtgacggggagctatatctcgacaagcctcaagcgctcagcctctacgttcgttgtgggggttggagcattctaccgaagtcagcctactgaagaccatctgggacttagctacaccattggagcaaaggctcagaaccttggtgggagttatcgctatacgagtaaagggtcagatgcgtaccctccagctttctttggtttaggtggtgagttgggctatggcatcagtgcggagcatcatcttgcccttgctctcggtgcagattacttcttctatccatcgaactctcggtctactgctctgcatgttggtggtgaatatctattccgccaagcctacgctttgcgcctcggatatttctatgacagtaatggagcaaagcacttctctgcaggtgctggactacgtttcaagcccatgaatattgacctcgcttatcttgctccttcggctgaagggttgaaggctgccttccagctaaccattggggttaatcttggtgtattctagcaagaagtattggacttaacccccccctccttagaattactttgagaaagaagttggtgcttcacaaagggagggaaggagcaaaaagctcctcgtctgtacaataagacaatagagctggtctaagaagttttctggtagaataaacgtaatcactcggctaatcctttgggattggtcgagtgatttgttgtatcgtgcctcatctcttctatccaatggtttgccccctttatacgagtagctttattgctgagccgattgatgaagaatgtgaggagaaaaggtttgggagggaagacaatgccttccttgtgtcactgattatcccaagtcaaaccgtttacggatgccttcggagagtagtcggtataactgctccagctcgggtgtgttgtgtaggagcttgaggtgccgctcaataaccatctgatcgccccttcgtgctggacccgtctgtgcctcttgggccgggaggtggtggagcttctcaatcatttcatctaggagtgggaggagagccttagatgggagctgatgggcggagagaagttcctcagcgagcgtgatgagataattcgagaagttacatgagaggactgcggctacatgcagtgccatgcgtgcctcagagctggcatgatgtacctcttggcttaggctgtgtgctaaggtctcaatccgagccagtgtggactcattgttggcctcgatatagagaggaacggaggagaagtctaataccttccccttgctgaaggtttgtagaggataaagcacccctgtactgctatggtatttcgtcattgagcagaggtcggtactccctgatgtgtgtagccaagtgcctgatgtgtggcgagcaagctgtgtccaaagctcaaggagtgcatcatctcggacggcgaagatgtaccagtcggcatcctgtggtagcgtgtcgaggtcgttggtgctatggactccttcgccaagggcagaggctaggtcgtatgctgtcacgccacttggactatagatatcggtgacgatatactctgtctcccctacattcactagatggagggcgtgagctaagtgccaggctacgttgcctgcacctaggaggacgattcgctcttgtttcttcacagggattggtttagctctgggaggcttcctcctctagggctggatagcgcccgatatggatctgctcccacctcagttcctccaccgcatgtggggcaaggctggaagctttatgcccaacggcaatgatacataggacctcaagctgatagggaatgcctaatacattgcgaacgtactcactagcctcttgcccattggacgtattttgtccgaagacatctgcccagcaggagccgagaccaagggcttctgcttgtagctggatatagcctgcagcgagagaggcatctgctatccaacgctcgcactccatcggagagccaaggatgacgatgccgagtggcacttgcctgaggaagtcagctccatcggggcgcatgtagcttagctctgtcaaggtttctcggctctcgacgagtataaactgtgtggtatgtgctcctcgggatgagggagcccgtagtccagcctctagcagtatctggacatcttcaccggagaggggggtatcggtaaattgccttatggatcggcgactacagatggcaggaagtacctcgtgtgtatgggagacttcaccctgctcaataagttcctgcccgagttcacggacttcattcatccagctgtccttattactcgcgtctgtcatatagcgttgcttgttctgtcgtttagttcatttgcaaagatacttagcttctaattaaatcgctctctgcctcagtctactttcatgcttgagaagccctgttgacctactataagtcggaggtgggtgacgagttaccataagtcttagtaacgagttgtggtaactcgtttttgagagttatggtaactcgtcagagcgagttatggtaagtcgcaaaaaggagttatggtaactcatggaggagaggtcaagggaatagtgttttacatccttgtaaggtgtttattttcaattgtatatataccgtttgtttggatgttaggtagccttatactttgtggtgtgtatgcagcccttgctctcttgtgttttttatttgctatttgtccgaaaagtcagtaacttagcctgcataacaagggtacctcatggactggcatgtaaacacaaaagaaaggcgaggcttggagttattacctccgccccccgccttggatgttttcacaacggaacgaaatccttattgtgactagcttcaaatcagtaccacgaaggtagccaaataatgattaactaacgaaatataagagtactatgggaaagaaagtacttggtctcgaccttggtgtcgggtctatcgggtggtgcctaatcaccctagacaaagatgagaaaccacagagtatcctaggaatggggagccgtatcgtgcccctctctgcggatgatgctacagaatttacccagggtaaggcgatcaccaagaacaagatgcgcacggtggcacgcaccatccgcaagggtatggatcgctatcagctacgacgagaggctctaaagaaggtgcttcgtgagcatgggatgctccctgatgaagctctgattaagctccctctactggagctctgggagctacgagcacgagctgctacaccaggagagcagctgagcctaactgaactaggacgtgtgctgctccacatcaatcagaagcgaggctacaaacacgcaaaggcagacgaagctgccgaggctgagactaacaagggcaaggagacagggtatgtggctcaagtcaaagggcgttaccagatcctaaaggagaaggggcagaccatcggtcaacacttcgccggggagctaagagctaatcaacaaactgcccccagaggtgtctactatacctaccgcatcaaggagcaggtctatccccgtgaggcctacatcgaggagtatgaccgcatcatggcagcgcagagggtgttctatcccgagctccttacggacgcactgatcggtaggatacgagaccgcattatcttctatcagcgtcctctgaagtcatgcaagcagttggtctccttctgtgagtttgagaagaaggagaaggtcatacgagtaaaacacaccaacaaggagggcgtcgaagagctcgttgagaagaccatcaccattggtccgaaggtagccccgaagtcttcccctatctttcaggtctgtaaggtctgggagtccatccaaaatatccgcctttactatcctgatggcacagagcgagtgctggagcaggaggagaagcaaaagctctttgactacctccaggagaacgataagctcagccttactgtgcttcgcaaggagcttaaaattaagccgaaggataagctctggtgtgataagctgctagtgaatgggatagcagggaatacaactgctgctatcttgcgcaaggtgctgaaaggatatgagcagtatgagggtctactcaggtttaatctaacgacaagggattctcacgaagtcgatgaggatggagttattcgtccaatcattgatgagtcttatcagaacgaacctctctataagctctggcacatcctttattccatcgaggatagggaagagatgcgcagtgccttgattgggcaactaggcattaaggccgaggacttagatagtgggctgatggatgccctctataaaatcgacttcgtcaagcagggctatggaaacaagtcggccaagttcatctgtaagctccttccccatctgcaagaagggaagatgtatagcgaagcggcggaggcagcagggatacggcattcggatagtatgactgcacaggagcgagatgagcgtagcctgctagaggaaatccctctcctgcagaagaatgccctacgccagcctgtggtcgagaagatccttaatcagatgattaacctcgtcaatgcgcttaaaagagagcatggtgagattgatgaggtgcgtgtcgagctagctcgtgaactaaagatgagccgtgaggagcgagagaagaccacaaagaataatagctcacgagagaaagaaaataaggctatagccgagaagataaaggaatatagcattacacccacgaagtctcgcatccaaaagtatcgtctgtggcaagagtctgcagagagctgtatctattgtggtaggcgagtggatgtcgtgcaattcctccgaggtgaggagaccgaagtagagcatattattccgaggtcaatcctcttcgatgactctatgtcaaataaggtctgtgcctgtcgctcgtgtaaccaagagaaaggtaatcgctttgcgatggagtacatccaatccaaggggtgggagcaggactacatcgagcgagtggatagtctcttccatgataagaagatatcctactctaagcgtcagcgtctcttgatgctacctaaggatctgcccgaagacttcattgagcgtcatctacgactctctcagtacatcgcccgtgaggcacagggcattctccgtaaggggatacgactggtgagtgcctccgagggcggtgtcactgccaagcttcgccagctatgggggtatgataatatcctgagagacctcaacctagagcgatatagatctatgggagagacagaagttgttaccgtagagcatcgggatggtcagcgtacggatgaacgtatcaaggattggtccaagcgaaaggatcatcgacaccacgctgttgatgcccttatcgtcgcttgtactcggcagagctacatacagcgactcaatagggtgaatgcagaggctgatcgtcaggagatggatacgttcatcaaggagcagcaacaagagcagaaaccctccaagaaagagaaactctccctgttggagcattggctcattagacagccacacttcacgaccaaagaggtgatgaagcatgtagaagaaatcctcatttccttccgtccaggcaagcgtaccgtaactcgagggcggaatgtctacaagcgctcaggtaagaccgatgtgcagagggatgtacttatcccacgaggtgcactctccgaggagactatctatggtgtgatcagtgtcgatggagaggataaggttgtgtgtaaatatccgcttcagaagtttctagacaccaaagaaacgaatgtggataaaattgcagatcaagctgcagagaaaatcgtagataaagtgctacgagaaaagattcgagagcgtatcaagcgatatggcaagaaggaagcctttgcagaagcgctttatctcgatgaggcacagactcaagtagtgcgtagtgtccgatgctttataagtaaggatcaggccaagctcataccccttagatacaacgacgagagcgaggcggtcggctttgtggctccagggaataaccaccacctagccctatatcgggatacttcagggaagatgagagcttctgttgtgtctttctttgccgcagttgagcgtgctcgctatggtattcctatgattgttttaaatccaagagaaacaagagagaaggcacggataattcccgatctgccagaatctgttttctcaaaattacctgaggaggattgggttttggaagagactcttcaggaaggagaaatggtgctgttgggtatggagaacgacgcaattgaagaggcaatagagaagaaggactatgcaaagctaagtcgctatctctatagggtgcaatctctatcttataacgactataagttctgcttccatctggaaacagagcccgagaagaaggagaagaaagagggagaggataaaaagaggggtgagaaggccaagaatacagctgtgataacccccaagcgttataggatcaggtgtttggctacttatcaggatcttaaccctcgcaaggtgaagatagacctcctaggcagaatatcccttgcctaagtcaataagctagtatcatgatgaaacataccctttacttcgggagccctgcctacctcgcccttaggaataagcagatcgaggtgcgtcagccctgtgagggggaagctaagtgtcctgcacggacgatcccaatagaagatattggggtcgtcctactcgaccatcagcagatcaccatcacccatgggctcctgcatgcactcttagagaataactgcgccgtagtaacgtgttctcctagtcacctacctgcaggacttctacttcccttcgatgggcacacgctccagaatgagcgcttccgtacgcagctggaggcctcccttcccctacggaagcaactctggcaacaaaccgtgcaggctaagatcctgaatcaagccacgctcctcgggcaagtccttggagaacctgcgaagaacctacttgcctggggcaagcaggtgaagagtggcgactcggagaatctagaggctcgagctgcagccttctattggcgcaacctcttcatctctctgccgggctttgtccgagagcgtgaggaggcagctcctaacgcccttctcaactacggctacgcaatcctgagggccatcgttgcccgtgcactcgtcagctgcggtctacttccgacgctgggtatccaccatcataacaaatacaatgcctactgcctagcggatgatatcatggagccctaccggccctatgtggatcagttagtcgtcgaaatgtgtgaggaggagattccaactactcttacgaaggatctgaaagtt

SEQ ID NO: 3323 - DNA, 11953 bp, synthetic construct
  misc_feature 1..11953: note = Synthetic
  source 1..11953: mol_type = other DNA
cgatctcgtttcgctggggctataaaaaggctcagcccgcattccccgagcatggggaatgcgggctgtaagccttatgaaacttgagggaggggtcgctccttagagtacgccctgctcgagcattgcctgagctaccttgaggaagccagcaacgttagcacccttgacgtagttgatgtagtcaccttcacggccgtgagccacgcactgctcgtggatgtcgctcatgatctggtggagcttagcatcgacttcttcgttggtccagtagaggtgcatagcgttctgggtcatttcgagaccagaggtagctacaccaccagcgttgactgccttaccaggagcgaagagcatcttcttttctacgaagtactcagcagcttcggccgtacaacccatgttcgacgtttcagctacgatggtgacgccgttagcgtggagcatcttagcatcttcttcgttcatttcgttctgcgtagcgcaaggcatagcgatgtctaccttctgctcccaaggcttcttgccagcgaagaactgagcgttggggaacttcttagcgtagtcagagacgacgtcgttaccgctggagcggaggtcgagcatagcctggaacttctcaggagtgttgataccgtctgggtcgtagacgtagccgtcaggaccagagatggtgacgaccttagcaccgagctcggtagccttctgagctacaccccaagctacgttaccgaagccagagatagcgatcgtcttgcccttgaggtcaatgttgtgctgcttgcagatgtgctgtacgaagtagacagcgccgaagcccgtagattcgggacgtaggcgagagccaccgaaggtgaagcccttaccggtcatcgtacccgtgtgctcgttagcaaggcgcttgtactgaccgtacatgtaggcgacttcgcgaccacctacgccgatgtcccctgcaggtacgtcggtgtcagggccgatgtggcgccacagctcgcgcatgaagctctggcagaacgtcatgatttcgcggtcgctcttacccttaggagagaagtcggcaccgcccttaccaccgcccataggcagcgtggtgagtgcattcttgaaggtctgttcgaagccgaggaacttcaggatagagaggttgacagagggatggaagcggataccgcccttgtatgggccgatagcgttgttgaactgtacgcggtagccgatgttcacatggactttacctgcatcgtcgatccaaggtacacggaaggtgatgatacggtcgggctctacgaggcgttccatgatagcagccttttcgaactcggggtgctggttgtagacttcttctacagagagaagaacttccttcacagcctggaggaattccttttccccagggtgctttgcctcgagcgaggccaaaatctcagcggatttcataactgatcgatctaatagttttgcgtgtacggctcgtgtaggagccttgatttcacagcaaatatatgcaatgatttttaccttgacaaatgtagtagcttcttttaatttcttaggaaagaagcgcatctacacggcttttccgctatgtgtgaataggggtgtgaaaggcaaaatagctggtgaaaatcgtgtgttatcactcggtatcgtggcaaatcttttgcttttcacttcaccctccttccccgcattcatgagcacagcacaccgccctatatataataatgtatagggggggaggtgaagacgacggggcggaatgcgcctaaccgcggcggaagaagcgggtggggtagagggagatgaggaaggagagtgccgtcaccgagacgaagatgacgagcatgtccagcgggcgcacatccacggggagcgccatcgcttcgataccgctaccagagcggatgatgccgaagcgtgcctgcaggaggcagagtatccagccgaggagcatgccgacgctggtccccgtgagggcgatcagtaggcccacacggcggaagacctgctgcgtgaagctgggtggtgcaccgagagcggtgaagatacggctgtcgtcttgcttctcgatgaggagcatagccagcgagctggcgacgttgaaggccgccaggaggaggatgaagaggaggatgagataggtcatgaccttctccatacggatgaggtaggagaggtcggggtgctgctcttcgcggtcgagggcggtgaggcggtcgccgtagagcgccttcacctgctgcttgaagtcggaggtcttgacgccggagcggaggtggatgccgagagcagatacttcgctctcctcatagtcgagtacgtcctgcaggtcagccaaggggaggtagatcgcagcatccgtctcttggctcgtgggctgatactgcccgatgacccgtgcctcgaggctctggaaggacgaggcgggggctaagggattggtgaagccgaggcgcttggggaagaggacttcggcagcgggaccgttgtgctcggtgcggctgctatcctgcgggagctggatagctgcgccgagctggatgggggtgatgggtgcaccttcggcgtctacgagggtcgtcgccgagtggagctcgggcacatcagctgcacgccccatcgggtagacggaggcaaaggccgagtccaccccgacggcatccacgacccactgctgctcccctacacgtaggagtcccttgctctccaggcgcagggcaatcgcttcggcacctgccttcgtgagcttagtgcggtagtcggggaacttcttcaggtcgaagactccgccctcggtgtctctcaggacgatgtcggcatcgacctgctttgtagctccgaggatcatcgccacatagccattgtacacgccgacgacagccaccagcgccatagcgacgacagcgatggcgacggcagagagtgccgtcacgtagttcactgcatgcaggcgggtgcggctgaagaggtagcggagggctatgcggaagctgagcacgggcgaggggcggggagtgtggagatcgttacttgtcgttcagcccgagtaggctatcgatgcgctcgaggtagtcgagtgagtcatcaatgaagaaggtcagctcggggagcttacgcagctgcttgcctacgcgcaggcccagatcgtagcggatggtcttcgcgctggagcgaattgactcgagtagctcttctgccttctccgaggggaagatgctcaggcgtacacgagcgatgctgaggtcggggctcacggtcaccgatgtcacggtgatcagtgtgccggggatgctctgggtctgtatgcggaagaggtcgctgacctccttttggatgagtcgattgattcggctcattcttgtattatccattctctctgtctttttgaattacgcttacaaagttagtcaaagctcgcctcatctcccgcctctataagggcggtcggcgaaggtccggtggctgactgcctatatgagactgttgccgcgagtcctgtcctctatttagagtgctaaggtatcgcgcgcccagctccccgatagacctctccgaagtgaccgagcaagcccttcgccttatcgcgcgtattcctcttattcagcggaggagaaagtgtccttctcgtgaataaaaaagtgccttcccgtagcggtttttctctgtctacgcacgtagtcttaaagaccaggcacgcaaatccaaatatccacgtacgtagatattagagccacgtacgtagtccaaacttatctgccactcgtccacagcttttatccctatgcggagcaacaacctaatagaggtcacttcacaaagctatataggaatcgagagaacgctatataggaatcagtccaaagctatatagcattcttcgccatcctatatagctctaccggcatacccatatacctgtatatgggactattgtgcaagaccacctcttcattactcgtgccttctcttcgaaaagagaagatcccacttgatgcgccctcggatggagcgatgtcaagtgggatcttgcttggagtgatgtgccagagagcgtggctctcctaagccgtgatgcctggctacttttttctgtcgctagcctggagttggtacatctccgaggttgatgagagtaagggctctgcggtgagggtcacttccttctcgtaggttctgatgtgcttgttcccattgtattgcttgacctcgatcttcaccttgatggctgcgggtgaattaccactattaggtctgcttgcgatgactccgacgtatagccctgcacccttgtgggtgaacgtcgtgtgatgggacttcgcgacggggtctctccactcggatctgtagatcgactgagagacgagcttgccgtcacggtagatgtcagagtcccccagcgtattggctgtgaagttgacctggactggtgcggaggccttgatcgtgacctcttgcttgaggtctgcgctgccgaagccgccgaattctccgcctggcaggtcactcttgccaccgcaagagctgagcactaaggcaaaggagaagaggagaagagataggatgccgagtcggcgaaatgattgttttgtagccattttacttgtagttgatgatgaggcggagggagggtagaccgagctatccagctccgcagtaatggttccgttaaatgaattgtacttagggaaggagtgtaagacgggcttcctctcctaccttaactacaacgagaaaatgcatggatatgttgttttctcgcggaaatatgtacgtgtgtaatagtatgtagtaaataaaagtaaacgatcttcgcaccgtatataccccgaattcgcggagaagcagcctcagaatagcttgcttttggtgtaggaaaagtgggtgtatgatgagccctcctacgcggcgtaagtcgctcatggatgcggtgttgcttgctcggaagcggggaagttgctacatttgtttcagtgctacggctgatcgtagtggcctgacctctcggtctgatcacaaaaaaagaagggtgagaacctcacttaagaggccccaccctagatgttctcacaacggaatgaatccttattgtgattagctttcagatttcgttactgcaaatgtagccatttttcttaatatcaacacaaccaatgcttatgagcaaacatgtacttggtcttgacctcggagtaggatcaatagggtggtgccttatcgccctcgatgagcagggagatcctgccgaaatcttaggtatgggaagtcgtgtcgtccccttaactaaccttggagatgacaaggccttttccaagggggaggccttcacagcaaaccaaaagcggacggcgcgccgtacgatgcgccgaggctttgcccgctatcagctgcgtcgctaccgccttcgtcgagagctggagaaggtcgggatgctccccgatgctgcactcattcagctccctctgctggagctgtgggagctccgcgagcgggcggctaccgctggtgagcacctgacgctgcccgagctggggcgtgtgctctgccacatcaatcagaagcgtggctaccggcacgtcaagagcgatgctgctgccatcgtcggtgatgagggcgagaagaagaaggactcgaatagtgcctacctcgctggcatccgtgcgaatgatgagaagctccaggacgagcacaagacggtggggcagtacttcgccgagcagctccgtcagaatcagagtgagagccccacgggtggtatcagctaccgcatcaaggatcagatcttctcccgtcagcgctacatcgatgagtacgatcagatcatggcggctcagcgcgtgcactatcccgatatccttacagacgcattcatccggatgctacgcgatgaagtcatcttcatgcagcgcccgctgaagtcctgcaagcacctggtctcgctgtgcgagttcgagaagcaggagaaggtgatgcgcgtccagcaggatgacggcaagggcggtcggcagctcgtcgagcgtaaggtcaagttcgggccgaaggtcgccccgaagtcctcacccctcttccagctctgccgtatctatgaggcggtgaataatatccgtctgacccgtcccgatggctcgccacgcgacatcacacccgaggagcgcgacaagctcgtcgcctatctacagacctacgaagcacctaaaccacccaagaggaagcctgctaaggcaaagcctgtgaagctggctcatcccaagcttgacttagataagctcaaggaacttctctgtatcgaggaggagttatttgcagataagctcctcgaggaaggcctgaaaggagatgctacgcggatagctctcagcattattctgcagccctatccgcagtatcaccacctcctcgatatggagctggagacgcgtatgatgaccgtccagctcaccgacgaagagacgggcgaggtcaccgagcgagaggtcgctgtcgtcaccgatagctacgtccgccagcccctctatcgcctgtggcacatcctctactccatcgaggagcgtgatgcgatgcgccgtgctctcatcacgcagctcggtatgaaggaggaggacctggatggcgggctcttggatcagctctatcgtctggacttcgtcaagcctggctacgggaataagtctgcgaagttcatctgtaagctcctcccccagctacagcaggggctgggctatagtgaggcgtgcgtagccgtcggctatcgccactcgaatagccccaccagcgaagaaatcaccgagcgcacgcttctggagaagataccgctgctgcagcgcaatgagctgcgtcagcccctcgtcgagaagatcctcaaccagatgatcaacctcgtcaatgcgctcaaggccgagtacggcatcgatgaagtccgtgtcgagctggcgcgcgagctgaagatgtcccgcaaggagcgtgagcgtatggctcgaaataacaaggatcgggaggagcgtaataaagaagtcgctgcgaagatccgtgagtgtgggctttatccgacgaagcctcgcatccaaaagtacatgctgtgggaggaggctggtaaagtgtgtctgtattgtggtcggtcaattgaagaggagcaatgtctcaatggggacgatatggaggtcgagcacatcatcccaaagtccgtcctctatgatgactcctatggtaataagacctgcgcctgccacgaatgtaatcagacgaagggcaatcgcaccgctctcgagtacatccgtgcgaagggctgggaagccgagtatatgaagcgcattaatgacctgctgaaggagaagaagatttcctacagcaagcaccagcgcctacgctggctgaaggaagatatcccctccgactttctcgagcgtcagctgcgtctgacgcagtacatctctcgccaagctatggctatcctccagcagggtatccgccgtgtctccgcgagcgagggtggagtgacggctcggcttcgtagcctctggggttatggtaagatcctccatacgctcaacctcgatcgctacgactccatgggtgagaccgagcgcgtttctcgggagggggagacgaccgaggagcttcatattacaaattggtcgaagcgcatggaccaccgccaccacgctatcgatgctctcgtcgtggcatgtactcgtcagagttacattcagcgactcaaccgcttaagctctgagtttgggcgggaggataagaagaaggaagatcaggaagcccaggagcagcaggcgacggagaccggtaggctctctaacctagagcgctggctgacccagcgtcctcacttctcagtgcggacagtcagcgataaggtcgccgagatcctcatctcctaccgccctgggatgcgagtagtcacccgcggtcgcaatatctatcgtaagaagacggttgatggtcgggaagttacctgcgtacagcggggcgtgctggtaccacgaggagaactgatggaggcatcactctatgggaagattctcttccaagggagggagcgtattgtcaagcgctatcctttgcacgacctgaagggagaggttgtagatccgtgccttcgtgagcttatcgtaaagtcgaagggagctcctctctatcttgatgcagctgagaagcaggaggtgcgctctgtgcggtgctatgttactcagccttccgttgcaaaggctattcctattcgcttcgatgagcgtggtagagctattacattcgtacagtctgggagtaatcatcatctcgccatctaccgcacgcctaaagggaaacttgtggagtcgattgtgagcttttgggatgctgtcaaccgtgctcgctacggccttcctttgattatcaagtacccgcgcaaagctatggagcaagttatacagcgggaagatattcctgagtccgttctaagtctactcccaccagctgactatgagtttgttgaggtatttcagcagaatgaaatggcagttgtaggtttgcctgaagaggaattccgaagggctgtagatacgcaagactatcgtactcttagtgagcacctctatcgtctcaagcggatatcctccaaagattatgagttccactaccacttggatacagatgatccagatgagacggattcttcaaagaagaaaaagaaaagggttcggaatacttcggggcgtataccgaggatctaccggatacggggtattggccctcttcaaaaaaagaatgtgcgtaaggtgcgtgtcgacctcctcggacgtatctctctgctctgatgccccctgctaccatgatgaagcgaacgatctatatcggcaatcctgcctacctctctctgcgcctcaagcagatggaggtgcagcagccgtcggatgatcgtgagacgacggtacggacgatcccgatagaggatatcgggatcctcctcctcgaccacccacagatcacgatcacccacgccctcttaggggctttgctcgagaataattgcgctatcgtgacctgctccgcgacgcacatgccctcgggactactcctcccgctggacgggcacacgctctgatctgcctacgggtacgcctaaggagcgcaaggcggctaccagcttccgccaagagcttctgaaggatggcttcacgatgtttcagtactccatctatatgcgccattgtgcaagtatggagcaggcgcagacacatgtgcggcgggtcaaggcgatgcttcctgatgagggtgaagtggtgatcatgacgcttaccgacaagcagtttggtatgatgcagcacttctcttcgcgcaagcctaccgatgctgttcagctcccaggcctcttcgatatgctatgaggtcttgaatcggaaaagtcgctaagtaaaggaaaagcccgtggatatccacgggcttttctctttctaaatcctcctgctaagtacttgtcccatagactcctttgcggggtctgctgtattagcaagtatgaaggtacgaaatctgaaagctaatcacaacttgtcggtggctataggcgtaatatccctcgctgtattagcaagtatgaaggtacgaaatctgaaagctaatcacaacgcttctttgcggtgttcgactctgtgacgcgctgtattagcaagtgtgaaggtacgaaatctgaaagctaatcacaacggtgacatcatcaaagccctacggcagtacgctgtattagcaagtgtgaaggtatggaatctgaaagctaatcacaactcccctgcaacgacgctgcgtgaggtgtaggctgtattagcaagtatgaaggtacgaaatctgaaagctaatcacaacacgtggtcacctcggtgcgcctgctggatggctgtattagcaagtatgaaggtacgaaatctgaaagctaatcacaacgatacgaagcggtttctttgggggtatggggctgtattagcaagtatgaaggtacgaaatctgaaagctaatcacagctcgggcgctttgtcacctctgacggcgtcgcgctgtattagcaagtatgaaggtacggaatctgaaagctaatcacaacacagctcccaaggcactcatggacgtgacggctgtattagcaagtatgaaggtacgaaatctgaaagctaatcacaacagaggcttatttactactgcacatttggtggttatagcgataggttattgctccgcgtatggataaaagttgtggacgagtggcagaaaagtttgggctgcgtacgtggctctaatatctatgtacgtggatatttggattgacgtacctggtctttaagactacgtacatagacaaaggaataccactacgggaaggtgcttttttcttcacgagaatgtcacttccccctccgctggataagaggaatactcatgataaggcgcagggcttgtgtattacttcggaggggtataatcgtgtaaaccacttctgtcttcccggctgggtgttgcttgacaatcggacggtgtgtgaagtcgtgatagaggggcagagctacagcaatagttgtttgcgctcggttcagtagtggtttcatatacgaactactattagttcgtatgcgaaacgaatagtcgcttgacccccaaaccagtagtcgtttgagtgcagaccaatagtcgtttggaaatcgactttgcctcaatattgcttccgtataaggatggggctttgatctcatttgattaggtgtcctaaacttatactatctttgcaacggtgaggtactccgaataggggacgtcaccccgattagacctcatccctcgtataagctgggatgaggtctaatttcatatactcactccttggactacagtcggggttagaggctcatagcctactgcccctaccgatgatcttgctgggatctgcaagcgtccaccggtagggggcattcctgtttttaggaggatgaggcgagaaaagtgaaggagtgaggtgctgggtggtagtggattgtatttgagtttgttatcaaggtacttcgttggacaagttgaggagggtggtgtgaacctatataggtcgctgggtcgacctatatagctccgctccgcaacctatattggtcacgctgccgacctatataggttgactcgctgaccaatataggttggtgttgctttcttatagtgggatagatgctatctgtgtgccgagcctgtggtatgtgcggcgagggaaaagagaatggagccacggatgactccgtgactccaccataaagtatcacccagagaccagcggagcttgatagaatcgcacttatagtttgctggcgtgctgacaatacaaagataatccttaactttgtactgcgaggtactccgaataggggacgtcgctccgatcagccctatcctcagtccagagcatagggctgatccttacagtacaagccccactcaagtcgagtggggcttgctgtaaaaagcgaacgtacggagcttgaagtgatcgcaccatcggtaaatacgattgcttcgctgggtacaaagatagtttgtcttttccttgtctcacctgctatctccttgctgtagagaaggctaagctgtggcggtggaggagcttgagaggatgggatgcactcgctgatagctcccttgatgacaggctttgtaccctcagactctgccgagttgcgggcaagtgggggaagcatttgcgtatatgaagaagttgtattacctttgcaaccgcaacaaagaaggtggcaatactcttccttagctcagtcggttagagcatctgactgttaatcagagggtccttggttcaagtccaagaggaagagcttctcccgagtatgggcgtggtgaataagccccttctgacgctgcattaagtactcttccttagctcagtcggttagagcatctgactgttaatcagagggtcctt

SEQ ID NO: 3324 - DNA, 8784 bp, synthetic construct
  misc_feature 1..8784: note = Synthetic
  source 1..8784: mol_type = other DNA
tttttgaattacgcttacaaagttagtcaaagctcgcctcatctcccgcctctacaagggcggtcggcgaaggtccgatagctgactacctatatatagtacttcattcggtgagacgagtgctcggcaaagccacttcctcgaaaagagaagatcccacttgatgcaccctcagatggggcgatgtcaagtgggatcttgtttgaaataatgcgtcagagagcgtgcccctcctaagtcgggatcgtttggctagttgccgttagcctcgactttgtaaagttcacttgataatgactgtgaagaggtgagtgttacctccttctcgtaggtcttgaggtacttgttacctctatactgcttcacgctcgtcttcaccttgatggatgcaggggcattatcgggtctgcgtacgataataccaacatatagccccgaccccttgtgggtgaaggtcgtgcgataggactttgcgatggggtctctccactcggagttgtagatggtctgagagacgagcttgccgtcacggtagatgtcagatcccccttgggtgttggctgtgaagtggacgctgatcggagcggatgcactgatcgtgacctcttgcttgaggtctgcgctgccgaagccgccgaattctccgcctggcaggtcactcttgccaccgcaagagctgagcactaagccaaaggagaagaggagaagagataggatgccgagtcggcgaattgattgttttgtagccattttgcttgtagttgatgatgaggcggagggagggtagaccgagctatccagctccgcagtaatggttccgttaaatgaattgtacttagggaaggagtgtaagacgggcttcttctcctaccttaaccataacgagaaaatgtatggatatgttgttttatcgcggaaatatgttcgtgtataatagtatgtagtaaataaaagtaaacgatcttcgcatcgtatataccccgaattcgcggagaagcagcctcagaatagcttgcttttagcgtagggaacgtggaagtatgatgagccctccttcgaggtgtaagtcgctcatggatgcggtgttgcttgctcgacatcggggaagttgctacatttgtttcagtgctacggctgatcgtagtggcctgacctctcggtctgatcacaaaaaagaagggtgagaacctcacttaagaggccccaccctggatgttctcacaacggaataaatccttattgtgattagctttcagatttcgttactgcaaatgtagccatttttttaatatcaacacaaccaatgcttatgagcaaacatgtacttggtcttgaccttggagtaggatcaatagggtggtgccttatcgccctcgatgcgcagggagatcctgccgaaatcttaggtatggggagccgtgtcgtccccttaaataatgctaccaaagcaattgaagcctttaacgcaggggcagccttcacggcgaaccaagagcggacggcgcgccgtacgatgcgccgaggctttgcccgctatcagctgcgtcgctatcgtctgcgtcgggagctggagaaggtcgggatgctccccgatgctgcactcattcagctccctctgctggagctatgggagctccgcgagcgggcggctaccgctggtgagcgcctgacgctgcccgagctggggcgtgtgctctgccacatcaatcagaagcgtggttatcggcatgtcaagagtgatgccgctgccatcgtcggtgatgagggcgagaagaagaagaaggactcgaatagtgcctacctcgctggcatccgtgcgaatgatgagaagctccgggatgagcacaagacggtggggcagtacttcgccgagcagctccgtaaggatcagagtgagagccccacgggtggtatcagctaccgcatcaaggatcagatcttctcccgtcagcgctacatcgatgagtacgatcagatcatggcagctcagcgcgtgtactatcccgatatcctcacagacgagttcatccggatgctgcgtgatgaggtcatcttcatgcagcgcccgctgaagtcctgcaagcacctggtctcgctgtgcgagttcgagaagcaggagaaggtgatgcgcgtccagcaggatgacggcaagggcggtcggcagctcgtcgagcgtagggtcaagttcggcccgaaggtcgccccgaagtcctcacccctcttccagctctgccgtatctatgaggcggtgaataatatccgtctgatccgtcccgacggctcgccacgtgacatcacacccgaggagcgtgctaagatcgtcgcacatctccagtcaagtgcttcgctatccttcgctgtgctgaagaagcttctcaaggagaaggcactcatcgcagaccagcttacctcgaagagtgggctgaaggggaatagcacgcgggtcgctcttgctgcagctctacagccctatccgcagtatcaccacctcctcgatatggagctggagacgcgtatgatgaccgtccagctcaccgacgaagagacgggtgaggtcaccgagcgagaggtcgccgtcgtcaccgatagctacgtccgtcagcccctctattgcctatggcacattctctactctatcgaggagcgtgacgcgatgcgtcgtgctctcatcatgcagctcggtatgaaggaggaggacctggatggcgggctcttggatcagctctatcgtctggacttcgtcaagtccggctacgggaataagtccgcgaagttcatctgtaagcttctccctcagctacagcagggactgggctatagtgaggcgtgtgcagccgtcggctaccgccactcgaatagccccaccagcgaagagatcactgagcgcacacttctggagaagataccgctgctgcagcgcaatgagcttcgtcagcccctcgtcgagaagatcctcaaccagatgatcaacctcgtcaatgcactcaaggccgagtacggcgtcgatgaagtccgtgtcgagctggcacgcgagctgaagatgtcgcgtgaggagcgtgagcgtatggcagagggtaaccgccgtagagagaaggagaataaagcgatcgcagagaagatccaggagtgtggactcttcccgacaaagtcccgtatccgcaagtatatgctgtgggaggaggctggagaaaagtgtctgtactgcggtcagatcctgacgctgagccaatgtctcaacggggacgatatggaggtcgagcacatcatcccgaagtccgtcctctatgatgattcctatggcaataagacctgcgcctgccgccgatgcaacaaggagaagggcaatcgcactgctctcgagtacatccgtgcgaagggctgggaagccgagtatatggagcgcatcaatgggctgctggataagaaggcgatttcctacagcaagcatcagcgcctacgctggctgaaggaggatatcccctccgacttcctcgagcgccagctgcgtctgacgcagtacatctctcgccaagctatggccatcctccagcagggtatccgccgtgtgtctgcgagtgaaggtggagtgacagcccgacttcgtagtctctggggctatgatgatatcctccatacgctcaacctcgatcgctacgactccatgggtgagacggagtgcgtatctcgtgagggcgagacgaccgagaagcttcgcatcaaggactggtcaaagcgtaaggaccaccgccaccacgctatcgatgccctcatcgtggcttcgactcgtcagggctatatccagcgcctcaatcgtgtaagctctgagagcgagcgtgaggcgatgagcggagagatcgagaagcagaaggtgacgaagaccgataagctctccctcctagagcgctggctgacccagcgtcctcacttctcggtgcggaccgtcagcgataaggtcgccgagatcctcatctcctaccgcccagggaagcgtgtcgtcacccgcggacgcaatatctatcgtaagaagacggctgatggtagagaagtcaccagcgtacagcggggcgtgctggtaccacgaggagaactgatggaggcatcactctacgggaagatcctctcccaagggagggagcgtattgtcaagcgctatcctttgcatgaccttaagggggaggtcgtagatccgcgccttcgtgaactcatcacaacgtataatcaagagcttaagtctcgagagaagggggcacctattcctccactttgcttggataaggataagaagcaggaggtgcgctttgtgcggtgctatgcgaaaacactatctttggataaggctattcctatgtgcttcgatgagaagggagagcccaccgcatttgtaaagtcggcgagtaatcatcacctcgccctctatcgtactcctaagggcaagctcgtggagtctatcgtgaccttttgggatgctgtagaccgtgcacgctatgggatccccttagtcattatgcatccgcgtgaggtcatggagcaagtcctacagcagggaaatatcccagagtcggtactgaggtcgctccctccctccgactgggtgtttgttgaatccctacagctgaatgagatggtcatcattggtctgtcggatgaggagctccagcgagccctcgaagtgcaggattatcgtaagctcagtgagcatctctatcgtgtgcagaagctctccgcaggtaagtactttataagatatcatttggatactgatgtagatgaggataataggtcagggcgtatccctaagttctatcagcttagcttggatgcttacaagaagaataatgtacgcaaggtgcgtgtcgaccttctcggacggatctctctgctctgatgctcccctgctaccatgatgaagcgaacgatctatatcggcaatcctgcctacctctccctgcgcctcaagcagatggaggtgcggcagccgtcggatgatcgtgagatgacggtacggacgatcccgatagaggatatcggggtcgtcctcctcgaccacccacagattacgatcacccacgccctcttaggggctttgctcgagaataattgtgctgtcgtgacctgctcggcgacgcacatgccctcgggactactcctcccgctggacggacatacgctccagaccgagcgcttccgagcgcagctcgatgcttcgcttcccctgaggaagcagctctggcagcagacggtgcaggcgaagatcctcaatcaagctcacgccctgcatgccgtcttgggagagccagcgaagaatatgcttgcctggtcccgccaggtcaagagcggggatgccgataatctcgaggcacgggcagctgccttctactggcgcaatctcttcatcgccctccctggcttcgtgcgggagcgagaggaggcggctccgaactcgctcctgaactacggctatgccatcctcagggccatcatcgcacgggctctcgtcggctgtggtctcctcccgacactcggcattcatcaccacaataagtataatgcctattgtctggcggacgatatcatggagccctaccgtccctatgtggatctgctcgtcgtggagatctgtgaggaggagggctttcctacagagctgacgaaggagatcaaggcacgactactcgccctcccgacgctggatgtggagatcgagggacagcgacgcccgctgatgctggcagcgacgcagaccgcgacctcgctcctgcgttgctttacgggtgaggcccgccgcttggcttaccctctcttgctatgcgagccaagcgactaagtgaataccgcatcatgtgggtctttgtcttctttgatctccctacgggtacgcctaaggagcgcaaggcggctaccagcttccgccaagagctgctgaaggatggcttcacgatgtttcagtactccatctatatgcgccattgtgcgagtatggagcaggcgcagacacatgtgcggcgggtcaaggcgatgcttcctgatgagggcgaggtggtgatcatgacacttaccgacaagcagtttggtatgatggagcacttctcttcgcgcaagcctaccgatgccgttcagctcccaggactcttcgatatgctgtgagatcttggatcggaaaagtcgctaagtaaaggaaaagcccgtggatatccacgggcttttctctttctaaatccttcagctaagtgcttgttccatagactcctttgcagggtctgctgtattagcaagtgtgaaggtacggaatctgaaagctaatcacaaccaaactgacggctctatctggcaagaattggctgtattagcaagtgtgaaggtacggaatctgaaagctaatcacaactacaaccccaataaggtagtccgcttatcggctgtattagcaagtgtgaaggtacggaatctgaaagctaatcacaaccatcatcatttcatgaactacatagctcgagctgtattagcaagtgtgaaggtacggaatctgaaagctaatcacaaccccagccctcccgaggtttatctctcacgcgctgtattagcaagtgtgaaggtacggaatctgaaagctaatcacaactctattcagcccgctcttactaagttaattgctgtattagcaagtgtgaaggtacggaatctgaaagctaatcacaactgcgttgtttctaaacgttacgccactgtggctgtattagcaagtgtgaaggtacggaatctgaaagctaatcacaacaccagtctctctgcacccacagcagccaaagctgtattagcaagtgtgaaggtacggaatctgaaagctaatcacaacaagagcaaccaccagctgtttaaggcttctgctgtattagcaagtgtgaaggtacggaatctgaaagctaatcacaacctcgctgctacgaggatgaactgaaggcgtgctgtattagcaagtgtgaaggtacggaatctgaaagctaatcacaactatgacttcatctcctcgctctcttcggccgctgtattagcaagtgtgaaggtacggaatctgaaagctaatcacaacgggttggggcgcactttgaagtcgaaacgcgctgtattagcaagtgtgaaggtacggaatctgaaagctaatcacaacgtaccccttaatgatcgtccagatgcgttggctgtattagcaagtgtgaaggtacggaatctgaaagctaatcacaacgaggttcttgtcgtcgatgtagacattggcgctgtattagcaagtgtgaaggtacggaatctgaaagctaatcacaactatgttttcatagttcttgacgagttcatagctgtattagcaagtgtgaaggtacggaatctgaaagctaatcacaacgagttcatcaacaataccaaccccgtagccgctgtattagcaagtgtgaaggtacggaatctgaaagctaatcacaacatacacaatgagggaggtatgcttatctctgctgtattagcaagtgtgaaggtacggaatctgaaagctaatcacaacacaggtgtcctctacatcgccatccctcaggctgtattagcaagtgtgaaggtacggaatctgaaagctaatcacaacaaacgtatgcgtgagcaaaattcttttgttgctgtattagcaagtgtgaaggtacggaatctgaaagctaatcacaacagcaggcgaacgcttctgcacggagaaccggctgtattagcaagtgtgaaggtacggaatctgaaagctaatcacaacaccgagcgcctcaagcgccaacgctccccagctgtattagcaagtgtgaaggtacggaatctgaaagctaatcacaacttggtcggcgacctttctaatcggcacggtgctgtattagcaagtgtgaaggtacggaatctgaaagctaatcacaactgttgatggtatctactctccagcggtcagctgtattagcaagtgtgaaggtacggaatctgaaagctaatcacaacaaagttgccttcgcctatctagaacctaccgctgtattagcaagtgtgaaggtacggaatctgaaagctaatcacaactctgcatcaggctgcgccgtggtgcgcttggctgtattagcaagtgtgaaggtacggaatctgaaagctaatcacaaccttcggcgtcgtcttgtggtagtacttcacgctgtattagcaagtgtgaaggtacggaatctgaaagctaatcacaaccgaaggcgcagagatgtacagcctgctccggctgtattagcaagtgtgaaggtacggaatctgaaagctaatcacaacatgtcgacataaacgttcttgggaattctggctgtattagcaagtgtgaaggtacggaatctgaaagctaatcacaactagtcgttcttcgtcgttcctttccacgaggcagtattagcaagtgtgaaggtacggaatctgaaagctaatcacagcttctacgtcggggagtactgctcgatccttgctgtattagcaagtgtgaaggtacgaaatctgaaagctaatcacagcgacgaagcggacaagatgagcgacaccgtggctgtattagcaagtgtgaaggtactgaatctggaagctaatgacaacagaggcttgtttactactgcgcatttggtggttatggcgataggttgttggtccgcgtctggataaaagttgtggacgagtgacagataagtttgggctacgtacgtggctctaatatctacgtacgtggatatttgg

SEQ ID NO: 3325 - DNA, 5689 bp, synthetic construct
  misc_feature 1..5689: note = Synthetic
  source 1..5689: mol_type = other DNA
tatatatgatcatgaggactacaaagatacgaagagcagggcgcatcacccagcctcagcctcagtccgcagccaagactccttccccccagcgcaagcgagaaggcaaggaggctaccgcagcccatacggagtcttctccttacacactccctccaaggcttggtcctattagggggcatcgcctatatcacactcaagctacagaagggagaaggtcgacgggcttcggcaagaaccccacggcgccctacaggctctgctgggatccaagctaggtcctcgccatcctccccgtcttccccaagacagcccttgggcgcaaaaaaatgagcccagacacgaaaaagccagtggtcacccactggctttttctttcttcgcatctcttaataagtagctgtccccaatagccttacagaggtcgcgttggattgctactgcgaaggtacataaacgggaagccaatcacaacaggggacgcattcgtttggatcaaaaatggttggattgctactgcgaaggtacataaacgggaagccaatcacaactgcgaggagcgcaagacggagagcagcaatgttggattgctactgcgaaggtacataaacgggaagccaatcacaacggccttgtaggcaacaatcgcctcacctaggttggattgctactgcgaaggtacataaacgggaagccaatcacaacgctcacggttgatcttgaagcgcctgagctgttggattgctactgcgaaggtacataaacgggaagccaatcacaacagacgtgtatttctccatagagagaggggttggattgctactgcgaaggtacataaacgggaagccaatcacaacagaggttcaccttaactcttttcctttttgttggatggctactgcgaaggtacataaacgggaagtcaatcacaacgtgtggcgtatcacgccaatatagatgaggttggatcgctactgcgaaggtacataaattagctccttggcaccttgctcctgcttaatgtagagaaggaggagaagatactccagcggcccttgccctcaagggagagggctcctgagggatatctgtcaggaggctgagtgtcgtcagtggtgcacgtgaggggtatcacctagccagctgagggatagctctcacggcagccgaggctaggccgacacttcgtctccctcatagaggcgggctgggcttggtcgatcggaggctgaagataagagagggaggagagctgctcctcatttacatcaaacacccgtcctaggcaagggctagcgacctccttcctctgcgagagctgcagcctaagggatttggcctactgccccgttttagctacgtttgtatcaggccttcaataaagtgggccttaattaaggtatagcatgaaaaaagttttaggtctcgacctcggggtcggatccatagggtggtccctcatcgccctcgacgaaggccagcgccctgccgagatccttggcatgggctgccgcatcgtcccacttactgatgaggaaaatatgttcgccagcggtggagggattagcgagaatgcaaagcgcacgcagatgcgcaccatgcgcaagatgctcgaccgctaccagcagcgccgcaccaagctcgccaacatccttcgcgagcaccagatgtaccccgacgaggcactcatgcagctgccgctcatgcaactctggcagctgcgtgccgatgctgcgacccctgggcgacagctgagtctacccgagctagggcgcgtcctctaccatctgagctagaagcgcggctaccggcacagcaagagcgacgagagcggagaggataaggaaaccaagtacgtcgccgaggtcaagagtcgctaccagcagatccaggaggagggcctcaccgtggggcagcactttgccaagctcctcaaggataacgagcagcatagcgagcgcggcggcgtgtactacaactaccgcacgaaggatcaggtcttcccccgtgaggcctatgccgaggagttcgatcgcatcatggcggtgcagcgcgacttccaccctagcctgacggatcgccttatcgcgaagctaagggactgcatcttctaccagcgtccgctcaagtcctgcaagcatctggtgtcctactgcgagttcgagcgcaagcaggtcgagctccccgtcaagcaagtggagcgcgatggtaccatcacctacaagaagcatctcgtagacgtcgggcccaaggtggcgcccaaatcctcgccgctggccgaagtatgtcgtatctgggagacactcaataacctccgcctttacttccccgacggcagcgagcgcaccatcacgcaagaggagcgccagcggctcttcgattacctgcaggagaacgatgcgctgaacctcgcccaaacgaaaaagatcctgaagtgtaaggacgaagacctcttctccaacatcctccttgaaaagaagaaaaaggagaagccgacggaaaagaagaagaaaggagggaacgaggaagccctctccttcagtgccctccctgaagaggagcaggcaaagaagcagaaagaaaccagcaaggataaagaagaaaaagggaatcccgaagtaaagatcaagggaaacacgactaccgcgacactgcgtaaggctcttaagggctataaacagtacctggagctgctgtccttcgagctctccgaggaggagaaggctgatcccgagacgggcgagctgcgtcctgtcatcagcgagcactatcagcaggagcctctctacaagctatggcatatcctctattccatcgaggacaaggaggctatgagacgagcgctgaccaagcagctcgggatctccgaggctgacctcgacgcagggctcctcgatcagctcttcaaggtagacttcgtcaagcagggctacgccaacaagtccatcaagttcatcagcaagctcctcccgcacctcatgcaggggcagatgtacagtgaggcagccaagcgagcaggcaagcgccattccgagagccttaccgcggacgaactccagcagcgcccgctcctagacaagatccccgtgctgcagcgcaactcgctccgtcagcccgtcgtggagaagatcctcaaccagatgatcaacctcgtgaaccagctcaaggcggactacggggagatcgacgaggcacgcgtagagctagctcgcgagctcaagatgagccgcgaggagcgcgagcgcaccgcgtcgaatcagcgtaagaacgagacggaaaatcagcgtatcgcagccttgatcactaaggactacgggctccatcccactaagaccaggatacagaagtacaagctgtggaaggagactgaggggcactgtatgtactgcggtgaggcggtagacatcaagcaattcctcctagggagcgaggtcgaggtcgagcatatcatcccacgctccatactctacgacgactcgctgtcgaataagacctgcgcttgccgcaagtgcaacagtgagaagaataatcgtacggccaaggaatatatcctaagtaaggatgaggagactcagaagaagtataacgctcgcgtgcaggagctcttcgagcgacacaagatcagctctgccaagcgcagccgcctacacatgacgctcgctgatatccccgaggacttcctcgagcggcacatgcgcttgacccagtacatctcgcgtgaggcacatagccttctcaccaaggggatacgctgcgtggagacctcctcagggggtatcaccgcgaccctacgccgcctctggggctacgacacgatcctcaaggagctcaacttcgagatttacaagtcacgaggagagaccgagacgatactcatcgagggggtacccaccgagcgtattgcaaactggtccaagcgcaatgaccaccgtcatcatgctctggacgccctcgtcgtggcctgctccgacaagaaatacatccagcgcctgaactaccagaatagcgaagccgataggaagagtatgaaggatgaactaaaagaaccagaggggaagcacgcagaccaacagcagctgctagatcgctggctgagggcgcagccgcactttgccccgcatatcgtgaaggccaaggttgcagagatcctcatctcccttcagcccgaagaaagaatctattcaagaggacggaatatcatccagcgaaagggagaacggtttgtccaggagggtatcctcgtgcctcgtggcgccctctcgaaagagaccgtctatggctctatccagcaaaaggagcaacaaaagttcgtctataagcgccccttgcaaaaactaggggcctcagatcgtgagtccatcgtggatcaacgcctgcgtggtattatcgctcagcgactagccgagcacggcggcgaccccaaaaaggccttcgctgagccgctgtactccgaccgagcccatacacagcagatacgctcggtgcgctgcttcctcaagaaagggcagaatacactgatcccactacgccatgatgcccaaggaagagctaaggccttcatcgctcctgggaataaccatcatgttgctttctatacagactctaagggacaactacaagagtacgtcagcagcttttgccaagttatagaacgggtacgttttggcctaccgcccatcatctacgaccctcgcgctacgatggagcaagccctctccatcactgagctccctgaatctgtgctcaaaggcctcccgccctcaaattgggtaatcaaggagaccttaaggcgggatgagttcttccttataggtatgagtgatgaggagatagcatctgctctcgaggctcagaactacagcctcctaagtcgccacctttaccgtgtacagaaactctcctctataaactatgtcttccgccatcacttggagactagtgttaaggaggacaagagcactagtggggaggtccccatgtcctatcgagtgcagagtctcacaacttatagcaatcttaacccaaggaaggtgaaggtcgaccgactcgggaagatcagcctcctctaaactatcaaaacttgtatcatgataaaacgcacgctttactttgggaatcctgcttatctgtcgcttagggacagacagcttgaggtacacctaagacaggattcccctagtaaaggaccatcacggacgatcccgataggagatgtcggggtcgtcctccttgatgatcctcagagcaccgttattcacggtgctctgaatgcccctcccggattcgggttggatggctactgtgaaggcacataaacgggagaccaatcacgacctagaccttgacaagtgcgtagcgaggagaggcacgagggggagaggcgaaagggacaaaaggaacgcccccgcggagcgactgctgggcagcggcacttcgcgggggcggtcgttattaaaggagtggaggcaaaggtggcatctcgaccctgagggagaggctatgagagcctcagctaggggagagacggcggagcctcacgggcggcgaggaccttacctcacctcggcgttggcttacttcacctcgcccttgatgcggagggtgaagccgccatccttgccgttgctgtagacagcgatattcttgtagaaggggccggggcggcctgcggggttgtaggtcacgacga

SEQ ID NO: 3326 - DNA, 5202 bp, synthetic construct
  source 1..5202: mol_type = other DNA
  misc_feature 1..5202: note = Synthetic
gataatggttccgttaaatgaattgtacttagggaaggagtgtaagacgggcttcctctcctaccttaactacaacgagaaaatgcatggatatgttgttttctcgcggaaatatgtacgtgtgtaatagtatgtagtaaataaaagtaaacgatcttcgcaccgtatataccccgaattcgcggagaagcagcctcagaatagcttgcttttggtgtaggaaaagtgggtgtatgatgagccctcctacgcggcgtaagtcgctcatggatgcggtgttgcttgctcggaagcggggaagttgctacatttgtttcagtgctacggctgatcgtagtggcctgacctctcggtctgatcacaaaaaagaagggtgagaacctcacttaagaggccccaccctggatgttctcacaacggaataaatccttattgtgattagctttcagatttcgttactgcaaatgtagccattttttttaatatcaacacaaccaatgcttatgagcaaacatgtacttggtcttgacctcggagtaggatcaatagggtggtgccttatcgcccttgatgcgcagggagatcctgccgaaatcttaggtatggggagccgtgtcgtccccttaaacaatgctaccaaaacaattgaagcctttaacgcaggggcagccttcacggcgagccaagagcggacggcgcgccgtacgatgcgccgaggctttgcccgctatcagctgcgtcgctaccgccttcgtcgagagctggagaaggtcgggatgctccccgatgctgcactcattcagctccctctgctggagctgtgggagctccgcgagcgggcggctaccgctggtgagcacctgacgctgcccgagctggggcgtgtgctctgccacatcaatcagaagcgtggctaccggcacgtcaagagcgatgctgctgccatcgtcggtgatgagggcgagaagaagaaggactcgaatagtgcctacctcgctggtatccgtgcgaatgatgagaagctccaggacgagcataagacggtggggcagtacttcgccgagcagctccgtcagaatcagagtgagagccccacgggcggtatcagctaccgcatcaaggatcagatcttctcccgtcagcgctacattgatgagtacgatcagatcatggcagctcagcgcgtgcactatcccagtatccttacagacgagttcatccagatgctgcgtgatgaggtcatcttcatgcagcgcccgctgaagtcctgcaagcacctggtctcgctgtgcgagttcgagaagcaggagaaggtgatgcgcgtccagcaggacgacggcaagggcggtcggaagctcgtcgagcgtagggtcaagttcggcccgaaggtcgccccgaagtcctcacccctcttccagctctgccgtatctatgaggcggtgaataatatccgtctgacccgtcccgacggctcaccatgtgacatcgcacccgaggagtgcgctaagatcgttgcgcatctccagtcaagtgcttcactatccttcgctgcgctgaagaagctcctcaaggagaaggcactcatcgcagaccagcttacctcgaagagtgggctgaaggggaatagcacgcgggtcgctctcgctgctgctctgcagccctatccgcagtatcatgacctcctcaatatggagctggagacgcgtatgatgaccgtccagctcaccgacgaagagacgggcgaagtcactgagcgggaggtcgccgtcgtcaccgatagctacgtccgccagcccctctatcgcctgtggcacatcctctactccatcgaggagcgtgatgcgatgcgccgtgctctcatcacgcagctcggtatgaaggaggaggacctggatggtgggctcttggatcagctctatcgtctggacttcgtcaagcctggctacgggaataagtccgcgaagttcatctgcaagctcctcccccagctacagcaggggctgggctatagcgaggcgtgcgcagccgtcggctaccgccactcgaatacccccaccagcgaagagatcactgagcgcacgcttctggagaagataccgctgctgcgacgcaatgagctgcgtcagcccctcgtcgagaagatcctcaaccagatgatcaacctcgtcaatgcgctcaaggccgagtatggcgtcgatgaagtccgtgtcgagctggcacgcgagctgaagatgtcgcgtgaggagcgtgagcgaatggcagagggcaaccgccgtagagagaaggagaataaagcgatcgcagagaagatccgtgagtgtggactcttcccgacgaagtcccgtatccgtaagtatatgctgtgggaggaggctggagaacagtgtctgtactgcggtcagatccttacgctgagccaatgtctcaatggggacgatatggaggtcgagcacatcatcccgaagtccgtcctctacgatgactcctatggcaataagacctgcgcctgccgccgatgcaataaggagaagggcaatcgcaccgctctcgagtacatccgtgcgaagggctgggaagccgagtatatggagcgtatcaatggcctgctggataagaaggcgatttcctacagcaagcaccagcgcctacgctggctgaaggaggatatcccctccgacttcctcgagcgccagctgcgtctgacgcagtatatctcacgccaagctatggccatcctccagcagggtatccgccgtgtctccgcgagcgagggtggtgtgactgcccgacttcgtagtctctggggctatgatgatatcctccatacgctcaacctcgatcgctacgactccatgggtgagacggagcgtgtatctcgtgagggtgagacgaccgagaagcttcgcatcaaggactggtcaaagcgtaaggatcaccgccaccacgctatcgatgccctcgtcgtggcttcgactcgtcagggctatatccagcgcctcaatcgtgtaagctccgagagcgagcgtgaggcgatgagcgaagagatcgagctacagaaggtgacgaagaccgataagctctccctcttggagcgctggttgacgcagcgcccccacctctcggtgcggacagtcagcgataaggtcgctgagatcctcatctcctaccgcccagggaagcgcgtcgtcacccgcggacgcaatatctatcgtaagaagacggctgatggtagagaagtcacctgcgtacagcggggcgtgctggtaccacgaggagagctgatggaggcatcactctacgggaagattctctcccaaggtagggagcgtattgtcaagcgctatcctttgcatgacctgaagggggaggtcgtagatccgcgccttcgtgagcttgtcgcagtgtacaatcaagagattacatccaaagtaaaggcgaagggagctcccctctatctcgatgctgcagagaagcaggaggtgcgctctgtaaggtgctatgttactcagccttccgttgcaaaggctattcctattcgctttgatgagcgtggtagagctactacattcgtaaagtctgggaataaccatcaccttgctctctatcggacccctcagggcaagcttgaagagtctattgtgaccttctgggatgctgtagaccgtgcacgctatggtatccccttagtcatcacgcatccgcgtgaggtcatggagcaagtcctacagcggggagatgtcccagagtcggtgctgaggtcgctcccaccctccgattgggtatttgttgactcccttcagccagatgagatggtcatcattggtctgtcggatgaggagcttcagcaagccctcgaagtgcaggattatcgaaagttcagtgagcatctctaccgtgtgcagaaggtgtcttctctgtactacgtcttcagatatcatttggagacgagtgtggcagacgataagaatacagcggggcgtattcctaaatttcatcgtgtgcaaagcttgaaggcttatgaggagaagaatatacgcaaggtgcgtgttgaccttctcggacggatctctctgctctgatacccccctgctaccatgatgaagcgaacgatctatatcggcaatcctgcctacctctccctgcgcctcaagcagatggaggtacggcagccgttggatgatcatgagacgacgatacggacgatcccgatagaggatatcggggtcgtcctcatcgaccacccacagattacgatcacccatgccctcttaggggctttgcttgagaataattgcgctgtcgtgacctgctcggcgacgcacatgccctcgggactgctcctcccgctggatggacatacgctccagaccgagcgcttccgtgcgcagcttgacgcctcgcttcccctgaggaagcagctctggcagcagacggtgcaggcgaagatcctcaaccaagctcacgccctgcataccgtcttggatgagccagccaggaatatgctcgcttggtcccgacaggtcaagagcggggatgcagataatctcgaggcacgggctgcggccttctattggcgcaacctcttcatctccctcccgggcttcgtgcgggagcgaggggagtcggctccgaattcgctcctgaactacggctatgccatccttagagccatcatcgcacgggccctcgtcggctgtggtcttctccccaccctcggcatccatcaccacaataagtataatgcctattgcttggcggacgacatcatggagccctaccgcccctatgtggatctgctcgttgtggagatctgtgaggaggagggcttccctatggagctgacgaaggagatcaaggcacgactcctcgccctcccgacgctggatgtggagatcgagggacagcgtcgcccgctgatgctggcagcgacacagacggcgacctcgctcctgcgttgcttcacgggggaggctcgtcgcttggcttatcctctcttgtcatgcgagccaagcgactaagtgaatatcgcatcatgtgggtctttgtcttctttgatctgcctacgggtacgcctaaggagcgcaaggcggctaccaacttccgccaagagctgctgaaggatggcttcacgatgtttcagtactccatctatatgcgccattgtgcgagtatggagcaggcgcagacgcatgtgcggcgggt

SEQ ID NO: 3327 - DNA, 23000 bp, synthetic construct
  source 1..23000: mol_type = other DNA
  misc_feature 1..23000: note = Synthetic
ttttcgagcctcaattttacccaatgttgccactttggaaagtgcagttgaaataggcaaactaacaattttcttttctttgttaacaactgcatttcctgccaacttggatacagatgcattatttatcttctcttttttagccaaacgatccttggcattgtcagccccaacaacttgagatggctcgtgtacacgaaccaccacaaaacaaccaaacataaacacaatcagaagaatcaggcttgtaaacactgaaccttccctgtcgtggttataaaattcgtcgctcatcacttacttgctgacttagcctcagaatgcaactgaacgtaaactcccatagtttccgcaatccttggatctttttgagggtatggagggctcttcttgaaaaaatgtataaagatcaaagatagacacccgcccataaatgccatacatcccaaatcaatccaaattaaactcatccaaccatctgactcgtgaatcaaaggcataatattataactcatatcacaaaaatggagaaaccaagcaagaacagtaacagttatcattatctctggctttacctttacatcctgtctcaacaaggcaaggaatggcacaaagaaatgaccaaatattattaacataccaacactccaccaagttccctgctccctttttacataccaaaaagtttcttcgggtatcgaagcattccaaattaagaaatattgagagaaatgaatgtaagcataaaaaacagtgaaggcaaaaaacaaggtcgcgttatccttcaatgtactcttttgaacaacatccttgagaggaccataggtttttaaaagcaaactaattgcatagatagtaattaaagatacccaaacacttcctgcaaaataataaacaccatacattgtcgaaaaccactggtattccaatcctttcatccaatcaatcgctccaatagtcaatgttgcagcaaagataaaaatacctcctgctgctatctttctattgtaaccagtccatttaggtgctccatctaaatcttgagctaacgaatgtttcctcatgaaccaagtaattacgccccaaagtacaaaacataatacccatcttagatgccaaaaactagaattcagataacccttttttgcataccaagcatggtcatgagtttcacccttcgacttatattctttctcggtttgcatccatgagtaaaaagcacggggacctccatgattgtgatcatggttatctgcattactttctttaacatcaactttttctccattagctaaagctgcaccttctccagcctctttagccttaaccgcttgttcatgcccatgtttctccgccccgtgggaaagttcaacaaactcagctccagaccacaaagcaattggaataaagaaaacggccaaaattggcaacaaacaggacaaatgttctgcgatccttcggataggaacaatccaatgcgtatctaaaagataatgcagtagcactagaaaaaaaccaccaaggcatatgctcaaatagaacataaaagaaactagccaagcatgggtaaaatgaactttatcaacaaatatacctacgagcgccaaaagcgcaccagctataattaaagccaaaggaagcttactgagccatgctggaaaacgagactccggctcggcttttttagcagcagcttttttcttaatagcttttttcttagcggtcattaaacgataaatttctgacgattatttggcctcgatgactttctgcaattcatccctgcctatttcaatttcctccaacttacccaattgactatactgcaaagcccggagataacttacaacatgccacaaatcttcattactcattttcgagtcatatgcaggcattctataagaaacaataccaacttcattagtggttaaattatatccatttttaaggacatcaaatatataaccgtcttctatctgaactaatttcatttggtgaagatcagcagctacaagattatattgggatgttataccatttccgtctccagcctttccatgacatggagtacaataaatatcatatctttctctacctctctctaaggtatctttagtgaccttaagagggttaacttcaatccattcatcagttccttcttttttacctgtatttactgcttcatcagtaattggcacgccacgtgcgatcacacctttaacaggaagccttgaacctcgaccatcatttgccccataaatctcattaaatagattaggggcttgcggcctaaccctcgcctgtctgtccatgtcaggaaaaatctcaattggcctattacgcgtaatcgagcctctaaatccagccacagcaatgaccagacaaactatggctacaaatcctgtaataaaataacgcattattcagttaccaattcaatatgtttactgcctgctttcttcaacagtgcacggatttcatcttcctcgtatttcggatcatccgcctcaattaccacaaaaaacttatcgtgtgtaacatccgcaaatcgaatattttttaataatggatgatgaagtcttggcaatcgattcaggaacaacattccaaataatgaaccgaatgctccagaaagaatcgtcatttcatatgctaccggaaaagacgcgaaaggactaaaatttggtttgccgcccacaggaatcccatagtcatatgcattcataaaccaaatcatcaacataccaccaaaaaaaccacataagccacagcaaaaagtaaaccaaccaactttagaattacctaaccccatcgcttcgtccattccatggacaggaaatggtgtatgaacatcccaacgaacatagcccgcatctctaacttgctcagcagcatgcattgctccagccggcgtatcaaattcagccataacaccataaggaatctggtagtcgtctattgaatccatcagtgttttgctcctcccattggatggtgcgggtctgcctgcggtgttacacctttaacttctgaaatagcaataagtggcaagaatcggcagaacaataaaaagagagtcataaaaaatccgaacgtaccaaaataggtcatcatatcaacccagctaggagaataataaccccaattacctggcatgaaatcattatgaagcgatgtaaccacaatcacaaatcgttccatccacattccaatatttacaaatccacaaatcacccaaataaaccaaggtgtcgttcggcaccatttaaaccagaaaaactgtggtgcgagaacattacaaccgatcatccaccaatatgaccaattcatgtctccaaaagcacggttcttgaaagcatatagttcgtaaggattacctccatagtaggcaatgaaaaactccatcccataagcgtatccaacaatagaaccggtcactaaaataaccttagacattacttccaaatggcgaatggtaacaatttcatccagacccttatacaatgacactaatggtatcattagtgtcatcaccattgcaaaaccaccaaagactgccccggcaacgaagtaaggcgggaaaattgttgtatgccatcctggcaactgggaaacagcaaagtcgaaagaaacgatagagtgaaccgatagtactaatggtgtagatagaccagctaacaataaataagccttctcgtaattcctccaatgtctattcgaaccagtccaacccaatgaaaataaaccgtatagaaactgtgctaacttatttcgaagtttagctgccggttcaataacctttccggcaaccttgcgaaaccgatctcgcatagttgctaaatccggaatcaagcccatataccagaataataccgaaacggtgaaataagtagacaccgcaaaaacgtcccaaagaagaggtgaacggaattgaggccaaatcgaattggcattcggcagcggaaacagccaccaatcaaaccatatgcgtccaacatgaactgccggaaagataccggcacacatcaccgcaaaaatagtcatagcctcggatgcacggttgatagaagtcctccatttctgcctcaaaagaaataagatagcagaaatcaaagttccagcgtgcccaataccaatccaccaaacaaaattaacaatcgcccacccccaagcaacaggatgattcaaaccccaaacaccgactcctgtggatatcaagtaaaccaaaccaataggcaaaccaagtgaaactaagaggctcaagcccattgtaaacttccaccaatctggggttttattttcaatgacgcctgcaactgtatcagagatccaaccaatagatcggttgttctcaaccaaaggaggacgctccatctcttcgggaggtggcgcaatcttaactgatgatggaacagaatcgtgggccatcagtgtgctgcctccttactgtcggacttggactcaaaaatatcagcgtgattcttttcgttatactccgtgacggtgtttggaatatcaaaatagtcaggcatttctgcattaggattgcgcagctttgccaagtaagttgttctagggcgagtgtcgagataacctagaactgagtaatttcggttttggcgtttaaggcggtaaacctcgctttttggatcagaaatatcaccaaaagaaacaccatcggcagggcaagcctgctgacaagcagggataattgttccgtctggaacatccagtgcagcaatcttttcctcttttttatccagtttacctacagaatctttaatttttgctttttgatcaatcttagcactctgaatccgttgaacacaataggtgcatttttccataacacctctcatgcgaaccgaaacatctggattctttgaaagtttaatcaggtcccattctggatcgaattcgccaccggctttcttgccatcatccagaccaggcacacttccacgtgatggatccttgtaccacctaatcaattcccattctccgttagaactcttattagatggatggagcggactgttgtttaaatcattgtcgtcattaaagaatcgccctggttttcgctctccatcctcaactcccatcgggcgacgattataatcataataattaaaacgtcggaccttataaggacagttgtttgaacaataacgagttccaacacaacgattataggccataagatttaaaccctcctcatcatgaacagtagcattaacaggacaaactgtttcacaaggagcgtcttcacaatgctgacacgaaactccttgataagtaacttgaggattatgttcatcgccagaaaaataacgatgtatactcatccaactcatctcacggcccaacgcaacctgatgttttccaacaatcggaatattgttctcgctttggcatgcaacaacacaagcgttacagccaacacaagtagttaaatctataaccattccccattgttgacgctccacatccatcaactttggaccattaactttatcgtcaccaaaattgtttctgtatggagatgcaggtagatcttcatccgatgcattaacccgttttagctcttgatccttttcccaaggataaccacggtcatcacccttaacaagatgagtagtatgatgaacgctatctagatcaaaatgcttcacaaaatctttgtgagcatcaaagtcttcagcattggcctctctgactaccggccggccatccattactccctgctcctgagtacaagctacttcatatttacttccagtttcagaaagcactgcccctgaagcgacatgctgcgtatcagttgtgcgtgcttcgaaagcactaaatccgccaccacctgtccgctcgtttagaggccctgtagctccaccaactcgaccaactccacgaccataacccagggcaactcctactacatcatctgccattcccggaagaagccaaattggaccttcaatctctcgatcaccaactttaagcttaaaaaccttttgataaaatcggcctgactcagaatgaaaaccgaagcgaccgggtaaacccatagacttggggtccaacttgttgaaatctaaaagatctttggcctcatcgtccaaaagtcggatcgctgtatttaaactaaccaacaagacattatcccatgtgattcgagtcactggattcggagtctcaagcaaccaaccgttgttaccccaacgaccgtcatccacgctatggtccctataaaaagtaacctcaagattaccagttgatggcggagcaatattttttgcattctcgcgccattctgacatagcggcatcaccgtcgaattctgcagttatcgtcttagctgcgctattagccaaaaacccatcgtgcagaaacttgttccacttagcctcacctgctcctgcaatattttcgaaagttgtacgagtaattttgtatgggtcgacttcatctgcatcagaaatacgcgctaatacttcaagctccgttaatccaccaaacaatggagcgattagcggctgtaccggaactaaaataccatcgttagtcctagcatcaccccatgactctaaatagtgtgctgcagggatataggcagtggcgcctcgggaggttttatcaacgttataaaatccgtgacgaataaatttgttggacttgttaacaacatcgttccaagcaatatccgcaggaatgttgtaagcagggtcacctcccaacactatcaaattatcaccctttctaaaattctcagctaaatcttggatagaaccgttcccattctcctgtagtgtttgaagtattaacgtttctccaacattacccaaaagcgaattcatggccatagctgccaagtgcacttcctttggttgccgataaccagcaacaaccagagtcttttcaccttccttcgccaaacgagctaaatcagctacacattctttaacccatttttctaaattcgcatttccctttccttcaacggcatggctctttggaaaatctttattcaaatcaccagcgtattcacctaattctttatcaaatccatttgtttctattccagaagtttcgagagcttccttcaataacaaagccgctactcgccctacacttccagttggaatacgaaggcgatggtcagaattagttccggtcaaacttaataaaccttcaacgatatataaacggttcattacttcggaaggattttcagtgtgatcatccttaacgcgtctgcctgcactaaaatcacgaatgttttgaaaagcagcttcctctgtaccaagaaaatcacaatctaatgaaagtatagctttagctttatcaaatttgtaaatcggtttaacagaagaaccaaaagcaatcgaagcggcctctgaatgaacactaaagtcaacaggctcgtactcgtaaaaattaacaccttttcctttaagatcggctactaacctcgctcttgaaggagaactgctctgctccataagaacatgagttttttcgtttgctaaaccacttagctgatctagtacttttgacttagcaataacgtttaacttaccatcttcaagaagtttaaaattcaaacctctatctgggtcgtaaagacttaaaacagaagcttgcgcatactgatctgttcctccgttactacccgggagctcattgttgccctcaatcttgattgggcgcccatcgtaggattttactaccaatggcaccgcagattgtcgggtaggcattgaagtcgcaaaatattgtggagccccatgcacatagttctccggcatctttgaaaaaggtaagatcttatgttcaggtcgcctacaacccgtgactcctaaaccagccaaagcaaaagacgccgacatgatcttcatgaaattccggcgcgaaacaggatcatcaatcaaatcaacacctgatggaaactccttctcgacaaatgcgcgaaactctggcgtgtcagccttgtgctcaaggctccgccagtgtcgcggaccattattctgctctatagtagaatttttaggattattcatcgatgacaagcggagcagttttctgatgtttttatatgccactccttaacaaaattacgattcttattggctttatcttttgaacgatcgtaagccaaatccgttatcttatctaacggacgcaaacgatcattaggattacgatggcaatccaaacaaaaagtcatactaaaatgctttgcatggctaacctcctccatcaaatccactctgccatgacattccacgcaactcactccacgattaacatgaaccgaatgattaaaataagcatagtcaggtaacttatgaatttgcacccactcaattggtttttctggatttttataactctctcgcactggcttgagttttgggtcgtttggcaaaacaccactgtgacaattgatgcaagtatctgcagcgggaacattagaataccatgacttttcaacgccatcatgacaataacgacaatctaaaccgagctgattaacgtgaatagcatgagagaaaggcaccggttgcgttggctgatagccaacacgactgtatttcggggtaagataataggtcacaccggccgtaactactcccccaatgagaagtaggccaaataatatttggccaggcaaccggtttgtccatttaggaaaaacgtcggacatccaacaaaggagtgatagtaaggtctgaggctaagccccggcaagcgattttgtgaattttttcacaagcggcatcttaagcccaacttgtgcctgctcataaatcacttaaatcctaggcccttagcttcgctaggagtggaggcgagggccggaatcgaaccggcgataaagcttttgcagagccctgccttaccacttggctaccccgccatccaacggaggcggcatcttagggatgatgggatctcattcaagttttttacggcgtttaagcaacaaagaaactatgaaaaatattacctgggataacatcatttgcacatttgccagtactgggtgcaactcgacaaaggatcgtaaattaagggagttttccaataaaagatggcaaaaactgcgttttactcctctggatcaaaccagcggcagcgactttctacagctcctctctaatggtggcactgcaacctcagtctaccttaaagcaatccaagcaatcgcaatagaaaccggcctaatcacccaccccgttctgcccaaaaagatatggcccaaacacaccccaaaaccccgacgagccatcaccgaagaggagcatcgaaggttgtgctctaacactcgcagacactattggcgggttttttacgaaatattgtgggaaacaggcgccgctcagtccgatgcagctcatcttcgcatcgaaaataccgacctaattaagggaattattacatatcagcgcctaaaaacaggcattcgagccgcccaagcgatctcgcccaagctcattaaaatgctaaaaagcctctccgcgagacgtaaaaagggcttttttaccccatttttgcaaaaaatggacagtaaagaccgcgcaaccctctttcgtagaaagtgtaaatcattgaaaatcagcggaataacccttcatagctaccgctacgcgtgggcagaaagagcatttgaactgggactaccagagaggatggcaatggtcgctctgggccataactcagcggctgttcaccgagcctacgctaaaaacgccagagttgtctgcccttcactctgtgaaattgcagaagacagatcgcctcttacccataattaataaatttgaggtaatggtgattaggcaaaaaaaagccgccccgcaggacggccatagaatcccacgaaggtaatcctacgtatttacttcttaaagttattacttgttgtgaaaagcacttcaagaagtggcttgatacaccaacgccaaactgaccattatgactgacctcgtcaattataattatggaaaaaattctcggactagatctcggaaccacctctgttggttgggccttaatcgaaacggacgaaaaaaagagtggttcttttttgggtggaggcgttcgtatatttacgagtgtaaccgagggtaccccaccaactcttaagaatcaaaaacgtcgagacaaccgcggacaacgaataaacattcaaagaagaagcaagcgtaagacagctcttaaggaagcattggtaaaagcaaagcttctaccaaaggaggtactcgatgcatccaacgcgcccgaggcactaaacgcaatcagcaccaaaccctacaacctaagagcaaaagcgctggatgaagcgttgagtgatcacgagttgggacgagccatcctatgcctcggaatgcggagaggttttttaagcaacagaaaaagcggagatagtgatagtaaaaaagttgtaccaagcatcggcttgctaaagtctaatatggatgcaaaaaaatgcagaacgctcggcgaatacctagcccagcaaaaaacccaaagaggcaccaagaataatccaatatacactcatcgctcaatgttcgttactgaactcaatgccatctgggaaaaacaatccaagaccaacaaaaatttaagcgactcgctaagggaacgcatcgagcattacatcttattccagaacccccttaagattcaaaagtatcttgttggagaatgcgctcttgaacctaataaaagaagagcagccaagtggcaaccaatggcacaactctttcgcaactggcaggatgtcagccgaattaaaacactccacgacggcaaaccacttgattgggatcagcaaaaaaaactggtggatgaattacaaaaaaagaaaacactcaagtggaatagtgtgcgcaaactgcttgggcttgatgcggaaacaaagtttaatctagaggaaagcggatcgctcaaagaactcaaaggaaacgacactttaatcaaccttaacaaagctctgggtaagaaggctaaggagctcaccgacgcagataaggaaaagattttaaactggctggacacctcagataacgacgataaacttaaggaaaaaataaagcgcggctacgactttgatgacacaattattgacgcactttgcaagtgctcacttgctaaaaactactaccacttaagtgtaaaagcgtgcaccaagttggttgatgtatttgagtcaaaaaaacaacctttaagctatcgcgacgcaggtgagcaggcaggatatataatggacgaatcggaagccgcaggtaaaggattagaccgacttccggaacctcctcagattagaaacccagtggtcgagaaggctctcgttgagctaagaaaagtagtgaacggagtaatcagaaaatatggcaaacctaataccattcgcctcgaaattgcccgcgatttaaagaatccaaaacgagttagagatgaaatccagaagcgcaacaaacagcaggaaaaaattcgcgaagaagcaaagaaaactttagagagtgattttaaaatctttaagacaaccgaaccgacacgcgaggacattgaaaagtatttactgtggaaagaatgtttcgaagatggaaacggacagtgcccttacacaggcgaagttatttctggtgacaggcttttcaccgacatagaagtagagcatatcattccctacagtcgctgttttgataattcatttaacaacaagacactctgcgtttcagaagagaatgcgcgcaaaggaaatcaaactccctacgaactgtacaacggaaccccgctatatcaggaagtgctggatcgaatcgttaaacttccctatcccaaacgccggcgcttcaagttaaaagatatccctgacaacccggacgcacaacgaacactaaacgacactcgctacatctgtaaggaagcaaagcgctttctacaaaagctaggttcacccgttcaagtttcaaccggacaaatgactgcgggcgttcgaagaaagtggaatctaaaccgcgttctaagcataggcggtgacaattcaaaaaaccgtgaagatcatcgtcatcattttgtggatgcagctatcgttgcaaacatcagtgtcggaatgatccaaatgatttctaagttctcaagtgacgaacgactgaaacgagccatccctggcggaatattttcgctaaagtcattgttcaaagaaccttgggaaagtttctcgaaggatctcacaagcttgcttgaaaagattgtgatttcacattcaccaaccagaaaaatctcaggtggccttcacgaggacactgcattaggcagagtcgaaacaaaggaaggaacagcatttgcaaaccgcgttgaactcggcaaaacattttcagcggaaaaagttaaagccatcgctgatgataagattcgcgaacttgtcgccgcccgattagataagttcgataacgatccaaagcaggcattttcagatttaataaacgacccactcttccacgttgatggcaaaactcctattaagcgagttcgccttcatacaaatgaatcgatctcatcattagccggcataaaacaaaacggctctgtttatgcctactaccgaaaaggtaataactacaaagtagcaatttatgaaatgccggacggcaagtggaaaggccactacctaacagcttttgatgccaaatccaaaaacaccaaaccttcaaaagattttgagggtgggaagttaataatggaactgtgtaagaacgatatggttgagatggactggaaggatggaagaggatcatttcgtcttcaagaaatgtcaggacctaacaacaaaataatttttcgacttcatactgcaaattataagggcacagataacccagacaaatctcttgtcagaaaatcaccaaatcccctcaaaaaacttaacccaagaaaaatcgaagtgtctccaattggtgaagtgatttatgtcagtaaacagaattgttgaagtttcaaatcctgcctatttaaaaactaaaaataaacagctaatagtagaaaaagacggggaagtcgtcggtagtattccatttgacgatctacacgctattattctaacacaccctcagatcactgtttcaatatcagtgctgcagttaagtataagcaacaatattccagttattgtctgtaatgaaaaacatcttccaacaggattccttcactcacctctttcaaactcacttcactccaaattaattcgtcatcaggcagaaataaaagagccattaaggaagcagttatggaagaaaatcgtagccctaaaagttaaacatcaagcaaaggttttgtttgatagtggcaagaaaggagacctgctcgatggactaaaagaaaaagtgcgtagtggtgaccctgacaacattgaagcacaagttgccagaatctattggagagaattatttggaaaccaattccgaagaaatcctgacgaagatggaattaatgctctattaaattatggctattcaattctaagagcatcaactgcaagagctcttgccggatctggactaaacacaactcttgggatatttcactgcaaccaatacaaccacttttgtctggcagatgacttaatggaaatagctcgaccattggttgatcgaattgtttttaaaatcacagaaaaacaacgccctaaaattacaccaaaaacaaagaagaaacttttagagcttataaacacagaggttattttttcggattcaaccttctaccttcctcacgccctgcagcgaagctccaaatcattagctgatgctattctggaaaacaatccggataaatttgtgccaattagtttgaaataatgagaggaggatttcgcagtatgtgggtaatcgtaatgtttgatcttcctacaaaaacaaaaacacaaagaaagcagtatagcgggtttcgaaagaatcttttggaatcgggtttttttcaaatgcaatactctgtttacgcccgatatgtacctagttctgaaaaggctgattcagttcataaaaatgtggtcaaagctcttcccccaaacggagaggtaaggattttaaggatgactgacaatcaatactccagaatggaagtcttcagaaaaaaaagctcatcaaaaattgaaaagccaccagatcaactcagttttttttgactaaaatctagcctaagtatttatcatataggcgtttgtggaagaggtagtgtatcaagccacctcttgcacgcaattcacaacatatctaaactttttatccttatcctttaaagtgtatcaagccacctcttgcacgcaattcacaacaggtcaaacaggcggtgttttagccccataagtgtatcaagccacctcttgcacgcaattcacaattgataagattttgccaaaattacagctagcagccagcccgagattcagaacaattattagctatctctgagtaaacaaattataggtcttggaacaccttggagtgcctttccaaatagttgcttaggacttttaggaagactaaatccaagggctattaacttattaacctgtcaagaatcctttacactttgtcaggaatcctttacacgattcagttctcggaaagtttacactctgtcaggaatcctttacactttgtcaagaatcctttactccagacctagtagtaggtatgtaagtaagcagaggagaagaaaatcaaaaccctagaagcaaaccctccgacgaaggaggaggccgaaaactaaacctcgcagggagccggccggaatcgcttacgaatttaactccagaaccacagaggaacccctcactctaccagcgatcgacaaaaacaaaaattttaatagaaacaaaaaagcaaaagcttactcaaccagcatacagaataagccctcaatggctcatatttgagctctaagcgcatttaatccggaatgtgtaaaactttaagcccggaagcctaaaatcccttagagaggctgtgagagtgttttaacaaagcaagtcgatgtggcaggaaaattttgtgtgcttcataatgaaaataggagggcccgcaaagggggggcggcctattcaaattgaataaagaaggtttgcaatgaaccttctttataaaaacgaaataagctcaattaatcacaacatttggtccggtaatgaactcagaagtgctacgttgactattggaaaattagtcgctgagttttcatctaatcgatggttctttctcatctgattgtcccaattcgaccaagcatcaactaatgtttttaaagacctaacatcaccactggatattgctccagttgtatcgcttaacaactgatgaatacgctctccagcacacaaacttttttccaaatgtttatttgccaaatcaactgaatcaaaatcatttttaacatcaatttgaataggtttatttgcagctttatctttatttttttttgttcgttgctgctgccttttcagcgaccaattctctgaactagcaagcttacttatgtaactataactaactccgtttttcactgacaactctcggagatttaaaaaaccatttacaaaatcggatctgattttttcagtatcaaatctcttaggcctagccatttaataaatataatttttatttctatagctatcaaacgctttagtattttgagtaattgaaaactgaaagagttaaaaaaaaccaactcactctagttataatttcactttgataacgtgactaaaagttgaaaaaaaatgaaaacaaactaagatttcttaacccgaaaaaagcttagatgttagaagagaaaagttgctagtttaagtaggaatcgaaccggcgataaagcttttgcagagccctgccttaccacttggctaccccgccacccaacggaggcggcatcttagggatgatggaatctcattcaagtttttttaaacaaaaccttaacaaatcattctattttgcattttatttaaagtaagctaaaaaacctaatacaacgatgctcctcaaattccaccaaacgctcctcgaatccactttttggacaaatagctaagcaaaatctaatccaattaaatactcaagtgtctcaaagctaattatgtccagttgcatcccaagcctagcaatgctaccggtagctcaaaaacatgaagataaccgacatagaatgccatgtactccttgttccagatgtccgcactgacgccacttcttccgctcaggatgatatagttgtattcatccataccgatgaagggattactggaataggcgaaagtgatgttaatccatggatagccagagcctgcatcgaggcccctagcacccactcgatgggacttagcttaaaggaaatgcttctaggcgaaaatccacttaatacagaaaagatttggaaaaaactctatgttggcagttgcatgaatggacgtcgaggagcagttattaatgccatcggtgctattgatatggcactttgggatatcagaggtaaagccgcaggaaaaccagtctggcaattgcttggtgggacacctcgagattccatacaaccttacgcctcactacaacccaatggaaaaaatttcgaagaatatcgggactcattagttgaatgggttttacatgctaaaaccattggatttaaagcagccaaattggagatcactcttttcggcccttacaatcatagtggcatgaaagaaagcgacgaaaaagttaccgaggtacttgcttactgtcgcaaggctgtaggaaacaattttaccttaatggtggatgttcaatatgcatgggactccgctgaaagagcacttgctactacccaagagtggaaagaatttgatgtttacttcctagaaaccccactttggatcgatgacttggaaggctatgctcgaatgcatgaagaaagcggtattcaaatagcagcaggtgaatggcaaacaactcgatacgaatttcgcgaccttatggatacaggaaaagtggatatagctcaacctgacattggtcgggttggagggctaacagaagctatgaaggtctgcgatatggctgcagcccggcaaagaaaaattatccctcactgctggaaaaccggcatcagtatttcagctagcgcccaccttgccgccatcacaccgcactgcccattcttcgaataccttccagcagaattaacagactcaaaacttcgacaagaactcgttcaagatgaacttaaactcgtaaatggaaaactagctattccgcaaaaaccaggattagggatcgaaatcaatatggatgcactaaaacacttcaaacaagactaataatctaatcgtgcttctctctcatcaatgcgctttgctcacgacgaaggccaggctcaataatgaatgggccaaaagggaaaatagatgcaacaaagagttttactatccaacttaatgaacgttttaagaccatagctgcatgaattattaatataacgtatagagtaaaaagaacaccatgaaccattcccaccacactcacatattcaggcgaaccgaaaacgtatttaataggcatagcaacaaagaataataacaaacttgagactccttcaataattccaatatacctcaaacgttttaaggctttaattttaaacattttatctaattaaaaaactaataatattatacggatccattaaagaaatagttatattaacaacagcgaaatcatgcaatttaaactcaatacatttatcacctcgtcgtcttcttgggtttagctaaaaccgcttccgggagaaacatcgaagcccactcgacagctgcagcttcatcgtgattactgcctccttccaaaagaaacctgccatcccattctcgcatcagtttagccctaccaaataatgctacaacacggcgcgtattaagaaaaattcttggacgttttttatgactataattcatatcccaatccttctgattgaaagttgttcttttcaattccaaattcgaaacgcatacgactaaaccaccaatcggcgacaagttttgtagctttttgatgacggcttatattaccgccacgaatgccgccccctaaactttttttaaatggcaactccatttgccctctggttgacaagaattctttatctatagttttcattttaaattagccactgtttgcagtgacggaaaacagcctgatacgccatataggacattagctgtcccatctgaagatttatcttttcttaagataaaaagattatttgttcttttagtgctaaagtagctcttgttgaccagattttgaaactgggctgaggccaagttttttataactagcctcggtggcaacccttccctgaggagtgcggtttaaatagccttcaaggatgaggtaaggctcgtacacctcttccaatgtgtctgactcttcaccgacagcaaccgctaatgacgaaagccctacaggaccacctccgaacttaactataatagattcaagaattcgcttatccatttcatctagtccgtcctcatcaatctccaacatagccaacgctttgtcagctataacaccgtcaattttgccttcagccctcacctgcgcatagtcacgcacgcgacgtaataaattatttgctattctaggcgtaccccgactacgacgagcaatctctgccgccccttctgaatccgcttcaacctcaagcaatctagccgaacgaagcacaatagactccaaatcatctccctgataataatccaaacgctctcgaacaggaaaacgtgtcagtaaaggcgccgttaaaagcccactccgagtagtagctccaataagagtaaacttcggtaaatttaaccgaacactccgagcattcggtccctggtcaataataatatcaagggtataatcttccattgcaggataaagatattcctcaatatttttctgtaatctatgaatctcgtctataaataaaacatcgccttggtttaaattagtcaataaaccagcaagatcagcagctttctcgatagttggaccactagtaaccttgagttctcctcccatctctcttgcgagtattcctgccagcgtggttttcccaagacctggagggccacttagcaaaatatggtctaatgaatcattacgttttttggctgcctgtacagcaatatcaagcctctccttaaccttattttgaccagtaaagtcagaaaatgcacctggccgcagtgttccatcaagtgcggcatcaggctgtgtcaaaacatcagatataatacgatcagccattaaaaatacagactgctctaaagagtgtcacaacccaaggcaatttaaaagaattggggaagagaactaaaaacttgctataactattagttttaggctcaaatctgaacgcatgattaattcattcgtgaatacaatactcgccataacaggcatggccgtaatcctttcacttggtatcctgaacttggttgccaccgaaccgcatggatttgtcacgggttttatttggttaattatatccataggccttattggactacttaccgtattatataataagaaacctactgcaggttgggtattgctagttgtttataccttttttctttatatgattgaaggacctcatttgtttactttcagcttattgggatttacatgggcttttgctaaaatcggttgcttagcaactgacgaacattaaagcaaatcgcatattcttttttgaagtatagttaataaaaaaagcccatgtaaaatgggctttttgaaattattatttgactaaaaaattacttatccttttcaggctccgtcacttctttttcaggctcagcagactctgcgacatcctcagaaatcgattccgattcacttttggcatcaacaacagcttcatcagcatttggattttcttcagtcgattgagatgcatcaacattttcagctttagactctttaatattattatcagacttaacttccaatgcttcagatttttcagttgctggtgcaccagaatcatcaaatacccatgttaaatatgcaagttgagcagcatcacctttgcgtgcgcctgataatttaactattcgagtgtagccgccttgacggttttgaaggcgaggtacgatcttatcaaaaagcctacgaaccacatcatgttcatccgtccaattttttcgctgttcacttccggatacaccattagctctaggaaaaaacttacgttgcggagctcgtaatctagctactgctaatcgacgatgatgtaaggtgcctttcttacccaaggtaaccatcttctcagcaacaactcgagccgccttggctttagccaaagtagtcttaattgtgtcgttcttaataaggctgcaaaccaaattagctagcatagcatttcgatgctcgcctgtgcggcctaatttagcggttcttactctgtgtcgcattattcaaacaggttgttaaatattttttattactcggcatttaaaccgccagctggaggagcaatctcaataccagctggaggaccatcttcaaatgcatcagctggaggtggtgtcggcggcgagtccaataaagaaggatcaatcttttcacctaatgaaagattatactctttaagtttctccttaatctcagttaatgattttttgccaaagtttcggtacttgagcatttcggcttcagatttcattgctagatgcccaagcgtggtaatatttgcattattgaggcagttcgctgcacgaacactcaattcaatctcgtttacgctagtgttaagcaacttacgttgggcttcacgattttcatccttagctttagcgtcctgctcaaattcaaaagcctcatcgttaattccagtaaatacagaaagatggtgcgataagatttccgacgcttgctttaaagcctcgtcgggattgagacgcccatctgtccacatttccagaatcaatttatcgtaatcggttcgctgaccaacacgagcagcctcaattgcataacgaacacgagtaacaggagaaaatatagaatcgattggtatgactccaataggctggtctgcttttttattagcatcaccaggaagaaatccgcgccctacctgaacctccataaccatttccaccttttgacttttatcagtggtacagattacctgtttcttattaacaactttaagtccaggcggcaattcgagatctcccgcaacaataggaccatcagctgtcacatttagtcgaacttcttgtggctccctattattgtgcctgaatctgactttcttaaggttaagaacaatatcagttacatcttctacaactccctccacggtagcaaactcatgatcggcgccctcaattttcacagaggtaatagctgccccctccaaagaagaaagcaaaactcgacgaagcgagttcccgattgtgtggccgaagccagtttcaaacggctctgccgcgtatttagcatatttattgtcggaatcgtcggattttgtaagcttctccggcttttcgaaatgacccagtcttattggcataatattttatttttttagcaattttaatctggccttgccaccattattcccgttcacaacaagacccatataattgcttcctcaccctacaaggatgaagaggttaacgggaataaaattctactattgtttgttcatcggcgatgggttgtatctcatcgcgagtcggcatacgcataatagtcccacgaaatgcatccttctcaagctgcaaccattcagggacgattcgactagttgaatactctagatttctggtagccagctgccttgaggcactacgatccttcacctcaattacgtcgtttatagatgcattataagatgaaattgtcatcttaccaccatttacagaaacatgcccatgagacaccatctgtcgtgcttgcgcacgagtagcaccgaatcctaatcgatatacgacgttatctaaccggcactctagcagttgcaacataatctcaccggtcactccacggtgacgacgtgccttatcgtagatcgcacgaaactgtttctccattaatccataatgataacgaagcttttgcttctccatcaacgctagagcgtaatcagtatgtttacgtcgtgctcgtggaccatgggtgccaggagggtaattcttgcgctcgagatatttcgagggcccgaaaatcggtacgccgaagcgtcggctaatcttgtctcttggacctgtataacgtgccatgccttaaaaatccttattatactctccgccgcttctttgggcggcaaccgttgtgtggaataggtgtaacatctcgaatagaggtaatttcaagtcccactgcttgcaaagcgcgaatagctgactcacgcccagaacccggacccttaactctaacctcaatttcttttaatccgtgagccatagccctacgagctgcatcttgagcaaccttctgcgcagcgtaggatgtgctctttctggacccacgaaatccggttttaccagctgtagaccaagcaattatgttgccctgcttatctgtcaaagaaacatgcgtgttattaaaagtagccaaaatagtagcaataccagagtgaacattcttggacttcttagctttaacaatcttctgcggagcaggatcatcactagttaacaactcttgggctgatggcgcagctacattagcagcatcctcatcttcatcggcgccagcctcatcggctttattacttttcttatcaggaacagccttagttttagcacccttcttgttatcctcagctacttcttggtcagtatctgaattgactgagctatcctcagcagaaacctcgctagacggttgaggagtattcccctcctcagtcttgctttcctcagattgttgcgcttgtttttcttc

SEQ ID NO: 3328 - DNA, 5379 bp, synthetic construct
  source 1..5379: mol_type = other DNA
  misc_feature 1..5379: note = Synthetic
ggacaacattatctgcaccttcgccagcacaggctgcgcctctaccgtagaacgcaaattacgcgaattttccaataaaagatgggaaaaactgcgtttcacccctctcgcaaacacctccggcagcgacttcctccaactcctcaacatcggcggcaccgccacctcggtctacctcaaggccatccaagcaatcgccctcgagaccggcctcatcacccaccccatccttcccaaaaaactatggccaaaacacacccccaaaccccgtcgcgccatcaccgaggaagaacatcgcaggttgggttctaacactcgcagattctactggcgtgtcttctacgaaatcctttgggaaaccggcgctgctcagtctgatgccgccaaccttcgcatcgaaaataccaacctcgatgacggcatcatcgcctatcaacgcctcaaaaccggcgtccgagcagctcagaaaatctctcccaaactcattaaactgctaaaaagcttaaaaaaaggaaggaaaagcgggtttttcacccctttcatccaaaatatggacagtaaagaccgcgccacaatctttaggcgcaaatgcatccttctggatattaggggcgtgacacttcacagctaccgctacgcttgggccgagagagcgtttgaattgggtcttccagaacgactcgcaatggtggcactgggacataactcagccgcaattcaccgcgcctactccaaaaacgccaaaatcgtctgcccctcactcagcgaaatcgccgccaacaagcttgccagcgctaattagggcattagggcaaaaaaaatgccgcccctcgggacggcggtagaataccacgagggtaatcctacgcacttaaagtgcttgttgtgaaaagcgcttcaagtagtggcttgatacaccgcaggcaacttgtccataattttcccccacgtcaattcgttactatgaaaaaaattctaggcttggatctcggtaccacctccgttggttgggctctaattgaaaaagacaaaaccggcggttcttttctgggtggcggcgtccgcatcttcaccagcgtaaccgaggacaaaaccaacaacctcaaaaaccaaaagcgacgtgaaaaacgaggccaaaggataaacatccagagacgcagcaagcgcaagacagctcttaagaaagcgcttgtggaggtttcgctgctaccaaatgaagtcctcaatgcatccaaagcacccgaggcgctaaacgcaatcagcacaaatccatacgaactaagagctagggctttggacgatgctcttagtgatcacgaactcggacgcgccatcctaagcctcggaatgcggcggggatttttaagcaaccgcaagagcggagacagcgacagctccgtggttttgcctgcaattaattcgctgcaatcagagatcagcgagagcgactgcagaaccctcggcgaatacctcgctaaacaacccacccaaagaggacgctacacccaccgctcaatgtttgctctggaactcgatgccatctggaaaaaacagtccgagataaacaaaaaactgacaccggctttgagagaaaaaatcgagcactacatcctctaccaaaacccacttaagattcagaagtatctggttggagagtgtgcgctcgaacccaacaaacgacgcgccgccaagtggcagccaatggctcagctttttcggaactggcaagacgtcagcagaatcaaaaccagtcacgacagccaacccctcgagtgggaacagcaaaaaaaactggtcgacgaattacaaaaaaagaaaaccctcaagtggaacagcgttcgcaagttactggaacttgatccggacacaaaatttaacctcgaggaaagcggctcccttaaggagctaaagggcaacgacaccgttatcaacctaaacaaagccctgggcaaaaaggccaaggagctcagcgaggcagagaaggaaaaaatccttaactggctggacacctcagacaacgacgagaagctgaaagaaaagattaatcgaggatttgattttgatgaaaagacgattgattcactttgcaaatgttcattggcaaaaggctattaccacttaagcgtcaaagcctgcggcaagctggttgatatttttgaaacgaataaggagccgcttagctatcgtgaagccggagagaaagcgggctacataatggatgaatccggcgctgccggaaaaggaatggatcgactcccccaccctccggagattcgaaatccagtggttgaaaaagcgctggtcgaactgcggaaagtggtcaacggcgtcatcagaaaatatggcaagcccgataacattcacctcgagattgcccgcgacttgaaacaaccgaaaaaagttcgggaagagattcagcggaaaaataaaaagcaggagaaaattcgcgaggaggccaagggaattctgattagcgattttagggcttttaagacaagcgaacccgatcgagatgccattgagaaatatcttctttggaaagaatgctttgaggacggaaacgggcaatgcccctacaccggccaagtaatttccggcgatatgctcttcacaaacgatatccaagtggagcatatcatcccctacagccgcagcttcgataactctttcaacaacaagactctttgcgtctcgacagaaaacgcccgcaaaggaaacagcacaccttacgagctctacaacggtacagatcaatacgatgaagtattggccagagtcgccaagttcccctaccccaaacgtcagcgctttaagttgaaggaggctccagaaaacccagatgcacagcgtactctaaatgacacacgctacatctccaaagaggcaaaacggttcctccaaaagctgggaacaatggtgcaagtttccaccggacaaatgaccgctggcattcgcagaaagtggaatctgaatgggctactcagcaaaggcggcgacaacactaaaaaccgcgaagaccatcgacatcattttgttgatgcggcggttgtcgcaaacatcaatgtgggaatgatccagatgatctccaaatactctggcgacgaaaggctacaacgagccatacccagaggaatcttctcgctcaaaacattgttcaaggaaccttgggatagcttctcaaaggatcttgagactcacctaaatgagattgttgtttctcactcacctaccagaaagatttccggtgggcttcacgaggatacagcactcggaatcgtacagacaaaagaaggcaccgcgtttgcaaatagagttgagttaaacaaaactttcaccactaagaaggtaaagaatattgctgatgataagattcgcgaacttgtctctgctcgattggagagatttgaagacgaccctgagaaagctttcgccgatttagaaaatgatccgatttatcacgtcgacggaaccactcccataaagcgcgtaaggttgcacaccaacgaatcgatgtcttcacttacgggtataaagcagaacggttccgtctatgcttactatcggaaagggaataattatcaagtagctatttatgaaatgccagacggcaagtggaagggccactacatcactgcatttgatgctaagtctaaaaacacaaagccaaccaagggcttcgtatctggcaaattaataatggaactttgcaagaatgatatggtcgaaatggactggaaagacggaagggaaatattccgacttcaaaagatgtcaggagttaagaatgaattgattttcagacttcacacaagtgggcaaaaatcaaatgccgaaagagataccttaaagaatttaacttctaattcactcaaatcaaccaatccaaaaaggattgaagtgtctccaattggtgaagtgatttatgtcagtaaacagaattgttgaagtttcaaatcccgcccatttaaagacttcaaacaaacaacttctcgtagaaaaagaggatcagatcgtcggaagtattccttttgaggatctgcacgccatcattctctgcaaccctcaaataacggtctccatagcagttctgcagcttagtctggaacacaatgtccccgtaattgtctgcagcgaaaaacatcttccaaccggctttcttcacgccccactaacaaattcacttcattcaaaattgatccgctttcaagctgggattaaagctccgcttaggaagcaattgtggaaaagaattgtagctacaaaagttcaacatcaagtgatcgcacttaaaaagtgtgagaagaatgctgaacaagttgaaggtcttcaaatccaagttcgcagtggtgatccggacaacattgaagcacaagcggcaagcatttactggcgtgaattatttgggtctgacttccgaagaaaccccgatctcgaaggaattaattcactactaaattacggctatgccgtcttgagagcttccacagcaagagccttggctggatctggcctgaacaccaccttgggtatatttcaccacaatcaatacaaccacttttgcctcgctgatgacctaatggaaatggccagaccgatcgttgatttaaaagtttttgaaataattaagaaacaacaaccgaaaattacttctcgaacaaagaaaaaattactcgagataatcaatactgaggtaattattgctggagcaaaatattatttaccacacgcacttcagagatgctctaaatcactagcggactgtttgattgatggggacgtcgacacttttaaaacaatccaaatgtcataaaatgagaggaggctttagaagtatgtgggtcattgtgttgtttgatttaccaactaaaacaaagcagcaaaagaaagagtacggtggcttcagaaaaaaccttttggaatctggtttctttcaaatgcaatactcagtttacgccagatatgtgcccagttcagaaaaagctgattctgttcacaaaacagtcgtaagagcactgcccccaagcggcgaggtgagaatattaaggatgaccgacaatcaatattctcgtatggaagttttcagaaaaaaacactcttccaaaaccgaaagcccccccgatcaactcagttttttctgaagcatattaccgcatctcactatcctagaagcagttgtgaatgtggtagtgtatcaagccaccactcgcacgcaattcacaactggtccggtaggattacattttcccaggggagtgtatcaagccaccactcgcacgcaattcacaaccgatcgcgcgcgctttgtttttgccgaagcagtgtatcaagccaccactcgcacgcaattcacaacttaacccaatttcttcaccgccctgc

SEQ ID NO: 3329 - DNA, 23357 bp, synthetic construct
  misc_feature 1..23357: note = Synthetic
  source 1..23357: mol_type = other DNA
ccaaaagacgacactccaggttgcaccattgaagctcaggacttcagcaaaaaaattaaagaattcgaaaagcttgattgtgtggtcttaggaatttctaaagacagcgtaaaaagccattgcaactttatcgaaaaatacaatttatccttcaatttactttccgacaatgatggcgaagtctgcgctaaatatgatgtcatcaaagaaaaatcgatgtttggtaaaaaatattttggtatcgatcgcagcacatttctaatcgataaaatgggcaaaataatcaagatctggaattcagtaaaagttaacggtcatgttgaagacgtattgcaaaccttagctaaagccgaaaaatagctcatttggtatcaggtgcaaggcaacaacaaaaagcttgatttttgtcgcttggtttctagattgccgcgctcttttgggctggttcgcaagttttttaattattgtcgacactagggctgcaagtcttagaacccgtcttaaatactcccttctaaataaatttctgtaggaaataataaatgtctaacatcgtattgaaagctgaaaaaagagaaaaacttggctcttcagaagcaaaaaaaatcaaaagaactggcaagattccagccgttatttattcagccaaaggcaatattaacttgatcattgactctaaagaattcgagcatgagtactacaaaggcaacgctcaaacctcagttgttgaaatagaaattgccggtaaaaaaaccaaagttattgcccacaaaattgaattagatccagtttctgaccatccaattcatgttgatttcttgaattgcgaagaagctaaagcaattagagcgcaaccaaaaataaactttatcaaccaagataaatctccgggtttgaaaaaaggtggttttttaaatattgttttgagaaaagtttctgttgtttgtgaaaatatcaaaagcattccagaaaaaatcgatgttgatgttggtgcaatgcaagttggccaaaaaatcagaggcaatgatttacatcttccagctggcgtaaaattagctgcgaacggaaaatttttaattgcctcaattgttggtagagtttctaaagctgaagaaactccagcagcaggtgcagcggcaactccagtagcaggtgcagcagcggcaactccagcggcagcaacaaaagcaccagcagcaaaggctccggcagcaaaagacaaaaaataaattcgatataaggtccccgagcaaagcgcataagcgctttgctttgaaatgtttactacagagatttcttagctggcaatttagcaaaaattggatcagtaattcttggtgaaagcaaagctgccaaccacacaacgaaatagagagaaaaaggaaaggcaatccgcgatttatttttttctaaaccacgcttaatcagagccgcacatttttcgaccgacattataaagggcatcgtaaattcattcacatcagtcatcggtgttttgacatatccggggcaaatcgtgtttaccgaaattccaagaggtgctaaatttccgcgcaaagcttctccataaactctaaccgctgatttgcttgctgaataggcaggagaacttggaagtccgcgaaaaccagcaagcgaagaaatcagagcaatttgtcctttttttcttagtaccattttctcaattgctggatgaaccaaatttaaaactccggtaagattagttgaaaagattttcttaacttgcagaaaagattctttaccgccagcagttccagcagaaattccagcattggcaatcaccaaatctagctgataattttcttcaattttatcgatccaatttttcatcgctgtttcgtcggtgacatcaagaatttgcaaaagaacatttgcttttaattcctcacaaagaatttttgttgtctgtaatttttctgaattacgaccgcacaaaaataaatttatgccctgcttcgagtaagcaattgccaaggctcgaccaatgccacttccagcaccgcttatcaaaatatttttaggatttttcatagatgaaaccgctttttattagttttgaaggaattgaaggcagcggaaaatcaacgcaaacaaaaaaattgcacgagttttttttgtcacaaaaaattgactcgattctaactcgcgaacccggaggaacaccaacttctgaaaaaattcgtgaaattctaattgatgaaaaacttgctaaattagaagcaaaaactgaattatttttaaatttcgccgctcgcctcgagcatgttgaaaagctaatcaagcccgctttaaagcaaaataaaattgtaatttcagatcgcttttttgattcaacttatgcttatcaaggcagtggttttgggcttgatgaaaatttaattgatgaagtaaaaaaaattactctgcagaattttgcgcccagtatcactttcttgattgatgtgtcggtagaaacagcattttcgcgtattcaaaaccgtttggataataatcgttacgaaaagttaggacgagattttcaccaaaaagtccgcgatggatttttgcaactagccaagaaaaatccacgaattagagtgattgaaggcacaaaaactgcatcagaaattttcacagaaattactaaaatcttaacctcaatttaacaatttatggcaaaaagaaataaaatcgcgctagttggcgcaggcaatattggtggtactttagcacatcttgctggtttaaaaaatttaggcgatgttgtgattttagatgttgctgaaggcgttgccaaaggcaaagctctagacttagagcaatcttcagtagttgaagattttgatgctaaaatcactggcaccagcaactacgctgatattgctggcgctgacgtagttatcgtcacagctggcattgccagaaaacctggaatgagccgcgatgacttgatgaataccaacactacaatcatcaaatctgttgccttaggcattaaagaacacgcgcccaacgcttttgttatcgtcatcaccaatcctttagacgcgatggtttacgttatgcaaaaagtttctggcttgcctgcaaataaagttgttggaatggctggtgtacttgactcttcaagaatgtcactttttttagcaaaagagttaaatgtctcggttgaagatataaattcctgcgttttgggcggacatggcgacactatggttccgctgattcgctattcttcagttgctggcattccaattcctgacttgatcgaaatgggcttgataagcaaagttaaagttgaagaaatcgtccaacgcactcgcgatggcggcgctgaaattgttaaacttttaggcactggctcagctttttacgcaccagcttcatcagcaattgcaatggctgaaagctatttatttgacaaaagaaaagtcttgcccgtggcagcaaatttaactggtcaatatggggtaaaagatatgtatatcggagttcccgccatcattggcaaaaacggtgtcgaaaaaattatcgagatcaaattaaacactcaggaattgaccatgtttaatcactcggttgaagcggtgaaaaagttgattgcagaagttaaactataaatcgcagcctctatcgccccttcctttcaggataaaaggggcgattattaaattttaaaatgactgacatcgaaaacagaaaatccagaattatcctcgtctatttctgcattttagtagcttttgctgttattattttacggatgttttttgtcgttgcttttggtgatcgaatcaaagttagcaaaacttacgacgcccaaaaactaaccagaagatctaatattattgatcgaaaccacactcttgttgcaaccgatttaaaaactaaatcactttatctaagcagtattttaatcaaaaatccgcaaacagttgcagcagctgtttctggaatcttctcggatatttcttaccaagaaattttaaaaaaaattgttgatggcaaaagcagtaaaaaccggattttgcttaaaagaaatctgactccatcgcaagtcaatcaagtgcaaaatctaaaaattgccggcttgattttcgaaaatgatcgcattcgtgtttatccacaaaaatcaatcaccagccatttagttggttatgttgatcttgatcgaaaaggcctttctggcattgaaatgcagtacgacaaacaaattgctcgcggctctgaagatatagagttggctttagatattcgcgtacaagatattttgcatgacgaacttctaaacggcatcgaacaatataaagccaaagctgctgctggagttattatggatgtcactaatggcgaagttttagcagtttcatctttgcctgattttgatccaaatttacaacacgaagctactgcggatcaacgctttaaccgtgtgattaacggagtttacgaacttggttcaatctttaaaatttttaccaacaccatcgcctttgaagaaaatttagcaaaaatgtcagatgtttataatgtcagagagccgataaaatatggcagattcaccatcaatgatgatcacgcttataaagatgaaatgacagttgctgaaattttttcctactcttccaacattggaactatccaacttgccaaaaaaattggcatcgatttagaaaaagattatttagaaaaattcggcctcttgaaaaaaatcgacactgaatttccgggacttggtcgaccaatttcaccaaaaatttggcgcgagataaatctttacacgatttcctacggccatggcattgctatcacgcccctgcatattgcagctacagtttcggcaattgttaatggcggcattctctacaaaccgtcatttttaaaattaaaagatcagccaaaaggtagaagaatcatcaaagaatcaacttctgatacaatgcgtcagatgatgcgcaaagttgttttagaaggcactggacgcaatgctaatgttgaaggatatgaagttgctggcaaaaccggaactgccaatcgcgccgaatctggcggctacaatgaaaagtcaaccatggcttcatttgttgcagtctttccaatttctaaaccaaaatatctggtttatgtaatttttgatcgacctaattatatttttaatacgggcggaatggttgctgctcctgtggctggaagaattgtcaaaaatattgcgccaattttagatgtgattccgcaagcaactagtgctgcagctagtcggtaattattttcccttatgtcccgaagccttacttttaagcggtcggcagtagagctcaagcttatgaccaaccaactcgtaacctttttccaaagcaattttggtttttaatttttctagctcttcgctgaaaaattcaaaaacttcgtcggtagtgatatcaaccaaatgatcgtgatgatcttcgccttccagcttttcgtagcgtgcgcgacctttaccaccaaaatcatgtttggcaatcacgccaaattcttcaaacatttttacagcacgataaaccgtagcgatgccaatttttggattaatttttgaggcacgatgaaaaacttcttcaacatcggggtgatcaatactctcggaaataacacgagcaatgatgcgacgattttcagttagtttaatatttttttcctcacaaagtttttcaatttgagaagtcataatttatttggcatgttggtttcttcaaagagttaaagagcggctcatatggcgaaaaaatattaccagagttgagagaactttggcatattgattttgattttttaagcaccgacaataatttgctagatctttctcacttcaaaattgaaaacgacatgacaaaaaatcgcaaaatcatcgaaactgcaaccccttctctgacctttgatgatgtgcttttaaagcccgctttctctgatgttttgccaaatgacgctaacactaaaaccaaaatcactaaaaatatttcgctcaatattccgatcatttcttcagcgatggatacagttactgaaagccgtttagccattgcaatggcgcagtctggcggcattggttgtattcacaaaaatctttcaatcaaagatcaatcagacgaagttagaagagtaaaaaagtttgaatctggcatggttgtcaacccagttacaatcactccagacgagactctgcacgatgctttattgctgatgaaaaattacggaatttctggaattcctgtcgtaaaatctggcaccaaaaaattaattggcattttgaccaaccgcgatgtgcgcttcgccaccgacaaaaaacaaccaatcaaagaattaatgaccaaagaaaatctggtcaccgctaaaagcaatattggcaaaaacgaagccaaaactttgcttcacaaaaacagaattgagcgcattttaatcaccgattccagcggcaattgtattggcttgatgactggtaaagatttagaaaaaaccaaacaatttccgcacgcttcaaaagatgacgaaggtcgtttattggttgcagctgcaactggcgttggtcgcgaaggtattaaacgcgccgaaagtttgattgaagctggggttgatattgtagtagttgacactgctcacggccattccaaaggagtgattgaaaccattcgcgaactaaaaaaatcttacccaaaacaagattttattgctggcaacattgccaccaaagaagccgctaaagccttaattgacgctggtgcagatgctgtaaaagttggcattggaccgggatcaatctgcacaactcgcgtagttgcaggagttggcgtgccacaattgtcagccgttttagatgttgttgaatattgcgacaaagcaaaaattccgctgatttctgacggtggaattagattttctggtgacttagccaaagccatcgcagcaggcgcatcttgcgttatgcttggcggattgcttgctggagctgaagaaactcccggtgaaattattttatttagaggtcgctcttacaaagtttaccgtggcatgggatcccttggcgcaatggctcgcggctcagcagatcgttatttccaagaagatgtctctgacaaattaaaacttgttcctgaaggtgttgaaggtcgcgtggcctacaaaggcccagtttccgaagttttacaccaacttgttggcggattaaaatcagcaatgggttacacaggcaacgccacaattgaggaaatgagaaaaaactgtaccttcgttcgcatcactaattccggccttcgcgagtctcacccacattcaataaccattacttctgaatcaccaaactacacaacagaaaactagactcatcttaccgatcggtaagttttgcttgacaatatgggcaaaaacagtgatttcttactgaacggtaagtttttgccaaaaaacattgttttttaagtaaatcttaccgttcagtaagaaatcactaatcaaaaaacatgactgaaatcctttcctgcaaagacttaggcaaactaattcaagattctagaaaatcacaaaactttacccaaaaacaattggctgccatttgtggagttggtgaaagatttattgtcgatttagaaaagggtaaaccaacctgctccatcaacaaagccttgaaaatagcgcaatctctgggtatcaaaataatcgctaaataaaatgaccagcaaaaaacttgatgtttatttaaacaaaatctttgttggaatttttaagcaaaattcttcaggcggcggaaaactttcttttacttacgacgaaaaatatttagaatcttctcaggtactaaaactttctgcctctttgccactaaggccagaaacattcgacgacacaacaactcgtgcttttttttctggactcttacctgacgaaaagcagttagaattaattgccaaaaacctaaaatcatctgccagaaatccatttgctttactttctgaaattggtcgcgattgcgctggcagcattgaaattctaccgccaggagaaaaacttccctcctacgatcaaggctctcaagaaaaattaactgaaaataaactttacaagattttaagcgaaattcgtactaatcctttgctagccgcaaacaaaaaaatccgcctttcccttgctggggcacaaagcaaactagcggttttttttgacgagaagaaaaattctttgccagaattagtaaaaaataaaccaagcactcacatcttaaagccaataattccagacctccccgacagtgttcacaatgaattcttttgcatgaaattggctaaggaaatcaaacttgaagttgcagaggtttttttaaaacaagttaaagatcgcccttatttgttgatcagaagatacgatcgtactaagtccaagggtcaaattattcgcattcatcaagaagatttttgccaagctcttggattatttccttggcaaaaatatcagggcatcgatggcggccctagcaccgaaatctgttttaaattaatcgaaaaatattctacccttccaggactagacagctcgcgctttattcggacaataatttttaattatttaatcggaaattctgatgcacatggcaaaaatttttcatttttgtaccaaggaaaaactgtgcgtcttgctccactttacgatttgatctcgaccaactcttactcaaaactcgaacatcgcatggcaatgaaattaggccgttgccacgaccctgatcgaacctcactaaatcattggtacagcttggttagcaacaccaacacagccaaatcttatttaaatcaagagctaaaaaactttgccaccttgctgccaaaaacagcggaaagtctgcacaaaaaattacaaaaaaaaggcattgagtcagaagcttttgacaaagttcgccgcgttattgaaaaaagatcaaagcgaattttgggatattttaaaactccgtaaatcaccacgctgatgtcaaaacacctaagcaccattttgttaatatttttctgtacttctgcagttgcggctgcaccacaaattcagctggccaatctctattctgaagaaatcaatcttgacgaatttttagtcagcgaaaagttggacggtgtgcgtggatattttgacggcgaaaaatttatttcacgccaaggcaatattatcaaggctccaaagtggtttacaaaaaatttccccaaacaagttttagacggtgaattgtggattggtcgcggaaaattcgaattagttgcaaaaattattcgccaagaaaccccagatgaaaaagcttggcaagacgtgcgcttcatgatttttgatttaccaaaaagttcagaaatttttagtaaacgctacgaaatcatgcaaagcttggttgcagaggccgactcaaaatatctgcaagttattaatcagtttgaaatcaaagatcacgaagcacttgcaagccttttaaaatctactgtaaaaaacggtggcgaaggcttgatgctacaccgcaaaaactcactttacaaagctgaaagaaatgacgatttattaaaattaaaaaccttcgaagacgctgaaggaaaggtaattgcccacattgctggcaaaggaaaatttgccggaaaaatgggtgcacttttaatcgaaattgaaaattcagatcagcaaaaaatccgcttcaaaatcggcagcggtttttccgtagaacaaagaaaaaacccacccgcaatcggcagccaaatcacttacaaatttttcggcaaaaccaaaaatggcaccccaagattcgccagttttttacgcgagagaaacgaataattcacgcgcaataaaaaagcggggcgtaccccgctttcaaattttgtgcgttctttttgaaaagaacacttgttaccagcttgactgcaaattcccgtaagagccaaattgataaagatgaatatttttagaattttttaatgagcaacttttttttcaactaaactgaaaatttatgcaaaacaactctcaaataagctacagattaggattagatttaggaaccaattcaattggctgggcaatgttagctttgaatcaaaataacgagccttgcaaaattttagatgcgggagtgagaattttttctgatggcagaaatccaaaagatggaacgcccttagcagttgcaagaagagaggctagaggaatgcgccgccggcgcgatcgctttttgaccagaaaatcacaattgatgaattgcttaatcaagcttggattaatgccaaaagatgaaattgagcgcaaaaaattagaattattaaatccttatcagatcagagccaaagctcttgacgaggcattaaatccttttgaacttggacgcgctatttttcatttaaatcaaagacgcggctttaaaagcaatcgcaaagaacgggtgactgattataaaaagctcagcgaaaccaaacgaaatcaagaaaatttagctaataaaattagcgaaacaaactcacgaactttaggtgaatttttttatagagagcgaattttaaaagaactcacagcacgcgccaagccagatgaatctggtctttatccaactcgcgtaatgtatgaaaacgagtttaatgaaattaaaaaagtacaatttcaaaaccaaaaattaagcgaagaaaactggcaaaaaattaaagaaataatttttcatcaaagacccttagcaccacaagaaaagggggtttgtcaatttataaataaatttaagtcactgccaaattgggctgctgaaatttttgaaaattaccagaaactttctgaaagaaataaaaactcaaaaggtcttccaagggcttatctggctttgccaagttatcaaaaatttcgtattctctcagaaataaataacctaaaaatcattagaaataatcgtgaagaaattttgcttgatgcagcacaaaaaagaaaattgattgaatatttacatgaaaataaatctgcgaaattttcatcactaagaaaacaaattggctacggtgcagaagaatttcagtttaattttgaaggtggaaaaagagataaacttcaaggaaatgaaactgaaatatttttaaaagataagaaattcggcgaaaagtggcataatttttcacttcaaaagcaagatgaaattgttgaatttctgcttgatacagaaaatgaagaagcaattcatcaaaaagctttgcaggagtggaattgcaatgaagaacaagccttggaaataaaaaaaattactccaaataatttcaaaagcggcgtcggtaatttatcaaaagaatttttgcaaaaaatagttgctgaaattgcagaaaaaaattgtcgttacgacgaagcaactgaaaatcttggctttcatcacagtaaaaaagaatttggcgaaattcaaagtcagcttgattactacggaaaagcaattcccgcttcaacagttccggtaaaatcaggatcagaagaagaagttttttatggcagaatcgccaacccaacagttcatgtagctccgaatcaggttcgaaaagttgtaaattccataattaaggaaaatggcagtccaagtgaaattcatattgaactagctcgcgatttgaaaattagccaaaaagaaaaggacgagatcgaaagtcagcaaaagaaaaatgaaaaagaaaacgaatatttaagaaaagaattagaaaacctaaaccaaagaaacacttacggaaatcgcctaaaattaaaactttggaaagaattaaatcctaatgattgtaatgaccgcaaatgcccattttgtggtactcaaatcggagtaaataaaatttccagtcatgaaattgagattgaacatatcttgccattttcaaaaacttacgatgattcaattgctaacaaaactttagctcacagaaactgtaaccagaagaaaggcaatctttcaccattcgaagcttttggcgattctacctttgaaagaattcaaaacttaccaaaaaataaaaaatggcgtttttatgaaaatgccatggaaaaatttagcgatgaaagcggctttcaagaaagacagctcaacgatacacgctatttgtcaaaaatcgcccaccaatatttagcgcaaatttgcgatccaaataaaattaaagttgctaacggaaaattaacttcgctgctacgccatcattggggattaaattcaatcttaaataaagaaactgaaaggccgttggaccagcaaaacccagaaatcgaaaatctgcgtgaagcaacttttgattcagaaactgacgaagtttttgagtcaaaatcacaagaaaaaaataaaaaacaaaagccaaaaaaccgcgacgaccaccgccatcacgcagttgatgccattgttatcgccatgaccgaaaccaaactgctgcaacaaatttcacgcgataatgccataggccacgatcttgatcgcctgattattaatgttccaaatcactggaataggtttcgtgaagatgtagttgaggcgattgaaaagattgtagtttcgcataaagttgatcagagcgctaactcagaacttcacagtcagacttcctatggagtattaaaaaagaaaattgccgacgaggattcaaaaaaacaaagcttcaatgttgttttctcaaaaagcggaggaattacatctttaaataaaaatgaaattgaaagaatccgagataaaaaaatcagaaacaacctcatggaattaacaaaagatatttcgaagagtaaaagtgatgaaaagaggctgctatcaattcttcagcaattttccagagaatcgggggtcaaaaatattcggatcttagataaaatacaaacagcagtaaaaatcgaacacggaaaaaacaatcaattctccaaagcaatcagcccagataataaaagtcacataagcttatggcagatgcccaatgggggaatcatcactgatgttgtttctagcctcagaatgacaagtatttatgaaataatcgaaagagatggtatgtgcctaataaataagagcaaaaaatttccacaagatcaagtttatgagaaactaaaacctcatccagcagcaaagctaataattaggctgttcaaagacgatatggtcagacttgagaaaaatggagaaacattaacagccaaaattacctccgttccagacagcactcaatgctcttatgcattacacacttctttctcttcaaataaagaagcaaagggaacattttatctaaataaaaatactttagtcgataaaaaactcagaaaaatatttgtttctccttctggcaaagtcttcgactctggtccaatcctaaaaacaaccaaagaaaattaatgaccaatcgcatcattgaaatttctgatcccttagtttcgctttcaatgtcgcgcggttttttattggtaaaagttgaaaacagcgaaaaagcccgcatcgcttttgaagatattggcattttaattttaaacggaactggcgccacaatcaccactaacttgcttaattctttgcttgaagcaggtgtgatgattgtggttctgggcgcaaattatttgccatcaggaattttttatcccaccaatccgcattatttgcacaaacagaaaatcaatttacagattcaatcttctaaacctttggagaaaagactttggcaacaagttgtgaaggcaaaaattttaaaccaggcggcaattctttctcacttcagcggtgaagatgaaaaacaacttttggaattagccaaaaaagtaagctcaggagacaaagaaaatctcgaagcacaagcagcaagaaaatattggcaacgactttttggcgaaaattttagaagaaattttgaaagcagcggaattaattcaatgctgaattacggctatgcagttttgcggtcagcaactgcgcgcgcaattttttctgccggtttacatcctgcaattggtatacatcattcaaatcaagaaaatgctttttgtctggttgatgacttaatagagcctttcagaccaatggttgattttgtagttaaaaaaatttctgaagaaaataaagggatcgaagaattgacgcccgaaataaaaaaatctttaaccaaaattttaagtttagatttgtcaacatcagcaggtacaacaccaattagcaattgcctgataaagctttgtcaatcttttgtgcgtagtctcgaagaaggagaggcaaatttagactttccactttcaccactaccaaccgagctaataatttcttaaaaattattatttaatgtctcaactttcagcttacagaattttgtggattcaagttttatttgacctgccaaccaacacaaaaaaagagcgcaaagcggcatcagaatttagaaattctttgcttgatttaggcttccagatggcgcaattttcagtttatcaaaggttttgtgccagcaaggaagtaacagaaagatacattaaaaaaattgagaaaattattcccgaaagtggcaagattcacattcttgttttcaccgataaacaatatgaaaacatcatcaccttcaacggcaaaaaagaaaaatctaatccaaaaaatcctgaacaatacgagcttttttgaagaaaatttgagcatttttttcaaaacaaaaagccgtatagtctttactagcgtaaggactatacggctaccaaactagagggcgggaatttgcggtcaagctggaacacttaatgaaataacgagaaaataatgtgtaaactagagggcgggaatttgcggtcaagctggaactttttgaaaagagcatcttctaaaaataaactagagggcgggaatttgcggtcaagctggaacataacagggcttccaattgcgggataagaaaaactagagggcgggaatttgcggtcaagctggaacatgtattgtttgcgataaagtctttatcacaaactagagggcgggaatttgcggtcaagctggaaccttgaagaaatcaatttgttacgcgcccaaaaactagagggcgggaatttgcggtcaagctggaactggtaggatatgaagaattggatatgtttaaaactagagggcgggaatttgcggtcaagctggaacttccggaaagcatttttattcgcccacaaaaaactagagggcgggaatttgcggtcaagctggaacgattggtaaatcatcttacggttggttcataaactagagggcgggaatttgcggtcaagctggaactgcatgatggattattcgtctcacaccttcaaactagagggcgggaatttgcggtcaagctggaacaaaaaactagaagcaaaattaatcggtaaaaaactagagggcgggaatttgcggtcaagctggaacggtgcttcttggcggttttcattaagagcaaaactagagggcgggaatttgcggtcaagctggaaccgcatttgatttttcaagtgtaaaaggtttaaactagagggcgggaatttgcggtcaagctggaacccaatgttacaaaattttaaaaaatcattttgaaactagagggcgggaatttgcggtcaagctggaacatctacattgtagataacaaaaacgataaaaaactagagggcgggaatttgcggtcaagctggaacctgaacaagcgggacaacaaaaacaactttaaaccagagggcgggaatttgcggtcaagctggaactagattaacctaaataacctattaggttttaaactagagggcgggaatttgcggtcaagctggaaccagaaaaattttcatgccaatttaggtgaaaaactagagggcgggaatttgcggtcaagctggaacaggaggtggtttgggatcaggctgagagcggttgcaatcaagtttaagaaattggatcaaaatcaattttcaatcgaactgattttgggatttcaagagtttgtaaaacttccttgattagcttttgcagattaatttttttctcagcttttaaatttactaaaaaatggtgccggttttttaagcgttgaagtgctgctggcgctggtccgaatatttcaattctttcgctaatcggaaaagcttgaatcagtttcttggcaaaattttttgcgtcactttctgtaaaagagcttatttcaaatctaacaaaccttgagaaaggtggcatttcaagggtttggcgatttttgatttcgaaatcgtaaaaagattttttgtctgattttaaaatttgctcgaaaataaaattctctggattgtaagtttgtacaatcactttacccttagtctggcgtcgtccggcgcgaccaatcacttgcgttaaaatctggtaagttttctctaaagcgcgcagttcagaagagtaaagcatggcgtcagcatcaacaatgccaaccaagctcagatcaggaaagtcgtggcctttcacaatcatttgcgtgccaataataatgtcgatttcgcgatttaaaatttgtgcaaccaaatgatcaacgtcggcaaaacttgttacgctgtcgctggttactaagacaattctgcttttgggaaaaatgttttttacttcttcggctatccgatcaacaccagctccaactgaaatcaaagcgtcaacttcgccgcagaatttacattggtgcaaaagcttttcttggtgaccgcaataatgacaaatcaatttttgttttgccttgtgcagcaccaaattaaaatcacaatcagcacattgatatttttttccgcaagtcttgcaaagtgttactggtgcgtatccgcgacggtttaaaaaaagtaaagtttgtttttcttctgctaagttttttgcaatttcttgacgtaatttttctgacaaaaactgatctttgaaaagtttttcacgacgcaaatcaatcaattcaatgtcgtttttttgaccaaaactttgctctaaaataaaatggcgatacttgcccgaaacggcatttacgtaagtttcaagtgctggcgttgctgaagacaaaataactgaaaaattttctagcttggctttgacaatcgccatgtcgcgggcgtgaaaattaaaaacatcttcttgcttgaaagacgaatcgtgctcttcgtcaattacaattaattgcagatttttgaaaggaagcaacaggcttgaacgcgcgccaatcaagactttaactgatccttgtgctacgccgtaaaaaatttcacgcttgtcttttttcgaaatttttgagtgccacaaagctggcttgaatttaaattgatcttgaaagcgcagcagcaattggctggttaaagcgatttctggaagcaagattaaaatttgtgcgttggaatttttttctaaaatttcggcaatcagtgcaaaatagatttcggttttgccagagccagtaacgccgtccaaaaggcttacttcaagctttgattgactgagcgtgtcgcttagctgagtaaaaatttcttgctgtttgggtagtaattttttcaaagaaaaattttgcgcttcaactttttgctctaaaccttggggaatttttttgactttatcggagtttaaaattcctaaaaatgctcttagcaccaaaccatgactggcaagattgtaagaggcaattgtttcaataaattttagctgattttcgctgaattttaatcgcgaatttttttctaaaatcggttttattttttctaaggcaaaattggttggcgcctcttttttgacttgcacaaccaagccccaaatttgttttttaccaaactcaacttgcaccacatcaccgcgctcaattgagtcttcagcttggtaagtgaagcattcatcaagcgccaaaggcaacaagacttgggcaaaaaatttcgacatgattgttgataaagagatttgggagagttaatttctcacctcatatcacagccctgccttacaaaattcaaacgaaaaactttatgaaattttttatcgactctgccgaaattgctgaaatcaaagaaatcgctgcctacggattgcttaacggcgttactaccaatccaagcttgatcgcaaaatcaggtcgagatttcaaagaagtaattgccgaaatttgcaaaattattaccggtccggtgagcgcagaagttgcagcaactgactacgaaaacatggttcgcgaaggcgagattttaagcagaatcgccaaaaatgtctgcatcaaattgccgatgactttagacggacttaaagcttgtaaatatttttctgacaaaggaattcaaaccaatgtcacactttgtttttcagctgcacaagcgattttggcggctaaagcgggtgctacttttgtttcgccatttgtgggcagacttgacgatattggccaagatggcatggcgttgattgaagaaatctgcgacatttattctaactacccagaattcaaaaccgaagttttggtggcctcaattcgcaatccaattcacatcaccgccgctgccagaataggcgctgatgttgccacaattccagctaaagttttaaaacaattaatctctcacccacttacaacttctggccttgaaaccttcgtcaaagattgggcagcaactgggcaaaaaatttagttattgctttgacaatgtcaaaaaaatggaaaatttttggttatcaaaccaacactgagtggtacgatattaaaaccagaatcaaagctttgttgcgcaaaataacttactcttggctgtttcaagagctgctttgtttagtttttttatcttacatgcgtttggttttttacagcagtaaaaaaattttcattaacgaagattctttgctcaatgcttccaagaataagactccgctaataattattttttggcataatcgtcttttgctggcaccttttgctagcaaaaaatcaaaaaaactttatcctgattacagttttatgactctggcttcgcgccatggcgatggccgttttgtaggcagaattatggaaaaatttggcttaatttcaattcttggatcttcgcgtggtggccgtaaagcttcgcgtggaattgacattggaagtttcaaaagaattttcgaaggtctgaaaaaaagttactgtctgattgttacgccagacggcccacgcggtccgaatcaaaaaattaatggtgaaattttaaacatcgcgcgcatagcccaagttggaattttagcatcatcttgctcggcatcaaaattcaaaaccatcaacacttgggatcaatttaaaatcccgctacccttctcaaccatctgctattacttggacgaaaaaccattctacattcctaaagacaccagcagagaacagatcgaaaaaattaaaattgaaattgaagagcggatgaattttttgcaggaaaaatctttagaaatcgcgcagaaaaagcaaagctgatgtattagttaggcactacgatttttgttactcttcagtaatcgccatccaaattgaggttaccgcttgcgccgcaattccttctttccgacccaaaaatcccaacttctcggtggttgttgctttcacattaacgcggcttttagcaattcctaaaacttttgccaactctgcttgcatggtgcttttaagtttagaaatttttggctcttcgcaaattacagtgatgtcgatgtttaaaattgtagcgcctttttttaccagtaaatgctttacggttttcagcatttcgcgcgaatcgatatttttccattttgtttctgttggcggaaaatgttcaccaatatctccagcaccaatagcgcccaaaagcgcgtcgatcaaagcgtgaatgccgacatcgccatcagaatgcgccgcaatttttttgtcaaattctacatcaacgccgcaaagacgaatcaaattattttcatctttttcgcgctcacgaaatgcgtgaatatcaaaaccagtgccgcagcgattttcttctttgacacttttaatcagcattgaaattgtgcgtttggcgcgttcaaaatcttcctgcgtagtaattttaaaattattttgtgatccagggacaatagcgacgggaatgcccgcatattcgtttaaagctgaatcgtcggtgaaatgcaaatctttaaaagcgatgtgagaatttaaaatatcttcaaaaataaaaccttgcggagtttgtgcgcgccacagattttcacgctccagcgtccattcaatttttccgtcagaatatttttttagcgtgtcttcaactgcaactgccggaattactgctgggtgagtttctaatttttctaaaataccattgatgatacgcttagagacaaaagggcgtacaccatcgtgaatcaaaactttgtctggattatattcacgcaaagcttccaaacctatgcgaattgaagcttgacgagtttcgccgccaaaaactggattgagcaaatcaagtccagccaccgcttcttcgtagagcgccatgtcttctggatgaattacacaaattacatcgtcaatttttgcatgatttaaaaaagccaaaattgagtgacgcagaagcggaactccggcaagcgaaagatattgtttaggaattccatcaatactattgaaacgattcccgcgaccacaggcagttattagcgcaactattttagtcatttaattaactatgaatttttgaaattttttcgcgcttagcatcaattgcaggttaattaacgcaactatttctgaaattaatttttagctaagaaatctctaataacaaattttgtctaaacattttcttgtctaaacattttctaaaccgcgatacctagatctaagattcatgcctgattttggttctgtatttggattaggaatgcttgtttcttcatcatgcctatcaactgaagacagctctgcttgattttgttggcaacttttacctccaataaaatcacaacttttagtagtcaaaaacttggccacataaagaagtgccagcctagtctcatcatgcgtgccaacattctgataaatttcgaccaaatgtttattaaatttgcttttgattagctctatttcaacatgctgaaatttttgtgaatctgatttttgctctctttcgatttcatttaaaactggcaacaaaaacaatagctgagagactttaggatctgaaatttttccgccaaatcgagacccgtaatccatttgaaaccaatttttaacaaaatcatttctgttatttatgaaagattttgcctcatctttatttaccaataacttttcaaccaatgcttcataagctgataagtttttggaagaagaaaaatagtaatttgttaaaacaatcaattcatcggtcgaaacctgttttggagctttagagacaaattcttctgcggcggtgcgatatggtgagaaatctgattctattgcatcaataaatgctggagcacatgaggatatgctcaacattgtttgcgatggtaatatttctgattcactcaaaagttttttaagtactgccaaatcagactcagagtcagtattactgatctttggtaacactgagttgacttgcttatctggcttcgagccatttctaatgagattaatttttgtaataactgcgtcaaaagctctttttgccagatctaaaacattgctttgaccatatagcgcaatatcccaagcaaatatggaagttgccgcaagaactgatccaaatggggctactaagaaattcgaataagatgataagccattaacaatgacacttcttagcatgacgaaagagataaacgatagtaatgatgcctgaaatgctagtttaaatctttccgtaatattgtatctccttctcaaaggctgctgaggagctggggtataagggacatcagctggaaacaaaaactcgcttgatgaatttagcattatgagcttttggctttaaattaagaatctaatcaaacgaaaattttactttaaagcatgtgtttaaattctttgctcacgcgcccagcagacaaaataatcagctgttatttctgttatttgatcgataatttttgattcgcttttccatctcaggacggaaatttttaattaaaccttgaactggccaagcggcagcgtcacccaaggcgcagattgtgtgaccttcaatttgcttggttaaattgtaaagttgatcgatttcttttacttcggctttaccttcaatcatacgatccatgatgcgcatcaaccaacccgtgccttcacggcatggcgtgcattgtccgcaggattcgtgtttgtaaaaatgtgacaaacgggcaattgcagcaatcacatcagttgatttatccattacgatgacgcctgcagtaccgagacctgatccggcattttttagtgaatcaaaatccattaaaactgtgtcgcaaacttctttgttcaacattggaactgaagatccaccaggaattattgccaaaagattatcccaaccaccacgcactccaccagcatgtttttcaattaattcgcgcagcggaatgcccatttcttcttcaacattgcagggtttattaacgtggccggaaatacaaaaaacttttgttccggtatttctttctcttcccaaagcggcaaaccaagctggtccacggcgcaaaatttctggcacaacggcgattgattcaacattattaatcacggtcggacagccgtaaagccctacaagtgctggaaatggtggcttcaaacgcggttggcctttattgccttctaaactttcaagcaaagcagtttcttcgccgcatatgtaggcaccagctccgcgatgaatgtaaatgtctaaatcccaacctgaattgcaggcattttttccgattaattttgcagcataggcttcatcaattgctcgctgcaaggctactgcttcgttgtaatattcaccacgaatgtaaatgtaacaagtattggcgttaatagcgcgagaggcaattaaacagccctctaaaagcttgtgtggatcgttgcgcaaaatgtcgcgatctttgcaagttcccggttcggattcgtcagcgttaatcaccaagtaatgtggtttgccttcttttggatcagatttttttggcacgaaagaccatttcgtaccagtcggaaaaccagctccaccacgaccgcgcagcccagaatcttttacttgttgaatcaaccattcacaaccttgattgagaaattttttggtttctaaccaatcgcctcttttttttgcagcctctaaaccagctgactcgtagccataaagattggtaaaaatcttgtcttgttctttgagcatttttatttttttagataggttgaaaggggattcgaaacagctgggtaaaggct

SEQ ID NO: 3330 - DNA, 22488 bp, synthetic construct
  misc_feature 1..22488: note = Synthetic
  source 1..22488: mol_type = other DNA
aaaaacttacggtaaatgtgagcggagaaaacaagatcttccaaacagaccatctcaatttgttttggttcaaacgacattttttactaaattcttgttaaaaatcagactaattcacaaaaaacaaatcagccaacagcgttagagaacactagctctaaccactattaataacaagaaaataattcagaaaagcgagaggattttagaggggatttgggggttgggtttgcgacagtgccataatttcaagcacttcatcttgcgaaaattctctactttccattgccttaccaaacttttccaaatctcgaatgaattgctcgatggatgtttttaagaataaaaattcaactctgctgcttgccatagtttgtgatagattttgattgatggactgtttaaaatctctttctctagcatatctagggaataatagattaactatgatttaatagataaagccagtatgtcaatcgtcaaatcaaataaatctcaacctattcagccaaaccaatgcaaagccgccagagacttgcttggatggaaacaaagcgatttgagcgagaagtcttcaattggtgaatcaaccatcgcagattttgaaagaggagcaagggagccagcggttagaaccttgagggatattagaaaagcttttgaagatgcggggataaaatttattaatgatgaggcttggcttggggttaagctggcaactcaaaacaaatgactttttaccttgagttttaaacatgtttttagtgatatgtcgatttaagtgacatttttcgacatataaaccacatctgcttattgcataaacatatgattcatcgagccagtcctaacaacgctttgcaagacttgccaccgaaaagcgaccctaacaatccaaaattaactgacctcgagaatccagaattgctcaaggctagtattaaagccaatcgcttactcgcggagttgaaaggatattgccaaacacttcccaatccccagcttctaattaatacaattgttcttcaagaaagtaaggacagttctgaaattgaaaacattgtcacaacgcaagatgaattatacagggcggcagcttctattgatagcgcttcagctctatcttcaaataccagggaagtgttattgtatcgagaagctttgtatactggattggaattaatgcagagtcgtggcatgaccaccaatacaatgatatcaataatgcagaagttaaaaaatacatctgcatcaatcagaaaaatcactggtacaaaattagctaatccaattacaggggaagttatctataccccgccagaaggtgaaatactgattcgcgacaaactatccgcattagaaaagtttattaatgacgaccaagatgacatcgacccactaataaaaatggctttggcacattatcaatttgaagccattcacccttttgaagatggtaacggcagaactggcagaattttaaatgtattattcttggttcacaaaggcttgctcacgattccagtgttgtttttaagctcttttatcatcaagcacaaaaatgaatactaccgattacttcgcgaggtgacagaaaagcaaaattggcaggagtggatcctatacatactttctgctatttcagagacttcagccctgacattgaaaaaaatttacgaaattcaaaagctgaaagaagagcttattcctttgataaaggacacattgaaagattcttataacagagatttggtcgagttaattttcagccatccttatgttaaaattaaggctttggagcaaaatggaattgctaaaagacagacggcgtcagcgtatcttcaaaaacttgctaaaactaatattttgcgcccaattaaagttggtaaggagtattactatataaatcatcgtttgatgaaaatcatttctgagaatgaagatttaaagcaagcagaggtgacctgatatttttagatttgcgtggtatttttagaaattgtcgcgggacactggcgggacatttagccgcaaattttaacaaaaagccaaaatcaaacccaacaaataaaatcatcaaaagccttgattttattgttgtcatcttttttgatgcgttgtcttttgtttgaaaattctgacttgtaaacagtgggtcgggagttcgattctctcaatcggcaccactttccatctttttctagcttcacaaactagcttctatccaaagaagacaaatctacaatgattaaggcgatgacattcaacagaaaaattaataaatttctttcatcaattctgctgcaagtttttatttttttaacttggtttaccttagaaaataaaaatttatccagcccaaaagcagaaaccgttttaataagagcttcattatccagccagcccagattaataaaagacaatggtatctatttgctttacagtttttcctatagcgacaattttggcatgggaaaagatatcgaaaagatcaagtctggcaataatgagatgtatgtaatattgcgtccaaaaggtaagtactatatttcagaaaattttgtttacgataacctaggagaacttaaagatggtgaagttgcaattaaaggccttatgcagcctgacggcagaattgaatatggaattgaggaatattttattagtccgggaatgaagaagcccataaaaagagtcgataaaatcgaagctctaattgatgttgatcaaaatcataaagccaaaatcaataccctattgattaatgacaaaccattcaaagaagtaccaattcaaaattagattatgaaccgcataacttcgataatttttaccattttcctcaatttatggggcaccatcattccaattatttattttccggcatttatttttagaagcgcaaaaattgccgatcatggagcaaaaatttggacaattggtgtgatgtggatgttaaagaaattatgccaaattgattatgaatttatcggcctggaaaatttacctaaagaaccttgtatcatagcctgtaaacatcaatcagcctgggaaacaattatcatgcatttgatagttagtcgtccggcttatgcttttaaaaaagaattattaaaaatcccattttacggttggtatttaagagtgatgagcggaattattgttgatagaagcggtggtgccagcgcgcttaaagcacttatcaaacaaacaaaagattatttggcaaaaggacagagcatagttttatttcctcaaggaactcgagttcccgtcggagttgaatccgacaaatttccttatcaagccggaattgccgctttatatctttcaaccggcgtaaaagttgtgccagcggctttaaattcgggagttttttggggtaaaggaactccgaaaaaaccaggaagaattacgttggaatttttggaaccaataaatccagggctttcaaaacaggaatttatggcaaaattagaaagcgtgactgaaaaaagaagtgatgagttggtagaaaaagttaataaataattatttttttccctcaaaaacacctttatctttcaacgctttagccacttcaggcggcatatatttttcatcatgcttcaccaacatttccttggaaaaaaattgatttttctcttcatcaaatttccctttcgccactacgccctgtttttcgcgaaataaatcaggcaatattcctacatattcaactaccaaatcttcttgcatatcggtaactacaaattgtgtagttaaagcatcaattttcttcacactattttcttttaccaacccgccaatcctgatttggcgattgtgatttttttgtaaaacttcggttttcagcaattcactcggagaatagaaaaaaaccatattgtcgcgaaaattcgaaatcacgaaagctaaagccaaaatcgaaatcagaaaaattgaaccaacaaaaattatccgcttttttttacgctgatttttcattttttatttttgattttacgcgaaagaaattagtcacaacaaacaacatcaagacagataaacaaagacccgctattaaataagcagcattaacatattttgaataatcggtaaggttttccataaatttttgaaattaatttttaagcaagcttgcaaaataaaagaccattcttaccttgcacgccttcgttttgagtagaaataaaattatgcctgaatagctcagttggtagagcaaaggactgaaaatccttgtgtcgctggttcgattccggcttcaggcaccaggcttcgctcttgcgagctacgcccggcaggccaggttttcccctgaactgtccagacggagattgttggagcgaagcctgcttgcataagaaagcccaaagggcgagactgtcacatcaaaatcctattacttctccaacgtaatcaccgaaatattcctcccgcaatccgcttctcctcgatgtgttgatcttctgtagctaaaaaattctttttcattttcgtaagtatcaattccggaatttttaatttctaaaatcccttcctcacgtaattttttttctacataactcggcagatcgaacatatgtttatccgctttgttgccatctacaaaaaatattttatttccttcgtcttcgcgcgtaaaatcatcaaaaaattcttgcgaaacttcataagatttttgctgaatcatcggcccaattaccgccataatattttttgcgcctaattttttcatttctgcaatagtagatttaatcacgccattcttagctcctttccatcccgcatgaataacggcaacaatttttttctcttcatcatataagaaaatcggggcgcaatctgctgtaaaaacaccaatcacaactttttttaaagtggttacaatcgcatctgcttttggtaaattttgatcgccatgaattttactatgtgcatcaattgtaattacattgtcactatgaacctgattcacaaattgaattgcatcaaactcaaaacccttctcgcgcaaggctcgctttaaatctttgcgatcagcaatcgcgcgatcaactatacaatctttgccaaaaaaatggaattttacactcatgatttcgacttaaaaaatcttaattttgctaaatattctttcggatttttaatcttaaccaaagtttcggttgaaacagcaaacatatcgtgaagccttgttagtaaaaagcgcatcgctgcgccaaccaaagcaatttttaaaaattctttttcttcagcagaaaattttctgacctcttcataaccacgcaatatctcatcaaatttttgttggtcaaaattatttctttcatcaaaacaccaagcattaactgcaatcgcaaaatcataaatcagcaaatcattggcagcgaaataaaaatcaattacgccactcattttaccttcctgatcgaaaaaaacattatcggggaaaaggtctaaatgactggcgccacttggtaaattggattgccaattcttttcaagaaaatctaaattttctaaaatttctgcacgtaaattgcggtgcaaatattgaactttgttaaataaatttcttaaaactaaaggatttaattcattctcgcgcgacatgttaaaatctgctgtcgccaaatgtaaacgagctaaaactttaccaatttcataacaatgatttgtggtaatattatcataatatccatcttcgcgagcctttaaagacgcgcccttcaagaaagttactatcgttgattttttacctttcaaatcaactattgaagcgcctgaattggcaacaatcggaattggacaacaaatgcctttttgcgccaaatgaattttaaaattaataaaaaaaggcagcgaatttttatcaattcgtgattcaaaaatagttagaataaacctgccttgcgtggtttcgataagcaaatttgtattatcgattccttcgataatttctttaaaatttatcagagttcccaatttgtaattggtaagatgatcttcgatttcctgacgagttaatttggtgtaaatagccattattttttttccttattatctttaatttcttgatgtttttgccagccggcttgccacatagaatttgattttgtgcttttgctccaacttctttctatggacttattttcttgaggattttttgctttgctatgaaatgaatctatttgatctgagaatttttgttctggcgctgaaagcttgatttgcctagctatttcagacgtttctactgcaattttcggatcaatttttactctgatttggggattaaaaatcttcgcaataaagttagtagtgttttcaaaaaagtccatgacatctctggtagaaaattcaccaaaagtgcgaacatcgcgcgagatgctaagcaattcaaaatagcgggcaaaaagttcagaaataatttgattttgcggataactattcatgccttcaaccatcaatctttttatttcagcttttagtggcaaactttttggcgatctgtctttcatatcaaagccgatagcggcgcgaaaatcttcacccaaatttatgccaccttcaaattcccaagcatgcgccatttcatgagcgagaacattatgcgttaggctgtgtaaagtaattttgagatcagctttttttataaaacgtcccaaagttttatcataaagacttttttgttcggttaaaaaacaaccgacatttgtgtcccaacccttgataatcttgatttcgaagcggagttgtttttgttgaactttggtgagaattaaatctagaccatctttgaaaagttcgatgcggtataagtcagcaaaagttctgagaaatttttcaggattttctgcgccttcaaattgaagttgcgggagaagaatttttctaaggatgtcggtcataaaaagtggtgattttggtttgatatcgaaggttgctgaaattaaagacagctcctgaaacaagttcaggatctatctgttaacaaaactacttcttctttaacggcctgcaataaagctctaatctatgcccgatcaattcaaaacctttttcgtgagcaattttagtttttaatttttctaattcttcattaaaaaattcatgcacttcatcagtcgtaatatcaactaaatgatcgtgatgatcttcaccttcaagtttttcatagcgcgcgcgacctttgccgccgaagtcatgtttggcaattacgccaagttcttcaaacatttttacggcgcgataaactgtggcaattccgattttaggattaatttttgaagcacgataaaaaacttcttcaacatcgggatgatcaacgctgtcagaaatcacgcgcgcgatgatgcggcggttttcggttaattttatattgcgatcaaagcaaagtttttcaatttgagaagacatattttcaaggcttgttaaccagttgagggagttattaattgttttttattttttgaagccaaaaataatttgccagctctttcttgcctgacaaattcattttatccgatatgacaaaaaatcgtaaaatcatcgaaaccattgctccttccttaactttcgatgacgtgttgttaaagcctgcattttcaaatgttctgccggcagatgccagtacaaaaacccgcattaccaaaactatttctctcgaaattccaatcatttcttcagcaatggatactgtgaccgaaagcagattggcaattgcaatggcgcaatgcggcggcattggttgtattcataaaaatctttcgatcaaagatcaggctgacgaagttagaagagttaaaaaatttgaatcaggaattgttgtaaatccactgaccataacgccagacgaaactttggcagatgctttgcatttaatgaaacattacggcatttctggaattccggttgtaaaggaaggatcaaaaaaactggtcggcattttaaccaatcgtgacgtgcgttttgccactgataaaaaacagccagtcaaagaattaatgactaaaagcggacttattaccgccaagcaaaatatcagcaaagctgacgctaaagagctgcttcataaaaataaaattgagcgcattattatcaccgattcaagcggcaattgtgttggcttgatcactggaaaagacatcgaaaaaaataaacaatttccccacgcttccaaagatgaagaaggtcgcttgctagttgcagctgcaactggagttggcaaggaaggaattaagcgtgctgaaagtttaattgaagccggagttgacattgtggtaattgacacagctcacggacattctgcaggcgtgatcgaaacagttcgtgaattaaaaaaatcttacccaaaacaacaattcatcgccggaaatatcgcaactttagaagcggcaaaagctttgattgaagcaggtgccgacggcgttaaagttggcattggaccaggttcaatttgcacaactcgcgttgttgcgggcgttggcgtgcctcaactttcagcgattatggatgttgttgaatattgcgataaggtaaaagttccggttatttctgacggcggaattcgtttttcaggcgatcttgccaaagccatcgctgctggcgcttcatgcgtgatgcttggcggattgctagcaggaaccgaggaaactccgggtgaaattgttttgtttaaaggtcgttcttacaaagtttatcgcggcatgggatctcttggcgcaatggctcgcggttcagccgatcgttatttccaacaagatgtttcggataaattaaaattagttcccgaaggagttgaaggccgcgttgcttacaaaggcccagtttcagatgttgttcatcagttaattggcggcttaaaagcttcgatgggttacacaggaaacgccacaattgaagaaatgagaaaaaattgtaattttgttagaatcacaaattcaggtcttcgcgaatcgcacccgcattcaatcacaatcacttccgaatctccgaattatacaactgaaaattagaatttcagacataaaaaaggctagctcgtaagctagcctcaaattttgtgcgttctttttaaaagaacacttgttaccagcttgactgcaaattcccgtaagagccaaattgatgagatgaatatttttataattttttaatgagcaacttttttttctaacaaactcaaatttatgcaaaatatttcaaaacaaagctaccgattaggactcgatctcggcaccaactcaattggctggacgatgctggctttgaatcaagaaaatcagccttacaaaattttagatgcgggcgtgagaattttttcagatggtagaaatccaaaagatggaacaccgcttgcagttgcaagaagagaggcgcgaggaatgcgccgccgccgcgatcgctttttggcaagaaaatcgaaattgatgaattgcttaatcagagttggtttaatgccaaaagatgaagttgagagaaaaaagttggaactcttaagtccttatcaaatcagattcaaagccttggacgaagctttaaatccttttgagttagggcgaacaatttttcacttaaaccaaagaagaggctttaaaagtaatcgcaaagagcaagttactgaagataaaaaacttagcgaaactaaacaaaatcaagaagagctggccaagaaaattattgaaacaaattcacgaactttgggagaatttttttataaagagcgaattttaaaagaactaaccactcgtgccaaaccagatgaatcggggctttatccaaccagagcaatgtatgaaaatgagtttgacgaaattaaaaaatcacaattctcaaaacaaaaattatcagaagaaaactggcaagagattagaaaaataatttttgaccaaagatctttggcaccacaagaaaaaggcgtttgtcaatttattaagaaatctaattctttaccaaattgggcggcggaagtttttgaaaattacaaaaaatcttctgaaaaaaataaaaactcaaaagggcttccaagagcttatcttgcgcttccaagttatcagagattcagaattttatcagaaattaataatctaaaaatcatcaaaaataatcgtgaagaaattttgctcgatgcgccgcaaaaaaagaaattggttgaatatttacatgaaaataaatcggcaaaattttcgtcgctaagaaagcagattggctactctggagaagaatttaaattcaattttgaaggcggaaaacgcgacaaatttgacggcaattcgactgaaatttttttgaaagataaaaaacatttcggcgcaaaatggcatgatttttcgctaaaagaacaagatgaaattgttgagtttttgctcgattccgaagatgaaaacacaatttatgaaaaagccattaatgtttggcaattaagcgcagaacaggctttagaaatcaaaaaaattaccccaaataaattcaaaagcggcgttggaaatttatcaaaagagtttttgcaaaaactggttgttgaaattgcagaaaaaaactgccgctacgacaaagcctgcgaaaatttaggttttcatcacagccaaaaagatcagccagaaattcaaaaccagctcgattattacggcaaagcaattcccgcttcaaccgttcctgttaaatcaggatcgaaagaagaaattgcttatggtaaaattgccaatcccacagttcacgttgcactaaaccaacttcgcaaggttgtaaatgcaattatcgaagaaagtggcaatccaagcgaaattataattgagttggcgcgcgatttgaaaattagccaagacgaaaaacgcgaaattgaaaaggcgcaaaataaaaaccaaaaagaaaatgaagatttaagaaacgaacttgaaaaactcggacaaagaaatggttttgaaaatcgcctgaaattaaaacttttttacgaacttgaaaaagccaataatggcgtggctttctgcccttattcgggcaaaccaatcaacatcacaaacttatttagttttgatgttgaaattgagcatattttgccattcgccaaaacttatgacgattcggttgctaataaaactctcgcctacaaatcagcaaatcataccaaaggtaatcgttcaccatttgaagcctttggcgatgccacttttgaacgcattaaaaatttaccaaataacaaaaaatggcgtttttacgaaaatgccatggaaaaatttaaagacgaaaatggtttccaagagcgtcaactcaatgacacgcgctatttgtcaaaaattgccaagcaatatttagcgcaaatttgcgactccaacgactccaacaaaatcaaagttgccaacggaaaattaaccgcgctgttgcgacataattggggattaaattcaattttgaacaagcaagaagaagaaaattttgaccccgaaacaggcgaagttttggcaaaaaaacctgttaaaaaaacccgcgatgatcatcgccatcacgccgttgacgcgcttgtgattgccatgactgaaactcggcttttgcaacaaatttcgcgcgacaattcgcgcggtcacgatttagatcgcttgataataaatttgcccagccattggaaccgctttcgcgaagacgcggctgaagcgattgaaaaaattattgtttcgcacaaacccgatcatgggaaaaatacgaaacttcacgatgaaacttattacggaattttagaaaaacccttcgatttagacgatggcaaaaaatcaaaagagccttacaaccttgttgcaagctgttcggtactttctttaaaaaaagcagaagccaaatttattcgagataaaaaattgcgcgaagagttgacaaaattagcagatcaagcagcttcagataaagaatttcaaaccaaattcttacccgaattttcaaagaaaacaggagtaagaaatgtcagattttatgacaaaaatcagtcgataatcaaaatttctcatccacaaaaaaatccacgcttttcaaaggcggtaaaaactaacggaaatcaccatatttcagtttggaaaatgcctgatgggaaaattaaaactgacgtggtttcaaattttaaaatgaactgttcttttgaaatcaagcaaaatgaaaggggagaaaattttataaataaggataaaaaatttcttccaaagcaagactttgaaaaattaaagccgcatcccgcggcaaaattattaatccgcttatttaaagatgatttggcaaagttagaagaaaatggagaagaaaaaacagttagaattgcggtgattggaagcactggtcaatgttattattttgatcataaaaatgcttcgagtgacacagattcaaaaaaatctttttatctcaacgaaaaagggcttttaacaaaaaaaattcgtaaaattttcgtcacgccaactggcaaagtttttgattcaggtccaattttaaaaacaacttaaagaaaattaatgacaggacgcatcatcgaaatttccgatccgctagtttcgctttcaatgttgcgcggttttttgttggtgaaggttgaaggcgctgaaaaagcccgcatttcttttgccgatattggcattttaattttgaacggaactggcgccacaatcaccaccaacttgcttaattctttgctggaagcgggcgtgatgattgtggttttgggtgcaaattatttgccttcgggaattttttatcccaccaatccgcattatttgcataagcaaaaaatcaatctgcaaattcaatcttcaaagccgcttgaaaaaaggctttggcaacaagtggtaaaagccaaaattttgaaccaagcgacaattctttcgcattttagcggcaatgacgaaaagcagctttttgagttagcgaaaaaagtaagttcaggtgacaaagaaaatttcgaggcgcaagcagcgcgcaaatattggcagcgtctttttggtgaaaattttagaagaaattttgaaaaactcggaattaattcaatgctcaattatggctacgcggttttgcgtgcagccacagcgcgcgctatttttgcttcgggcttgcatccggcaattggcatttttcattcaaatcaagaaaatgctttttgtttggttgacgatttgatggaaccttttcgcccgatagttgattttttggttaaaaaaattgctgaagaaaatggcgaacttgaagaattaacacccgaaataaaaaaatctttaaccaaaattttaagcctcgatttatcaacttcagccggaacaacgccaattaacaattgcctgacaaggctttgtcaatctttggtgcgcagccttgaaagtggagaagcaaatttagattttccgctttcgccgctaccgatggaattggaaattttgtaattttttaaatgtctcaactttcagcttatcgaattttgtggattcaagttttattcgacctgccaaccaacaacaaaaaagagcgcaaagctgcgtcagcttttagaaattcattgcttgatttgggctttcaaatggcgcaattttcggtttatcaaagattttgtgcgagcaaagaagcggcagaaaaatacatcaaaaaaattgaaaaatttgtgccagaaagcggcaaaattaacattttagttttcactgacaaacaatatgaaaacattatcacctttaacggcaaaaaagaaaaatctaatccaaaaaatcctgaacaatatgagcttttttaaagaaattttcggtgtttttttagaaatgaaaagtagcgcaaaccttacttgcgtaaggcttgcacgactactaaactagacgacgggaatttgcggtcaagctggaatcaattcctcaacaagtaaacttcttaatcaaaactagacgacgggaatttgcggtcaagctggaatgtgaaaagattattgaaattagtgaaaataaaactagacgacgggaatttgcggtcaagctggaatctaacacaagaagaatttgataatttaccaaaactagacgacgggaatttgcggtcaagctggaattcatttatgcctctaaattattttcttcttaaactagacgacgggaatttgcggtcaagctggaatacttgatggccattgaagtatctatcctgtaaactagacgacgggaatttgcggtcaagctggaatgagggagacttaaataatggttttgttttttaaactagacgacgggaatttgcggtcaagctggaatagcactaaggtggactgttttactcacgaaaactagacgacgggaatttgcggtcaagctggaatcaatgccacgggggtttctgctattgcaataaactagacgacgggaatttgcggtcaagctggaatacttgttgagagactgacattttgtcaaataaaactagacgacgggaatttgcggtcaagctggaatacttgttgaatcactgacattttgtcaaataaaactagacgacgggaatttgcggtcaagctggaatagaagtaggggacgactttttaattagaaaaaactagacgacgggaatttgcggtcaagctggaactggaagacgcaaagcaaatcactggtcgcaaaaactagacgacgggaatttgcggtcaagctggaacgaagactttataacgggaattaacttataggatcgacatcaattctaactcgcactgatttaggaatttcaagatttttcatcacatccacaaccaatttctgtagattgacttttttagcagttttcaaattcacaaaaaaatgatggcggttttttaggcgttgaagagcggctggcgcgggtccaaaaatttcaattttatcatcaattggaaaatgctgaattaattttttagcaaaattctttgcttcgctttctgaaaatgaacttatttcaaaacgtgttaatctcgaaaatggcggcagatctaaggcgcgacggtttttagtttcaaattcgtagaaactttttttgtcgctttcaattattttttcaaaaataaaattctgcggattgtaagtttgaatgataatttttcctacatcttcacgccttccggcacgaccaattacttgcattaaaatttggtaagttttttccaaagcgcgcaattctgatgaataaagcgacgaatcggcatcaataattccaaccagcgtgagatcaggaaaatcatgacctttggcgatcatttgcgttccaataattatatcaatttcgctgtttaaaatttgttttaccaatttgtcaacttcggcaaaatttgaaacattgtcacttgtaattaccgcaattctggcatcaacaaaagtagcgcgcacttcttcttcaaccttttcaacaccagttccaattgaaattatggcatctttttcaccgcaaaatttacaattagaaagcaaatgttcgtgatgtccgcaatgatgacaaattaatttcttttttgacttgtgaagcaccaaatgaaaatcgcaatctgggcaatcatatttttttccacaagttttgcaaagcgtgactggcgcatatccacggcgatttaaaaataataaagtttgtttttttaaagctaaatttttagcaatttcttcgcgtaatttttgtgataaaaattcatttgcttgaaatttttcacgacgcaaatccaccatttcaatcgcatttttttgaccaaaactttgttctaaaatgaaatgatgatatttgctggaagtagcgttggagtaagtttcaattgctggagttgctgaagataaaatgattggaaaattttctagtttcgctttcacaatcgccatatcgcgagcgtgaaaattaaaaacatcttcttgtttgaaagatgaatcatgctcttcatcaatcacaattaattttagatttttgaaaggcaaaagaagtgccgaacgcgcgccgatcaagactttaactgaaccttgggcaacgccgtaaaaaatttcgcgcttttcttttttagaaattttggaatgccaaagcgccggatcaaaaccaaattgttctttgaagcgcagtaaaagttggctggttaaagcgatttcaggaagaaggattaagacttgcggagcttgcatagatcctgaaacaagttcaggatgacgatgtggcggggtcgagtccaaacaaactccgtcatcctgaacttgtttcaggatctgcgcgattagcgcaaaataaatttcagttttgccagagccagtaactccatcaagaagcccgatgaaatgaggattttctgccattttttcttgcagctcatcaacaattttttgctgttttggcaaaagtttttttaaggaaaaattttcttttctaaattcctgattttttggcgctgattcttttttaactttatccgaatttaaaatcccgataaaagcacgaagcaccaaaccttgactggcaagattgtacgaagcaataatctcaataaattttaactggttttttgataattttaaacgcttatttacttcaataatttttttaaatttctcaattttcacattttctggcgcatcattgcttacgccaaccacaacgccccaaatttcctttttgccaaactgcacgcgcacaacatcgccgcgctcaatttcgatttcagccaaatagctgaaaggttcattaagcgccaaaggcaacaaaacctgagcgaatatttttgacatgatttgttgattaagagattctgagaggttaattttaaagacagctaccaaaccattttcacttccaaaattcaaataaaataacttatgaaattttttatcgactctgctgaaattgctgaaattaaagaaatcgcggcttatggcttgcttgacggcgttacaaccaacccaagtttgatcgcaaaatcaggcagagattttaaagaagttattgctgaaatctgcaaaattgtttccggtcctgtgagcgctgaagttgcggcaactgattatgaaaatatggttcgtgaaggtgaaattttaagcaaaattgctaaaaatgtttgcatcaaattacccatgactttggatggattaaaagcttgtaaatatttttctgacaaaggcgttcaaactaacgtaaccctttgtttttcagcagctcaagctttgcttgctgctaaagccggcgcaacttttgtgtcaccttttgttggcagattggatgatgtcggacaagatggattagaattaatcgaagaaatttgctgtatttacgcaaattatccaaacattcacactcaaattttagttgcttcaattcgccacccaattcacatcaccgattcagccaaaatgggcgctgacgttgcaacaattccagcaaaagttttgaaacaattaatttctcatccattaactgacaaaggccttgaaacttttgttaaagattgggcttcaaccggacagaaaatttaatgacaaaaaaatggaaaatttttggttatcaaaccgacgttgagtggtatgatgttaaaaccaagttcaagcaattattacgcaaaatcacatatagctggctgtttcaggaattaatttgcctgatttttgttggctatatgatgctggtttatcatacgagtaaaaaaattttcaaaaaccaagaagtgataattgaggcggcaaaaaataaaaaaccgctgattattttcttttggcataatcgcttgatgatgattccatacatcaccaaaaaaccgaaaaaactttatccttattataatttcatgactttagcttcgcgccacggcgatggtaaattcgtgggtcggattatggaaagattcgggctgatttcaattttaggttcatcaaaagacaatcgcaaatcgtcacgcggaattgacatcagcaacttcaaaaaaatttttaatggcttgaaacatggctattctctaggcatcacgccggatggtccgcgtggaccaaaccagaaaatcaatggcgaagtaataaacattgcccgcatttctcaagccggaattatcgcaacttcttactcaacctcacggtttaaaaggcttaatacctgggacaaattttttataccgctgcctttttcgacaatttgtttttactttgatgaaaacccgatttacgttgcgaaagatgcttcagaagaagaaatagcaaaacttaaaatcgcagttgaagaacgggcaaatttgattcaggaaaaatcccaaatcctagctaattcaggcaactaaaattctgcaaattatgacagaagaaattaaagattttaaacttacagactacaaatatccacctcgcaatagcaaaactctaagtgaaattcaaagctatttaaaagcttatgatagagggcaattgcgtttatggaatccatttagcgggcaaagtataaatgtggtcgaactgctaaatccaatggtgcgcacaagatttacgattgctggtgccatattgatgatttctgcctttgtcagcaatatgtatactttaaataatctcaccgccgattcagcaattttatcttacaccactttcatgtgcgccaaccttggtgccgcgcttttgcttccaacttttatcgtagtgattttaaatcgcgtaaaccatgctcgtggcaaacaggcagcacttcgaggaactggttacgaaatgccgcaaaaagaattgcccgacttaaaacaaattagcgacgaactaattcttcaactttctcaggattattctccaatgctgaacggcgcatctgagctttttggtggattgaaaaaaaatattaccattgaacaagttgtcgcaatttttaattatatttttgctgaagataattttgatccaacaccgctgatcgaagatatggaaagatttgaaaatggtcgcaatgaatttaccaaaatgctgcaaaaaggcttagattatggctccgacttgggcgtgattcaagatccaaaatttgtacaattcttatctttcgcttttgtgattggatttttgaaacgcgaagatgatcgcgaaaataaggaatatcgttttcccaatctgcatatttttgaactgctaaaagtttatcaagatttctgcaccaagtttttaaattactgcaaagttgaatatggaacgccattgacagaaagacatgttgtaaaacgcataatgaaactaatgaatagttttattgcccatggcaaaattactattgaggtcaatcatttaataggtcgttaaagtcattattcagtaacagccatccaaactgaagcgaccgcttgagcggcaattccttcttggcgacccaagaatcctaatttttctgttgttgtggctttaacgctgacgcggcttggagaaatatttaaaacttttgccaactcttctttcatctggattttatatttggaaactttcggtttttcacaaattatcgtgatgtctaaattcacaattgaagcgccttttttaatcaataaatgtttcacagtttttagcatttcacgcgaatcaacatttttccattttgaatctgatggcggaaaatgttcgccaatgtcgccctcgccaatcgagcctaaaagagcatcaattaaggcgtgaatgccgacatcaccgtcggaatgtgcttcgatttttttatcaaattcaacatcaacaccgcaaatccggataaaattattttcatctttttgtctttcgcgaaagccatgaacatcaaatccgctgccacaacgcgtttcttctttaacattttgaatcagcattgaagccatgcggatagcgcgctcataatcttcggcagtagtaattttaaaattattttgcgaacccggaacaatcgccactggaattccggcatattcatttagcgccgaatcgtcagtaaaatttaaatctttgaaagcgacgtgggaatttaaaatatcttcgtaaataaatccttgcggagtttgggcgcgccataaattttcacgctccaacgtccattcaatttttccgtcggaatattttttgagcgtatcttcaactgcaattgccggaattaccgctggatgagtttcaagcttttccaaaatgccattaatcacgcgcttagaaacaaaagggcgcacgccatcatgaattaaaaccttgctcggtttatattcgcttaaagcttccaatccaaaacgaattgaagcttgcctgctttcgccaccaaaaaccggatttaacaaatcaagtcctgcggttgcttcttcgtaaagagcaacatcatccggatgaatcacgcacattgcgtcatcaatttttggatgatttaaaaatgctaaaatcgagtgacgtaaaagtggcgctcccgccaaaggcaaatattgctttgggattccttcgccacgattgaagcggtttccgcgcccacaagcggtgattaatgcgacggtttttggaatgctatttggcactgttttccacgattcttttttccatttcaccgcggaaatttttgattaaaccttgcaccggccaagctgcagcgtcacccaaagcacaaattgtgtgaccttcgatttgcttggttaaattataaagttgatcgatttcttttacttctgcttttcctgcaaccatgcgatccatgatccgcattagccagccagttccttcgcggcatggcgtgcattgtccgcaagattcatgtttataaaaatgagaaagacgcgcaattgcggcgattacgtcggttgatttatccatcacaattacgcccgccgttccaaggccagttccgactgcttttagagaatcaaaatccattaaaacggtgtcgcaaacatcttttttaatcatcggaactgacgatccaccaggaattactgccaaaagattgtcccaaccgccgcgcacgccgccggcatgtttttcgattaattcgcgaagtggaattcccatttcttcttcaacattgcatggtttgtttacgtgaccagaaatacagaaaactttagttccggtatttctttcgcgccctaaacctgcgaaccaagacgctccgcgacgtaaaatttctggaacaactgcaattgactcaacgttattaataactgtcggacagccataaagcccgacgagagccggaaatggcggctttaaacgaggttgacctttatttccttctaaactttcaagaagcgcggtttcttcgccgcaaatataagctccagcgccgcgatgaacataaatgtccaaatcccaaccagaattacaggcatttttaccgattaattttgcatcataagcttcatcaattgcacgctgcatcgcaactgcttcattataatattcgccacgaatgtagatgtagcaagtgttggcgttgattgcgcgcgcggcgatcaaacaaccttcgattaatttatgaggatcattgcgcaaaatatcgcgatctttgcaagtgccgggttcggattcatcggcgttgattaccaaataatgcggcttgccttcttttgggtcagattttttaggaacgaaagaccatttagtaccagttggaaaaccagcgccaccgcgaccgcgcaatccagaatctttaacttgctgaatcaaccattccgaaccttgatccagaaattttttggtttcctgccagtcgcctctttttttagcagcttctaaatttggcaattgaaaaccgtaaagattggtaaaaattttatcctgttctttaagcatttttttggaaatttttttggtaggaagatattgtgcgccaatggtaaatttgcttttactaaaatcaagaaagcagcaaatgaattttaaaattcatttttgaatcaaaaaaaaccaagataaaaattttaaggagtaaagattgattaaaaaaaacttcgcaaataaaagttgtttataattttttataaaactccacttataataaatttttacatactcaatttaacgagaattcttcagtgtcaaaatcaagcaatcttcttaaaaatcttttcattttatcgctgttgtttgcgcaaccttcttgttattacgggaaggttgatccatttgatacgcaaaacggcctatcaaggtctgatatcaaaagcagtatcatgaaaaatcctgaaaaaatcaaaacaaatcaggcggttgaagcgccaattcctaatatttcaaaattaatcgcggctcctaaagcaccttcaattggcagcaataaaaccatttctttttcagttacagatcaagttcctctaaaagacgttttgattgaacttggacgagtcgctcaaattgatattgatcttgatcccggcattaacggcggcattattttaaatgctaaaaaccgccctttcaaagaagttgtagatcgcatcgcatctctcggcaatttgcgctatagctatcaaaatggagttttgcattttgagcgcgacaccccctacatgaaaaattatttcgttgattatctgatcgatggtcaact

SEQ ID NO: 3331 - DNA, 14420 bp, synthetic construct
  source 1..14420: mol_type = other DNA
  misc_feature 1..14420: note = Synthetic
tcagtatagagtttaactattgctactcgtgaataagtatcaataaaagtctgctgatatattctgccaatccctttaacagttcctacaaggtaagtatcttgagatccaagaaatccaggatgatgagtttcgatctcgccataagcttctttggtttctttaattttttccaaagcagaaagttgctcttcggttaaaataattccttcttgattaacttttgcctcaagtgcctttaatcttttttgaaaattttctaaatcattacgaagccatacagaccttaccccagcaggagatattaaaattccttttaatcttaattcattgcttgcacgaagctgaccaaaggcaggaaattcaattgctaaatcagttacagctttttcaatatattcaggaactcgatttttaacgattggttttttacgactgatttcttgtagtgcggcttcaccaccagattcataaagttcagagaaacgataaaatgtatctctgctatagcccattaccttgcatgcttgagatacgttcccaagttgttttgctagttctaataatcctagttttggcttaattactttttgtgttaatgttgacataaatactcctgtaaattttgttttaattaattgaacaattttacagagtgtcagattaaatttaaactattacacttaaccattagcactggtaattacatgaccaaaacactcggattttatacgccctcatctttttaaacttcgtaaacacatctttttatatctcacaaacacctcaaaacaaaaggcgagaggtcgtaacctctcgcctaattttgtgagcaattttgatttctcaaaactctcttgttaccagcttgactacaaattccccaatttgtataaaattttttctggatcttttaatagattattttcaaaaaatattttctcaatcatttattataaattttatgaaatatcgacttggcctagatcttggaaccaactcaattggctttgccattcttgaacttaaccaagaaaattcgccacaaaaaattatcgatactggttcaagaattttttctgatggtcgcgatccaaaaactggcgaacctttagcggtggctcgtcgagttgctcgtggaatgcgcaaaagacgcgatcgaaacctatctcgcaaaaaacaattaatgaattttttgattcaaattaatttgatgccacaagatgaaatttcgcgcaaaaaattagaattattaaatccttatgaaattagagctaaagccctatatgaacaattaaaacctgaagaattagcgcgagcgattttccatttagcccaaagaagaggctttaaaagcaatcgcaaagaaattcaaaaggaatccgaaattaccaatgaaaatgaagatgaaaaaaaatccaaaaaagaaaatgccaaaattaccgatcaagataaaagagaaaatttgcaatcagaaattcagaaaaataattgtcaaacacttggcgaatatctttttaaatatcgccttcaaaatggcttaaatgctagagctttagctgattatgatgttttatatccaactcgcgaaatgtatcgcgatgaatttttagcaattaaaaattttcaacaaaatttccaaaatatttctgaagataattgggcaaaaattgaagatataattttctttcaacgcaaattaaaacctcaagataaaggcgtttgtaggtttttagatattcgtaaaattaatgatggtaaattgcccaattgggctcaagaaatacttgcaaattatctcaaaataaatcctttatcaaaaggcttgccaagggcttatttggctttgccaagctattgcaaatttagaattttatcggaagtaaataacttaaaattaaaaaatattcacactcgcgaaataattgaattaacccctgagcaaaagcaaaaaattatcgaaaaattaaattcacaaaaatccgatgtgaaattctcaaaacttcgcaaagaaattaacacaaaagaaattagctttgttaacgattttgaattcaatcttgaaagcgaaagaaggcttgatattcaagccaatccaacacgaaatttactttgcgatgaaaaatattttggcaatttatggcatcaattttcactcaccaaacaagatgaaattgttgaatttttacttgacgaagatgatgaattaaacattgaaaacaaagctcaacacgaatggcaagtctcgcaagagcaagcaaaaaatctcagcaaattaactatcaatcactttaaaaccactgcggttggcagtatgtgcaaagagattttgcaaaaattatgtgaaactattgaacaaaataattgtcgctatgaccaagccttaaaaatccttgagatcaaacatagcgatgaagcttatggaaatggcgatcaagattttctgccatattatgccaaggcaattccgacttcggttgttgccgttaaatcaaaaaccgcctcacaagaagaacaagaatttggtaaaattgccaatccaacggttcatagcgctctaaatcaaattagaaaagtggtaaattctataattaaagattatggcaagcccgccgaaattcatgttgaattagctcgcgaactcaagcaaaccaaggaacaaaacgacaaacttcaaaagcaacaaaatgccaataaaaaagaaaataacgaagcaaagaaagttttagctgaaaataatcaagtcgataattatgaaaatcgactgcgctacaaactttggaaagagcttgatttaaaagacatcaacaatcgcaaatgcccttacaccgacaaaacaatttgtatcaaaaaacttttttctcccgaatttgaaatcgaacatattttgccattttcaaaaacacttgacgactcaattgccaacaaaactatagcatcaaaatcggccaacgccttcaagggcaatcgctcgccttttgaagcattttctggcccgcaaagcccctataattaccaagaaattttagagcgaactaaaacaatgccgaggcacaaaagatggcgatttgaagcgggtgcaatggaaaaatttaatgatcaaaatggttttatagccagccagctcaacgatacgcgctatatttcaaaaattgccaaacaatatttacaacaaatttgcgataaagaaaaaatcagaattggcaatggcaaaatcaccgcacttttacgccataattggggtttaaattcaattttgcataaaccaaaaaattcaaccgaagaacacgaccaaaatataaaaaattttgaccccgaaactggtgaagtttttgaaaataatttttcagaaaaatcagattcaaactcaaccaaaaagaatcgtgatgatcatcgtcatcatgcaattgacgcggtttgtatcgccatgactgatcgaaaaatgcttcaacaaatttcgcgcgacaacgccagaaattttgatatcaatcgcctagaaatcaaacttccaagtcactggaattcgtttcgcgaagatgtaaaagaagctgtagagaaaattatcgtttcgcacaaaattgatcacggcaaaaatgttaaattgcatgacgaaacaaactacggcaagctgaaacaaatgactttggttgatcaaggaaagaaaaaattagcggaatgtaatttggtgataaaaaccaaaataatcacattaaaaaaatctgatgttcattttataagagataaaaaaattaaagatcttctcttattagaagcgaacaaagccagcacagacaaggagttccaagaaaaaattctgccagaatttagcaaaaatacgggaattaaaagagttagattatacgataacaacaagtcggttcttgaaattaatcatccacaaaacaaaccacgatttaaaaaaatcataaaaaccaacggcaatcatcatatttctttgtggaaaatgccaaacggcgaatatttaactgacgtcgtttctaattttaagattaattgcccttatgaaatcgctaaatctcaagatggttttcaatacataaactacgaaaaaaaattcgaagaaaatcaatcaatggaaaagctaaaaccccatccatcagccaaattaattatccgcttatttaaagatgatttggttagaattgaagaagacgataaaattaaaaccgttgttgtaaaagttattggttcaacatctcaatgcttctttttaccccacaatatcgcttcaagcaaaagcaaagataaaaatgagaaacaagaaaatggcaaagaagagagtaaaggctcttttgttttgaatttcaaaactcttaagtcgaaaaagctaagaaaaatctttgtaacaccctctggcaaagtcttcgacagcggtccaatttttaaagaaaataattaaatgggaagagtagttgaaattgctgatccacttgtttcactatcattaaatcgtggatttatgaaaatctcagttgataaaattgataaagcacaaattccaatatctgacatcgatattttgattctaaacggaaccggtgccacgcttacaaccagcttgttaaatgagttactagaaaatggggcaatggttttggttttaggcaaaaattattcaccatccggaattttctatccaaccgaccctcaccaccttcataagcaaaaaattaacttacaaattaacgcgtcaaaacctttaaataaaaggctttggcaggccatcgtcaaagctaaaattattaaccaagctaaaattttgtcatttttttcaaacgaagaagaaaaacaactaattgaactttcaaaaaaagtaagctcgggagaccccgaaaacattgaagctcaagccgccaaaaaatattggcaaaaattattcggcaaagattttcgcagagattattcatctatcggcattaattcattgcttaattatggctatgcaattttgcgctcaagcaccgcccgagcagttctggcttgcggtttaaaccccactcttggcgttcatcaccataatatggaaaatgctttttgtttagtcgatgatttgatggagccttatcgaccaattgttgatttcgttgttaaaagaatttctgaaaaaaatcccgaaataaaagaacttacctcggagcacaaaaaaaaattggccaaaattttgcaaattcaaatttcattaaacagcgaaactaccagcctttctaattctataatgaagctttgccaatcttttgttaatagccttgagaaaggcgaagaaaatttgcaatttccgctttcaccactaccaattgagtttgaaattatttaatttatttcttaaaaagttatttaatttataaaaaatatttttttaatttatcttttcttaaaaaagattatttaaaaaatttacgtgctaaaccaactttcatcttacagaatattgtggattcaggtattattcgatttgccggttggcaatgaaaaacaacgaaaatcagcaacaaaatttcgaaattctttattggatttgggttttgagatggcccaattttctgtctatcaaaaattctgtaacggtacagaaatagcagaaaaatatattaaacagattgaaaaaattgtacccgaatctggcaaagttcatattctgaaatttactgacaagcagtatgaaaatatgatcacttttaatggtagggcagaaaaaaaatcgccgaaaaatcctgaacaatatgaacttttctaatcaaaaaactttattttttttaaatatgaagtcgccttggagccttattttgtaaggctccaagagttcctattctggcaaaggggaatttgtagtcaagccggaacgttgaaacatattcatctatgcacaccctaattctggcaaaggggaatttgtagtcaagccggaactatagtagtttaaaggtcgcggaatagaattattctggcaaaggggaatttgtagtcaagccggaactaagttttttttagttaagttaataaaaggattctggcaaaggggaatttgtagtcaagccggaactgcaaatgcaatcaatataactaaagacttattctggcaaaggggaatttgtagtcaagccggaaccaatctaagttaaattaacctgataaaactttgaaaactacacactaaacgatgcgccacatccgcaattggcgctggcattggggttatttactttaaaatatgaagcccctaattcttcaacaaaatcaattgtcgatccatcaataaattgctgagagatcgaatcggttttggcaataacatcatcaccattagaacatattataaggtcatcttcgaggtttttttcgtcaagttcaaaaatatattggaagccactacaaccgccaccttttacagaaagtcttaaaaattttttagaattgtcagcctgattacgaatttcaagaatgcggtttttggcgctttgagagagattaatgtttgtcatgttggctatttcttttgtggagttcagaataaatttcgtcaattttaatatcaaatttaactagcattgccaaggtatgataaaataaatcggcaacctcattgataatttcgtggcgtgtttcagagttttgataacgatcatgatcaagcgctgaaattgccacctcaacaccttcttcgccaattttttgagccactaaatttattttggaatcaattagttttttactgtatgaatgcaagtcattgctcgaagcttttgattttataatctggtagagttcttcaatcccgactgagtttttaatggctgtgagcgcttgattgttattcataatttttaagagaattttaaggaaagattgcgaattatagctctaaatactgaaatttgtgtattcattttattgtaaaactaaaagaaaaatcaagggatgacttgactaataggcaaatttttttaacttttttaaaattatttttttgtcaaaaataatatttacatcttttctattttaatctctcaaatacaaacaataattatggctatcgaatttactctttcaatcattaaacctgatgcaacaaatcgcaatataactggcaaaatcaactcaaaatttgaagatgcgggtcttaaaattgttgctcaaaaaatgctcttcttgtctgaaaaaatggcgggcgatttttacgcagttcaccgcgagcgccctttttacaaagatctagtcaagtttatgacctctggtcccgttatagttcaagttcttaaaggtgaaaatgccgtcgctaaaaatcgcgaaatcatgggcgctaccaaccccgctaatgccgaaatcggaacaattcgcaaagaatttgctttgtcaattgaggccaattcagttcacggctcagatagtcttgaaaatgctaaaaatgaaattgcctttttctttgccactcatgaaattgtaggataagtttaatgtctaaatcatttcaacaaattatctttgatttacaaaacttttgggcacaacaaggttgcgcaattcttcaaccaattgataccgaggtaggcgctggaacgcttcacccagcaacagcccttcgcgcacttggtaaaaaaccttggaaagttgcttatgcacaaccttgtcgtcgcccaaccgatgctagatttgccaataatccaaaccgcttgagtcaatattatcaatttcaagttttacttaaaccagccccaaacaacattaaaagcttatatctcaaaagccttgaagccatagggctcgacatcgctaacaacgatattagatttgtcgaagatgattgggaaaacccttcggttggggcctctggattgggttgggaggtttggttcaacggcatggaaattacccaatttacctatatgcaacaaattggatcaattgaatgctccttaattcccggagaaattacctacggacttgagcgaattgcaatgcacattcaaggtgttaactcagtttttgacatcaattggaatggtctcgaaggagctaacaaaatcagctatcgcgacattttttttcaaagtgaagttgaaaactcgcatttcattctcaaccatagcgacaccaatattttatttaaaaactttgaagagaccaagcttcaatctcaaaatcttgctaataacaatctcccattcccagcattcgaacaagcgctcaaggcaagtcatatacttaatcttcttgatgcaagacaggctatttcagtcaatgaaagggcttcatatatttcacaaattcgacaattagttaaatcagcttgcgaacttgtagttaacaatgcaaacacaaattaaaatacaaaattatgaaaacaggattctttgatgtacttagtaataccatcttatcaatcccatttttatgggtattttatttggcaatttttttatttttatcctacaaaaaattcaattacctaacctactttgccatcttctctatcttgcttttacctcttaaaataaacttaggattctggttagtattttggtcaatttcggttctaataatatttgaaccgattcgtcaaaaaactcttacccccttcataatttttcttatcaaaactttaggtttattgcccaaaatttctcaaaccgaaaaaatcgctttaacatcgggaaccacatgggttgatggcgagttgttttcgggaaatcccgattttcaaaaaatcatggccttgagttatccaaaacttagcctcgaagaacaaaactttttagacaacgaagttgaggaggtttgtaaaatgtgcgttgactacgaagttcaagtcttgcgtgacctacccccagctgtttggcaatatttgcgcgacaaaaaattctttggcatgattatccctaaacaatatggtggactaggtttctcagcttatgctcatagttgcgttgttgaaaaacttgcttcgcgttcagttactcttgctattacagttatggttccaaactcacttggaccggccgagcttctattgcactacggaaccaaagctcaacaagatttttaccttccgcgccttgccattggagctgatttgccatgttttgcacttaccgagcccagtgccggaagtgacgcaacttctatcaaatcgaatggtgtaatttttaaaaataccgatggtgaaattaaaattcgtttaaattggaataagcgctacataacccttggagcttacgcaaccatcattggagtagcatttcaattgcgcgatcctgataaaatcttatccgaaaataccgaaatcggcattacctgcgctctaattccaagttcaactgcgggagttattcaaggtcgacgccacgatcctttggccacaccttttgtcaactcacctctcaatggtcgcgatgttgaaataagttttgacgccataattggtggcaaagatggaatcggcaaaggttggaaaatgttaatggaatgcttgtcggccggacgcggaatctcgcttccatcaactagctcgggtggctcaaaacttgtgagtcgagttgtaaccgcctacgccatggttcgtgaacaattcggagcgccaattgccaaatttgaaggaatcgaagaagttctcgctagaatcgtatctcgcacttatgcgctggatgctatgcgcgctttcaccgctggttcggttgattcaggcgcaaaacctgcggtaattagcgccatcgccaaatatcattcgaccgaaatgtttcgtcaaaatattaacgatggcatggatatttgtgctggaagcgccattatcagaggtccacgcaacatcttagctaatccatatttttcgacgccaatttcaattacagttgaaggatccaacatcatgactcgaagtcttattcaatttggacaaggcgcaataatgtctcacccctacgcctacaaagaaatacaagctcttgaaaataacgacaaaatcgcttttgaccaagcattttttgcacatattaatcacttatttaataatttatcgcgctcgattttattatctctaactcgcggttatctctacaaaccttctaaacatgattttgttaccaaatttgagcgcaaaatttcttggtgtagcgccacttttgcctttttggccgatgttgcaatggcaaaattcggaggcaatttaaaacgcaaagaaaaaattaacggacgctttggcgacgccttatcggcaatgtattttgcaacctgcattttgcgtaagtttaaagaaaataactgcccaaattctgaaatggatattgtcgaacatgctctgcgcgaacaattttcaaaagcgcaatatgctattgaatctctctatcaaaacctttttacaggttttttaggaatcatttttaaaccatttgcgctttttgcacgttttaacgccttcgtttgcccatcatcagataaattaagtgccgatatagccgaaaaaatttgtcaaaatggcgaattgcgcgacaacctaactcgcggtgtatttgtgaatgatgataaatatgataatcttgggcgcctcgaaaatgcgtttattttaaagcacaaaagcctcgatattttgagtaaaattaaaaaagccattaaaaataaacaactcgtcaaaaaggatttgaaggtcaatatcgccgaagctcttgagcaacaaataatcaataatgatgagaagaatttattgatagaaatgcttgacgcatgttatgatgccatattggttgatgaatacactctcgaaaattacaagaaaatataatgattttactaatcgataactacgatagcttcacatacaatctctatcattatctgctttcagcgggaagtaatgaggttttagttaaaagaaatgatgccataactctcaatgaaatctccaatctaaaaccccgcgccatcgtaatttctcccggaccatgcaccccaaacgaagccggaatttgccttgatgtgatcaataaatttaaaggcaaaatcccgctttttggagtatgtctcggacatcaagcgattggtcaggctttcggtggaaaaatcgttagaactcatcctatgcatggtaaaattagtgagatttatcactcccaacaaaatctttttaaaaatattccctcaccttttaaggcaactcgttatcactctttaattatcgacaaaaacacatgcccaaaaaatctagccattaccgccgaaactaaagatggaattatcatgggaatagccgatgagtcgcttatgatttacggtgttcaatttcaccccgaatcaatcgcaacagattttggccacgaaattttcaaaaattttatcaatttaatctaactcgtaaattgccaatcgaaaaatatactgcgcatcaatttgaaaatttttttgatcaaatttttgacgataaaattgatgacaattcagttaaaaattttttactcgatattaactctttcaatattccaaccaattcgattattggcgcaatctcatcgctaaaaaaaagaatgatcgcaattcccaatcacgaggacgctcttgatgtttgcggaactgggggcgataaactcaacaccctcaatatctcaaccgcagtggcaataattttagcctacatgaatataaaagttgccaaacacggcaatcgagcaatctcttctaagtctggttcggccgatattttctcgcaacttaacataaaatttgatgatgatttaacgcaaattaataaaaatttatgcgctaaaaaattgtgttttttgtttgcgcctaattttcatccggctttaaaaaaagttgtcaatattagaaaatcaattgccgagccaacaatttttaattatattggtccattattaaatcccgtaaacccacgtaaacaaataatcggtttatcacgtattgacattatgcctaaaatagccgaagtcgtggcaaagcttaaacccaatgccaaaatttatttggtgcatggctttgacggcatggatgaaatcagcttaagtcaaaattcatatttagttgaggttgataattcttttataaaagaaacagcgattattgaccccacaaattatggtctaaccaaacgaccgcttgaggatattattggcaaagacccagaatataatgcccacaaaatgcttgaactttttgccggaaaattatcgagttaccaagaaattgtatctcttaattgtgcatttgcccttaagctggttggtagatttgataaaattattgatggtattaattacaccaacgaagtgcttaaatccggtaaaatttatgattttgcaaaaaatctttcgagttagttatttgattaattatttgcccaaattatttagttttggagcaaaatttttagatgtgaattttcattttgctaatcttaaaacatcatctgaataatatcattaagcgtggtaaaaatcatcagtgatataaccagcgcaaagccgaaactatagccaaaactctgaattttttgcgataatggcttacccttaatggcctcgatcaaatagtaaaacaaatggccaccgtcaagaaccggaatcggcaataagttcatcactccgagattaatcgaaatcatcgccataaaccaagccaccaccaagagcccctgctcaacagttttacccgaatatttggcaattttaaccggacctcccaattctttaatggagcgtttgcctgaaattaattgcccaagggtttttaaaatcgaaatcgagatattgtaagtttcgatattggccttaacaaaactttgcccaaaattaagctgattttgagtgatttcatcggccataattccgaccgatctgatttttacttcatcgccaaacatatctttttgaacgatagttttgggattcacggcaaaatcaagaagttgatcatctctttgaattttaaaattcagtgaggtctccaaaccagttacgacaatgttgcggatatcttgaaaatctttaattggtttattgtcgatagtgatgattctatcacctttttttaagccagcttcaaatgatgcactatctttgactatttcgctcacaactggctcaacgattacttcaccatttaatctaaacaaaaaagtgagtattagaattgccaaaataaaatttgcaattggtccagcgctaacaatagcaatgcgctgataaacatttttacctaaaaaagaaattttgcgctcttcagccgacatttgttttatgagttcaatatctggaatcgaggcgccatttctatcaccatacatctttacatatcctccgaaaggccacaaacaaaacttccattcggtattttttttatcacgaaaactaaataaagctttaccaaagccaatggcaaactcgtcaattttaactccgcaccatcgagcaacgatgaaatgaccaaattcatgaataaaaacaatcaacgaaatgattacgataaacgaaaaaagattgtgcaaaatgatgtgaattaatgacataaattcggtgagttaaattgaaatattttaaactgaaattttttgggctatttgtctggccatctggtcattcgacaaaacatcatcaattgattcaagttttttaaatggaattttgtttaaagtttctaaaacaaccaaaggaattttatcaaaagtaatttgtgattttaaaaatctatcaaccgcaacttcattactcgcatttaaaattactggtgcatttccttcagattctaggacttgccggcaaattttgatggctaaaaattttttttcatcgacttcgaaaaattccaaatttttgatagcacataaatcaagcttttgatgcttaattttcatgcgcttagggtaatttatggcgaacgcaattggaatttgcatgtcgggcacgctcatcatggcaaggcttgatccatcggcataatttaccatgccatgaataattgattgagggtgaacaagaattttaatttgttttttagtaattggaaataaatgaaaagcttcaatcatttcaaggcctttattcatcatcgtcgccgaatcaattgatattttggcgcccatttgccatcttggatgcttgagggcttcatcaattgaaatattagcaaaattttttgaagaattgaaaaatggcccacccgaagccgtaagaacaacttcttcaattaaacttagattgtcattttcaaaaatctgaaaaatagcgttatgttcagaatcaactgggatgatcataacattgtttttcttggcctcggccatcaaaaattcacccgcacaaacaagcgactctttgttagcaagagcgatatttgttccaacgcgaatggcattcagagttggcaacattccggccgaaccaacaattgccgaaaccatcaaa

SEQ ID NO: 3332 - DNA, 23333 bp, synthetic construct
  misc_feature 1..23333: note = Synthetic
  source 1..23333: mol_type = other DNA
acacttacacctatcagcgttttttgatgcagagggttattttgcacatactttgcaaattttttatcagaaaagatagaagaacttggcttacaagaggaaaaaagactgataagcaaagcaatggtacataagtttttcatgattttgtcgctaattttcgtgaaaatacgatacaaaatccaaaaatactcaagagtttggagatttgataaaaatagttgaaaaatcgtgcttagaggagttttgtatcacaaagctaatcgccgccaccatcaccaccgccgtccccgccaccatcgctaccgccatctcctgctccgtctaaggcatctccaatttctgaaatcacatcacttagtgtttctatcatgtctgtcatttcttcaagttcttcctgcctaagtcctctgagcagggagtcaagagttgctgcaaagtcatctttctcaaagagttggttcagattgtttgttaaaattttttgttcttctgcatttttttctacaaaaacttggtcaatggtctttgcggctttgagtagccttagaagcataaaagtttgcaagtcgggataggtttgcgataggatagccctctctaacttgtcttttagtgctttgagcgtagcaccatcttggagtatattggtggtataaactttcatacccaagagtttgataggcttttcgccaataatatttttgcttttcagcattttgttagtttgcgtttttagttcgttactttccattttcaggacttttaaccaatttacaagcgttttttcgtgcttttttccaaaaagtgcataaaaatgctttttattctctattttttcaagcaattcttttatccagatgcttttaatttgcacttcggtatttagcataagttccttttgctctgaaaagaccatgctacccgacaaaatctgctcgaaaagcaaagccgcacaaagcccatactcaaatttgggatgggagtgccaagcagaaaaagtatgcttatagctattaaaagaaaggagaaaaaactcttccgtaagcgtttgcatagaaaaaaatatggttatctttaagccatcacagtttcaaaatatttcgatagccagctttggcttgccgcaattttccaatttcggtctaattcttcttttgtctgaactatattattaaaaataatagtttcaggagagaattcgccgcttgctattttttgtctgatgtctttgttttttagtgtcttgatgttgccattttccaaataggcaactgtcagtctatcaaatagtttgaggtcaaacatttgttctatttgcctgataatcgctacagacttatcaatcgagcagccgcttggttcgtggtaactgccgtcaactgccaagcagataaagcgatgataaagcacctgaaaagaggcttgcaaaggatgctgatgggcttcccaagcagaggtaaactgtagcaacgctacgtctattgaggtacattcttccttgctcaaatctctgtccgcctgataaatccagaccctgctattatttggtaactcgttgaaattgatgtacatatttgttttatgtttttggagaacaagaacctaacgacattttttatgccgttaggtatgtgtgtatgtatgcttatttggttctcatttttacattactttggcaaaaaattcatttgcctctgtgcgtagcgttttgaacatttcctcgaaagtagctaccttttcgcgtagttcgctgtggtcttctatctttctgtggtcagttgctacaggattcatttccacacttttaagtatttttgcttcgctttctttgacggcatggcttagttcgtctatttgctctgcgttgatgatgcactgattctcgaagtggctcacttgcattttaatttctgttgcagaatttttagccgatatttcgcctaacctgtttctaagcacctgcaactcgtctttgtaaaaagccaagtttgccgcccattgtttgttttcctgatgttgctctgatatatattccccttttgatgacatgattttttgagtgtttaaatgtttaaatgaattatgattatttaatgtaagttgtgtagtaccaaagatgtaatctttttatttcacacaacccagactaataagacatttcaaaattaaaacaatccaacctattaaaaaatgacatttgtcatcattagcattttttatagaaaaatagcatcagttacttcataagcccacattcgaggcaataagttctgccaaatcatagacttttatttgtgcttccttttccttgcgtttcaccccatctaccatcatagtcatacagaaagggcaagctacagcgacagcacttgcgttagtttctattgcgtcctctattctttcgtgatttacttcttttttgcctttctcggcttctttgaacatttgcgcacctccagccccgcaacaaagcccgtttttcttgctgcgtttcatttctactaagtccacatctaaggcttctaagagttggcgtggagcttcataaatatcgtttgccctgcccaaatagcatgaatcgtggtaagtaatgcgttttcctttgaaatctcccccttcttttacctttattttgcctttgtcgatgagctgttgtaagaaaacagcgtgatgaatgacctcgtaagtgcctccgagggaagggtattcatttttgagtgtgttaaagcaatgcgggcaggcagttactatttttttgatgccgtatccgttcaaaatttgaatattgctaatggcttgcatctcgaacaaaaattcatttccagcacgcttggcggggtcgcctgtgcaagattcttccgttcccaatactgcaaagctaatatttacatgatttaagatttttaccattgcccacgtaacgcgcttgtagcggtcgtcaaaagagccagcacagcccacccaaaaaagcacttcgggcgttttattttcggcagcaagggcagccattgtggggatttttattttatcgtcagccatgattgtgttttcatgtttaattgtacgttcgcttggtactattatctttgtcctatttacttattccgagcaaagatgtaatccttgatacagccttacacctttaagactaccaaaaataatgactttactttttaaatcaaaatgtttttgatgaattactcacaacaagctggtattctgcgtgaggagtcttgatttattttgatataaccattttctgtaaggaaaaaattgaaatgtcggacactaaaattggctgtatcaaacttgactatcaaactattatctacttcattataagtagcatagtgtatgcctttcattgaataaatactatctaatacatttttgatgcacttagggcagtttacatcaaattttacgcttttttcttgcaattttatacagctacttagcattgctaaggctgtgcagacaagaagtcctacagtacgatacctcatgttctcattttttaaaattatttttcgaagtaaataaacaaaataaatacgaataactacttttgcggttcagttttgtatcaaaaaaataaaaagcaaatgaaatttggcgtagtcgtattccccggttctaattgtgatgaagatatgttttataccttaaagcatctgcttcaccaagacaccatcaaactttggcacaaagatagtgatttgcaaggctgcgatttcattatcctccctggcggtttttcctacggagattacctccgttctggtgctatagctcggttttcgcccatcatggagtccgtgattaagcacgctaattcgggcggatacgtattaggcatttgtaatggttttcagatacttacagagtcgcatttattgcagggtgctttgctaaaaaacgaaaatcaccaatatatatgtaaaaacattttcctgaaaactatctctaccaatagtttgcttacccagacgcttgatagggaaaaagcctataaaattccgattgggcatggtgaagggcgtttttatgcatcagcagaaacgatgaaatctttggaagataatgaccaaatactgttcaaatactgtgatgaggcgggcaatctatctcaagcggcaaatccaaacggagcgttggacaatattgcgggaatttgcaataaaaataggaatgtttttgggatgatgccacaccccgaacgtgcagccgatgcacttttgggaaatactgacggcttgtttatcttagagagtattttaaaactcactacggtcgatgtgtttgcctaaaaaaatagaattttagtgaggagcaagttctgccttgcttgtttcgctatcttgctcgcccaaaacatattcgttgagtcgttgtcggatgatagtgagtggcaagtcttcgctaatttctccgttttgaatgatagaaatttgccctgtttgctcagaaacaaccaacacaagcacgtcagtaatttcagaaataccaagtgccgccctgtgccgaagccccatggtagcgggaatatcagggttttgggatacgggcatgatgcatcttgctgcttttattcgcccatctacgataagtaccgccccgtcatgcagtgggctttctttgttgaaaatagctaaaagtaaccttttagaaatttcggcatccaacaaatctccagtatcggcatagttggagagtgcagagttcttagaaatcacaatcaatgctcctgtatcgttttcactcaatgatttgagggcatcggcaataggcgtaactttgaagtcgtactgctttttgtcttttgcccagctaaacaaatcaaagcctttgatgtcggtagattttcccaaaaaaagcaagaaattgcgaatttcctgctggaataaaatcagggcggcaagcattcctacacccataaattggtctaagatagcagctaatagcttcatctgtgtagcctgtaccatgaggaaaatgaggtaaagcaccaaaaaaccgacaaaaattttcaaagccacagttccttttgccaatttatagagttggaaaagcaatacacttactaaggcaatatctacaacatctacccaagctatttctaaaaaaccaatatgaaaaaggagggacaaggtatcggatttttgtttaagactctttttttcttcaaaagtattaaaataaatgcaaatctcatctttacttactaaatttcgtttttcaaacactagttaactttgtcgaagtttagcaagttaaaaacttaaaaaattcattttatttatgaaaaaactgttattcagatacttaggcgcatttttcctaatgctctgctcccttgctctttttgcccaacaaaccaaaactgtaaagggaaaagttacttctttggaagacgggtcgcctatcccgggcgtaaatatcctcgtcaaaggaacaagtaatggaactgctacagatgcagaagggaattataaaattgccatcaaaagaagcgataaaacattggttattagttcggttggttttggaactcaggaggttcaggtgggcaatcgtactgttatcaatatagaactcaagcccgatgtaacggctctttccgaaatagttattatcggctatggtgagcaagaccgcaagacacttacaagttcagtttcctcggttagctccaaagaaattgcgaatattcctatgccaagtgccgaccaactcatgcagggacgtgcggcaggcgtgcaggttagctcaaattctggcactcccggcggcggcatgagtgtaagggtgcgggggactacctccattaatgccgataataatccactttatgtagtagatggtattcctatttctaactctcctttgtcttcgcaaggggttggcggtcaggtagtaaacgcaatggcagacatcaatcctgctgatatagaatcaatggaaatactcaaagatgcctctgcaacagcgatttatggagcaagggcagcgaatggagtagtcattatcacaacaaagcgcggtgcaaatgccaaacccaaagtgagttttggggcgtattggggtacacaaaatctttggcgaaagccacaggtaatcacaagcggggcagaatttgaacgtctttccaacgaagctgccatcaataacgggggtaaagctatctttgctaaccctgatgcatctatcagcaccgattggaacagtcttatttttcagaacgcaccgattcgcaattatgatgtttctgtttcgggtggcgataccaaaattcgttacttggtttctttgaacaattttaagcaagaaggcatcattcgcccctccgattttggcagaactaccgcaagggtaaacttagattttgccgttaccgacaaggtgaaagttggcacaagtctattgcttgcccgaagtacacgcaacagagggcaaaatgacaacaatatttatggttcacttggggctgcctttttcaacccgcctaatatccctgtttatcagcctgatggctcttatacaaagttttctatttttgaaaaccccgtagcagctaccaatgagcaggactacaaaatggtaacaaatcgctttttggggaatgtctatatagattacgaaatagtggagggcttgacttttcgcagtagctggagcatggactacagcaacaacaaagaagatttgtactataatactttgatgattcagggcgttgcaacacgcggcagaggcatttcgagtgttacagcagataataattggataaatgaaaatacattaagctatcaaaaaagtttgggcggcggacataaaattaatgttttgctcggcaactcactccaagagagctacatagaacgcatcaccgccgaagggcagcagtttccaagcaatgacttccgccgaatcaactccgccgcagtgcagttagctggctctggggctacaggtttcgggcttgcttcctactttggcagggtaaattacggtttcaaaggcaaatatttggcaactatcaacgtccgcagagatggctcgtcccgctttggaacggcaaacagatggggaactttcccttctgtggctttgggttggagaatctctgacgaaaaattcatgcagaaattgatttttatttcgaacatgaaactccgcacaagctacggcacagtgggcaatcaaaatttttctgccctcgatactgatgatggcaatagtatttacctaagagattttgtttctcgcggactgtggagtggtggcgcaaactatggcgacctaccagggatagagcctgttcagcttgctaaccctaacttaaagtgggaaactactactcagctaaacgtaggtttagatttgagtattatgaaaaataaattgatttttaccatcgactattataacaagcaaaccaaagatttgctgcttgctgtgcctcttgcccgaagcggagggttcaactcacaggtgcagaacttaggacagatggaaaacaaaggcatagagcttggcatcaatgctacagtcatcaacaaagaagatttgacgtggaacattaactttaacatagcgcgcaatcgcaacctaatcaaaaaattagcatctccgttcacacagtttactcgtgatgtaattcgattggaagagggtgtgcctatgtattccttttggctgcacagacagattggggtaagccctgaaaacggcgatgctgtctgggatggtggcgaagatggcgtatttaaccccgctaccgacagatttattgtaggcaatgcccaacccgatttttatggcggtatcaccaacaatctcacttggaaaggctttgatttaatggtgtttttccaatatagctacggcaattcccaactcaattggaacagatttttccaagagcatggcggcacgcgcaacaccaattttagccaaagtcagttagaccgttggcaaaaagcgggcgaccaaacgatgattcctaaaatgacaaatgccaactatgcaagcaaccttcgcccttctcggtttttggaagatggctcttatttaaggctaaaaaatattgtggtgggctatactttgcccaaagaaatagtagcaaaagcctttctgagcagcgtaagggtttatttctcggcacaaaatctcctgacttttaccaaatacacagggcttgacccagagctaaacacaggcggcaatttgtctttggtgcagggcatcgagctatacgcaatgccacagccacgtatgtttacggcaggttttaatgtaagtttttaagcaattcctaattttgaaaaacgaatgaaaaagttattttatatattttcagtcattattttcttttctgcttgcaatgtgttggacaagcaacccgaactacaggtggaagacgctgctgccattacagatatagtaggggcaaatgccgcattagcaggactttataatcaagtacaaggtgtttaccaaggacgcatccaacgcttggctgacgtatcggggactacggcacaaagtgtggggacatgggatttttatcgagaaatggatacctatctcactaaccccgataatacggaaatccttgatatttggacatttatctatcgcggggtgaacgtagcaaacaatctgattgcttccgtatccaatttagacgcacagcagtctgtcaaagatggcattctggggcaggcatattttgtgcgcgggctgatgttttttgacgcggtgcgtatatgggggggcgtgccttcggtagcaggtacactcggcatccctttgcccaaagaaccttcccgaagtgcggtgcaatacgaaagagcctccttagcagactcttatgcccaagttgaggcagacttactgcaagcccttaacctactgcccgaaaataatgccgcagggcaagccaccaaagccgccgcaaatgccttgctttcgaggtattgcctgtacgtgaaaaaatatgcagatgccgaacgctacgccaatgcagtcattaacaactcaagatttgcactcgtaacgccctattcggatatttttagcgggagaaacaccactgaatctatcttagaattgcagtttaacaatgccgaccaaagcagtttgagattttggtacgtgcctggggctattggtgggcgtggcgaattagcagcacacacagagttttacaaccaaatgaacgcaaattcaagtgatgtcagaaacaaattatttgcttttgacaatgtgtcaaagttctggtatccaaccaaatacgtaaaggcgggaaacatagacaatgctcatcttatccgcttggcagaagtaattctgaacagagcagaagcaagggcaaataccaacaacttcgcaggggcaagagcagacctgaacatcatcagaggaagggcaaatagcttggcagacaataccgcaaactcaaccgaacaactcatgcttgctatcgagagagaaaggcgtttcgaactctgctacgaggggcatgaatggtttgacttggtaagaatggggcgtgctttggcggtgcttggctccgtacctcgcagcaactctccaggctcacccgcaaggctcatagaccgcaaccgcttggtttttcctattccgtttcaggaagtaaatgcaaatgctaaaatggtacaaaacgaaggatataggtaggaaaattagataaaaagcaaaactgcgttgctaaggtgtaaaactttggcaacgcagtttttttatacaacgaaaaaagccctgcaataagcaaggcagaggtctaaaaagacctacagaataatcttttattgtgataagctaacaaataaggaaataagcaatactaatttctttactttcaaataaggatatacaaacttaaagatttattttgtgattacaaatttttactcatatatttactaaaattaataaaaattctttttatcctttaaaaaacatctaaaaaatgaaagttttagggcttgacattggcacaaactctattggctgggggctgatagacaatgaaaaacaagaaattattgctacaggcgtgcgtatttttcctataggggtgaatgttagcacccagttcaaagaagaatctaaaaacaaatctcgcagggatgcgaggtcagcacgtaggagacgctttcgccagaaaatgcgccgaactgccctcaaaaaaatacttgatagtttggcaattccttccaaaatcaaatctactaatattgaggcgtatcagctaagggcaaaagctatagacgaaaaagtaggcttggcagacttagggcttatttttttgcacctcaacaaaaggcgtggtttcaaaagtacacgcaaagacgaaattttgcaagaaggagatgaggatttaggcatcaaagccgacaaagaggcgggaaaagtgaaagtaagcatcgaaaagctacagacagacatcagaaatgcagactgtaggacaatgggcgaatatttttattccctcatcaagcaaagcagcgagcaagaaaagtacgcctacaacccacaaatgcccatagagcgcataagggggcgttatacctctcgcaagctatacgaagaagaatttgatacaatttggcaaaagcaaaaagaattttatcccaatttgcttaatgcggaaaactacaaaagtatcaaagaagattgcatttttttccagcgtgaactcaaatcacaaaagcatctgataaataaatgtcgttttgagaaggacaaaccctgctgccctacctcgaagcctatttatcaagaatttaggatttggcaaaaaatcaatgatttagtagttagtaccgctattactgacgagggcagaccacttaccaaaggcgaaaagcaaattctctttgaggaactgcaaagcaagccaagcctaaaagcttcggagattaaaaagctactttttgccaagcccaaagctgtagaaatgaactttgatgacaaggacagcatcaaaggaaatatcacaagggtaaaacttatcaaggcattaggcgaggagtacgtaaacgcactttcttccgaaaaattagaccaagtttggcattatttgcatatccaaaaagataaaacttggctcaaaaaaattgctttagaaaaattacaattcacagagcagcaggcttttacatttgctaaaatcaacttagaagatgactacagctcgctttgcacaaaagcgatgggtaagattttgccacatctcaaagagggctaccaatactcggaggcgtgcaaaaaagcaggctaccatcactcccttgatacggaaaaggcaaatagaccgcttgaagattcattgaaaaaattagaagcaaatgagctacgaaacccaatagtacagcgaagcctgaccgaaatgaaaagacttgtcaatgaagtaattaggctgtacggaaagcccgacatggtgcgagtggaaaccgcaagagagctacgcaagccaaaagaagaaagggaaaagatgcacaacaaaaaccgcgataaagatgcgctgcggaaggaatacgctgattttctctcccaaaagttagatagacaaatatcaccgagaagctccgaaattaccaagtacgaactttggctggaattaggggcggatgccgaagaccttgccaaaaaaggcggaaatatggaggagtttgtcaagttttcccgaagggtaagcacaggggacaaaaccaagtttaacctctggaaagagtgcctgcgccgctcggtctatacaggtgaaattatttctctctctgacctttttaagtccgaaacagaagtagagcatatcattccctacagcaaaagtatggacaatggctttgcaaataaaacattggcggagaggaagtttaaccaagacaaaggcgaaagaacaccttatgagtatattttcaatactttgggaaaagaggcttggaatgcgttttgtgaaagaattaaaattttccctaagcacaagcaagacaagctaaaaatgcaggaatatccccccgccgactttctggagcagcagcttcggaatactgcctacatagcggtaaaagcgggagaaatgctgacaaaagtagtaaatgtagagctggtaaaagggcaaagtactgcacaactgcgggcgcattgggggctaaacggtacgctaaagggggaaaaccccgaaatcaaaaacagaggcgaccacaggcatcatgctgtagatgccatagtaatagcactcactaccaagtctttacttgatacattaagcaaatggagtgcctacaatccgcagcgcgacctctaccagatagacgagaaatatctacccaagcaaatgtggaacgggaagctacgcacacagcttgataagcacttaggcagtatgctcatctctcatagagcagataataggctgatagtgagaaagaaaggcagaatttttactaaatctaaaggattaatcaaaaccaaaactacttttgcggtaagaggggctttgcataatgacacctatttagggtacatcaaatttccaaatgacaagcacccatatttcaagaaagggcaattagtagccaaagttcgcaaaccgattgatttgctttcggatactgaaatagagaacatcatagacccaaaagtaaaagaacaagtaaaaaaatattttgctgaaaaagagcaagaaggcaagcaaaaaacaaaagaacaaaaaataatagaggcaaaaatgtatagcaaaaaaggctatgatgtgcctctgaaaagggtaacagttgccaaaacggacaagcctattccactttacccaaatagggaaaatacaccctatgtaatgccaaatgataattatatcatgggggtttacgaagctgaagtcatcaataaaggcaaaccacaaaccaaaaggatggacatagtggtaagttttatggaatctatacagcgaaaaaccaataacttacccgtactacagccaatcattcaggaaggtgagcaaacttacaaacttatttataccttaaaaaaaggagatatgtttgtgatgtatgagaatcatacagacgaaatcagttggcatgacgacaaagatctttttaagaggttatacaaagtcatagaaatttcaagtgggactatttactttggtttacactatgctgccaaaacaagtgcagatagaagcaaagataaaaatgagaaaaaggaacagagtattgttcgtattttcagaagtccctctaagctcaaagcggttaaagtcaaaattgacatcttaggcagaatttctatggcatagtctacaaaagagggagaaggttgtaaacggtcgcagaccttggcaatctttctccctctctttttagaacctttttacacctattccgttattttctttattatcccttgccctaatacccctatttgtatccattttacttcatctgcactacgcccatgataaagcgtactatctattttggtaatcctgcctacttaggcaaaaaagacgagcagttagcggtctattctcctaaaaatgaatttttggcaagtattcctatcgaggatattggcatcttgctactcgaccacccccagattacggtgagtcatagcctgatgggaagcctactcgctaataatgttgcctttattacctgcgatgcccagcacctgcctacaggcttgatgctcaacctgaacggaaatcatctccaatctctgcacttcagagagcaaatttcggcttccgaaccgctaaaaaagcaactttggcagcagactgtcaaggcaaaactactcaaccaagcaaggcatttggaacttcggcacaaggaggcagacagcctaagaagatgggcaaaaggcgtaaagtcagccgactccgaggggcatgaggcaagagccgccgccttttattggcaacgaatttttgcgccgcacctgcccgactttcgcagaagtagagagggcgcaccgccaaacggtctgctcaactatggctatgctatccttagggctgtagtggctcgctcgctcgttggctctggcttgctgcctactttgggtattttccaccgcaaccagtacaatgcctactgcctcgccgatgacatcatggagccgtaccgcccctttgtagatgcgatggtgctggacatgatagaggaaggcaaaccttttgccgacttaggtaaggaaacgaaggaacgcctacttacgatagcaaccgcagacgtacggatagacggggaaaacagccccctcatggtaggcttgcagcgcactacagcctctttggtgcggtgctttgccaaagaaagtaccaaaatcttgtatcccgaatttactaaataacaatactatgcttatttctgatgacgtttttaaccattacaaaattatgtgggtattcgtattttttgacctacccgtccagaccaaaaaacaaagacgggcttatgccgactttcgcaagagcttgctcaaagacggcttttctatgttccagtattccatctatatcaggcacagcatgagtagggaaaatgccctcgtgcatatagagagagtaaaaaaggcactgccaaaggaggggcatatcgttatttttagcctcaccgacaagcagtttggtgatattgagattttttatggctatcaggcgcagcagctacccaagattacgcagcagcttacgatgttctgaaataaaaaagcccgctcgaagcgggcgaggtcagcagaccaaaggctgaaaacagcctacagaataatcttttattgtgataagcaatcaaaaaaatgccttcgcttagggagggatttccgaaagaaggcatttttttctttcaaaaatccttgtaactcactgacaaatagattactatccgtacccctaatatacaaaatccttatttgaaagcaaaccacaacagtagccatgattgccattgctaatcctaaaatatacaaaatccttatttgaaagcaaaccacaactgtgctgaaactccatataaatccgcaggaaatatacaaaatccttatttgaaagcaaaccacaacactgcttaaaggcttcatacatttttgattaatatacaaaatccttatttgaaagcaaaccacaactattagcaagttgcacacccaaaggtacaaaatatacaaaatccttatttgaaagcaaaccacaaccctgtttgaatagggtaaattggtctttgaaatatacaaaatccttatttgaaagcaaaccacaaccagtggtaagtattccaatagttttttttcaatatacaaaatccttatttgaaagcaaaccacaacacttcaagcgttatctgtggttctacctcaaatatacaaaatccttatttgaaagcaaaccacaactaatcttctaagaactgcatttacaacaaaaatatacaaaatccttatttgaaagcaaaccacaacgattgtcttcaattagttggaaaagcatttaatatacaaaatccttatttgaaagcaaaccacaacctatcgcagctgactgtaaaccaaatcaagaatatacaaaatccttatttgaaagcaaaccacaacgataatgacggcggtgtcagttgtgctaataatatacaaaatccttatttgaaagcaaaccacaacaatcaatacattgagtacgaaaccgctaacaatatacaaaatccttatttgaaagcaaaccacaacccaagacattcaaacaaaaattgtggaaacaatatacaaaatccttatttgaaagcaaaccacaactttttttgggtgggcaaaagctacggtacaaatatacaaaatccttatttgaaagcaaaccacaacattaagtcagatgttgaaaagataatgcctaatatacaaaatccttatttgaaagcaaaccacaacaaatatttgaaaagttccattatacttcccaatatacaaaatccttatttgaaagcaaaccacaacggtaaaccacgaacgcccccaaaatccagaaatatacaaaatccttatttgaaagcaaaccacaacctatacataaaatcgttatataactttcgcaaatatacaaaatccttatttgaaagcaaaccacaacacacgctgaaatcttgttagaaaagtggctaatatacaaaatccttatttgaaagcaaaccacaacccgaacgtatgccgtaacttatgagggtgtaatatacaaaatccttatttgaaagcaaaccacaacttactgctgaaggcaaacttgctattttgcaatatacaaaatccttatttgaaagcaaaccacaactaatcaaccaatggttgtaaaactcttgcgaatatacaaaatccttatttgaaagcaaaccacaacagtatcaccccgatttggcaggtgcaacgcaaatatacaaaatccttatttgaaagcaaaccacaacatattgctcatgttcgtatcaaagttgccaaatatacaaaatccttatttgaaagcaaaccacaactaccaaatcggcattgtcaatcatgtactaatatacaaaatccttatttgaaagcaaaccacaacttggtctttgagtaagtcccttgtattttgaatatacaaaatccttatttgaaagcaaaccacaacccctgagtacacccttcaaaccgaaaaaataatatacaaaatccttatttgaaagcaaaccacaacagctatgtaagtattccctttccaagtattaatatacaaaatccttatttgaaagcaaaccacaactggcacacagtacgaatatgaaaccttgttaatatacaaaatccttatttgaaagcaaaccacaacaatttaacgccttacttgtttcaaaagttagaatatacaaaatccttatttgaaagcaaaccacaacacagagtgtaagtcaaggagcgaatctatgaatatacaaaatccttatttgaaagcaaaccacaaccctgatgggcaaatgtttatagagttctacaatatacaaaatccttatttgaaagcaaaccacaactgtcattcaggtacgctatacggcttacaaaatatacaaaatccttatttgaaagcaaaccacaactaagttctggcgattataaagcggaatttgaatatacaaaatccttatttgaaagcaaaccacaaccacaagtggatgccgccaataaagaaattaaatatacaaaatccttatttgaaagcaaaccacaacataaggtcgccgctaaaaaatatgatacctaatatacaaaatccttatttgaaagcaaaccacaactgtcttgtaatactgccaaaaattagactgaatatacaaaatccttatttgaaagcaaaccacaaccctctccgctttcatgcaattcctgcaagtaatatacaaaatccttatttgaaagcaaaccacaacaagaagtttgggggctaaaataaggtagaaaatatacaaaatccttatttgaaagcaaaccacaactttaagcctattgtacctactgtgcttgtaaatatacaaaatccttatttgaaagcaaaccacaacactgaaaaaagcacaccccacaaaaaaaacaatatacaaaatccttatttgaaagcaaaccacaactaaataattgctaaagatatgctcggcagaaatatacaaaatccttatttgaaagcaaaccacaactcgctacgcattggctacaggcagagttcgaatatacaaaatccttatttgaaagcaaaccacaacctattcaaagatattactacaaataatgcaaatatacaaaatccttatttgaaagcaaaccacaactggcttgggcggtgctgttgattcagttataatatacaaaatccttatttgaaagcaaaccacaacacaaacccgcccgcctccgctcttttgtgcaatatacaaaatccttatttgaaagcaaaccacaacatgtatggcgaccttgatttacaggcattaaatatacaaaatccttatttgaaagcaaaccacaacttaaaacacattgcaccttatttgccttataatatacaaaatccttatttgaaagcaaaccacaactgttgaataggagattaaaaatataaaaagaatatacaaaatccttatttgaaagcaaaccacaacaaggtgaagaagccttcaaaacgcttattaatatacaaaatccttatttgaaagcaaaccacaactgtgccaagcaatccgatggactgactaagaatatacaaaatccttatttgaaagcaaaccacaactataggtcaattgatataagccgtgttttaaatatacaaaatccttatttgaaagcaaaccacaactatagcccgcttctgctttatttaatgcttaatatacaaaatccttatttgaaagcaaaccacaactatatttgagtggttgcaatgtctgtgtgtaatatacaaaatccttatttgaaagcaaaccacaacgtgagaaaagaaacatacccgcaagaccgtaatatacaaaatccttatttgaaagcaaaccacaacatggtagggtaggtgttttgcatggcattgaatatacaaaatccttatttgaaagcaaaccacaaccaattgctatattatagattgcagtaagagaatatacaaaatccttatttgaaagcaaaccacaacatgacaggagtattttcctcgagaaaatcaaatatacaaaatccttatttgaaagcaaaccacaacccgtattacagtttgaaagtaggggtttaatatacaaaatccttatttgaaagcaaaccacaacgtgaagccagatgtagaagacttaaagtttaatatacaaaatccttatttgaaagcaaaccacaacgataaagcattgccctaatttcttggtttcaatatacaaaatccttatttgaaagcaaaccaataactaataaccaatgaccaataactaataaccaatgaccaataactaataaccaatgaccaataactaataaccaatgaccaataactaataaataaccaatgaccaataactaataaccaatgaccaataactaacatacaaatccttatttgaaagcaaaccacaacgccaagaatgtatattaattttattgcttttagtgatttttttaattctacctattcctctgccagtgtttcttttagcttttccatcgctgccctattaaaagggctgtgaatcatctgtttgatgtcttctttttctttggtagtaagtcgccagctaagtgatgcgggctgcgaagtttcctgctgatactgaaactctatcaggctaattttgccgacaaaccacgcccttgcgtattccaaatcgttgtcgtttcgcacgtcttgtaggcgagagaggttgcctatcatgtcctcaatggggctgaaaagatagttgagaaaagttctttcgctgtgtttgggaatttcctctttttgagggtcgcgtatcgcaatgaaaaccacgcccgaagtattttcgctaatccactccctaaacacatacaagaaacgaatggcattatccaaaccgaaattgtctaacaagcccgcatccatcacttccataagcggattggagggcagcaaaacgttgggcgtaatgtaggggaaagtggcgttcattcgcaacgctgttacaaaatgcagactatcagcgtcttgtgcttcaaaaaaacgcctaaattcaatgccttttatcttgctatgaatttcctttttctcatatagttcgcttacactcatataagaaatgggctgcgaagaaataaaaagtttgcgaccatcattgacgatgcagggcgaaagtatcatcatcgggatttgggcttgctgttcaggtaactgatagtctatgaggcgtttatctaacatattttctgtatctctgatgatttttcgttcaaaaaaataactacggtctttgaagtaagacttattgccatcattaaactgttggaatttgaatcccaaatcgcctgtgagtagggcaaaaataagcgtgtttagtcggtctttggctatattttctaagtattttgtatcgttgagggagatagatttttcttgctgctgtcgcaaatagagttctctgaaataagcagccccaatcatgcctcctgatgcccccgtcatgagcatagtttgccgcattacctcccctttgaaggcactatctaaggcttgcaagcaccgcatagaccatacagaggctctttgtccgcctccgctactgcaaataaaaatcatttttggctttttttcttttggaaattttgctcgccaattttccagcacttgcgttcccgctttgaagtcttccaagtagttattgataccgcccaagtcctgaattttttccagcgaataggttgcttttttatcgtaattcagcccgtatgcttggttaaacggcttttctgtgcctactcttagcagtatgccgttggcaataagagcaatgattagtacaactattcccgcccaagcccgaaaccaataggtaagcgcgcccgcaagcatcatcactaaggagagcaaaatcatgccacttgctgctgcgggaatttgcatatattctatatcgcggaaaatgcccaaaacaaccaaaaaagcaaaagaaacggcttggattatcaaagcattgagttggttttggtcaaaaattttgagcatatcttccttattataggtatagtcgtatcggatccgcttaaaataaaaaggcagttggaaatacgattttacaatgatgcggttcgtttgtgtgtttgccaatcgctgcatgatgaaaaagcggttaaatttgtttcgcttcagttgtttgtccacgtttgcagccaaatgcttgaaaatgtctttgttagtataatggaaatagacaaaaaagagaatgagcatccccgccaagcccgaaagcaagcctgctactttgagcagaatatcgtcctgcccaaatgctttttggtaatggataaagttatagagataaatgatagtgaaagccaatgggatagtgctgttatttacacaaaactttgtaaagggcagccgcagggataccaaaaaaccaaactgatgcccaatgagaatgtagcaagtgatatgaaaagacatggacaagatgccaaaagcagcaccaacaagaaaaaaacttgtaaaatttacctgacctaaatactctgcatctaaaaataggtaaggaattcccaaacttttcccgaagtagcccgtaactacggcaactaacaccaaccaaagtaaaagcaatacctgactttttttgatgtggtaaattaataattgtaatggaaatgaataaaataagagatgtagcatggattgaaagtaaagatataaaaatgaatagataaattaaagtttcttaacatacaaaaaattcattattttaaatttgattcctaattttacggcagattgtaattctgaacacaaattacataaattacacgaatttactaagaataatagaatatatggaaaatatagaatggggaaaaactccacctgtagatgcggcggcactgcgtgtgaaaattcagcaggtttacgaggagatgaataaagtcgtagttgggcagcgttatatgattaatcgcctattgataggactttttaccaacgggcatatcttgcttgagggcgtgccaggtcttgccaaaacgctcactatcaatacacttgctcaggtattacgcctaaattttcagcgtattcaattcacccccgatttgctaccagccgatttgatagggacgatgatttacaatcagaaaaccgcagagttcgaggtaaaaaagggtcccattttttctaacctgattctggctgacgaggtaaaccgttctcctgccaaagtgcagtctgccctgctcgaagccatgcaagaaaagcaagtaacgattgggacgactacttttaagttggacgcacctttcttggtattggctacgcaaaaccctgtggagcaagagggtacttatcctttgccagaggcacagttagaccgctttatgatgaaggtgtatgtaaactaccccgacaaggaatcagaattggaagtaatgcgccgcatgtcgaaccttactttttatggagatgtgcagcctgtattgagtaagaatgaaatttttgcgatacgcgatgccattaatgcggtgaaaatttccgattcattggaaaaatacatcattgagttggtttttgccactcgcaagcccaaagagtacggacttatcgaggaggcatcttttatccaatttggcgtttcgccgcgggcaagtatcaatatgaatcgtgctgctaaggcgattgcatttttggaaggcagagattatgtgcttcccgaagacatcaaagaaatagtatatgatgtgctaaatcaccgcatcttgctcaactacgaggcagaagcagagggcatcactacgagagaaattattgaaagcatactcaaaaaagtagcaattaccaaatagaaaagagcaacatgaaagaagatttgtttttcttgccactctttatcacagaaaaaatctatgtaattgctaaggatgaggaggtcggtattgcgcatttagccgacctccccaaacaagaaacaaagccttttcttattctgcatgaagaaaactcacttcccgtagcccaagaggaactgcttgctaatattctgaaagctgtcagcatttcttcggataagttagaaagattatttataggcgattttcagcccattaatttggcatcgagaaaatttatttttgtgttttcctccgccaagattccccctgcttttgctcagatagagaaaaataaagcaagggaaattaccgaaggcactcaagtcatttactcagattcactcaccgacttagcgggcgacaagcaaaaaaaattagcactttgggcagaactgaaaagaacgtttagcctataaactaattcaaatattcagatttcatattgattgtcaatctgtcattgcttacaaggcggtgatgtaatgcttgtattttgggtaactcatactcaaaaaagtaatgtactgtgagtatttttccctgataaaaatttttatcatcttcgctcaactcagtattaaggagtgctttctctgccaccaagccttgtgtgagccaaatccaagcaatcgttactatgctaaaatagtctaagtagagggtagcatctgccaaaaatacttctggtttgttttctttta

SEQ ID NO: 3333 - DNA, 24632 bp, synthetic construct
  source 1..24632: mol_type = other DNA
  misc_feature 1..24632: note = Synthetic
aatataaagcctttccctgattagaaacaatggctttgactatatttggatcgaataagtcggttgccgtagtaatcttcttgtataaactggctatttgtacttcattgcgacagagcagttgggcaactcttccaatctgttcgggccgtataaaaggctcatcaccctgaatatttattactgaatcgaagtgatcattccgactgataagtttgattgcttcggcacagcgagaggttccactgggatgatcaggagaagtcatcacggccttgccaccgttttcgattacatgtttgaaaatgcgttgatcgtcggtagccacaacaacctcatcgagtttttgcacttttgcagcttgttcataaactcgcattatcatgcttttgcctttgatatcagccagaggtttacccggaaatcttgtcgaagcatatcttgcaggaatgatgcctgctatcttcataggttgtagcttgagagtaaaagaaaaatttcaaaaatcgagagtttcgatcaggttatcatcgaccagattaggaagcgtaactttcaagtggggttcatgctgcatggttttttggatagtgagcatagcgccctggttacgtgcccatgaacgccgtgcaatgccattgtttacatcccagaagagcatggatctaagacggtgctgggcttcagccgttccatcgagaacaaggccaaaacctccattaatggcttcaccccagccaacacctccgccattgtgaagcgaaacccaagtggcacctctgaaagaatctcctgccatattctgtacagccatatcggccgtaaatgatgaaccatcatagatgttcgaagtttccctgaagggagaatcagtacccgaaacatcgtgatgatctcgtcctagaactatggcagccgaaatttctcctctggcgatggcctgattgaaggcttccgaaatacgaatgcgcccttcggcatcggcatataagatcctggcctgagaacctaccacaagattattggtttttgcttgacgtatccataaaagattgtccttcaactgttgctgaatctcgacaggagcatctgtgagcattttttcgaaaatatctccggcaatctgatcggttttgtccagatcggccggattgccactggtgcacacccaacgaaacggaccaaaaccataatcgaaatacaatggccccataatatcttgaacatacgaaggataaataaaatttccacttgcattgaagatatcggctcctgccctgcccgattccaataagaatgcattgccataatcgaagaaatacattccattagctgcaattttgttgatggctgccacttgcttgcgcagtgacgcttttaccttttccttgaaaacttcgggctggctaaccatcatttcctgtgattcttcgaaagaaagaccgaccggataataaccacctgcaaaggggttatgcaaagaagtttgatcggaaccaatatctacgtgaatatcatcgatggcaagcctttcccataaatcgaccacattccccagataagcaatcgaatgaggcttacccatttctttccaatgcaaagcagttcgaatagccttttctacatcatcgatcacttcgtctacccagccttggttgaaacgcttgtaagctgccttgggattgatttcggccaccaggctcactacgcctgcaatattccctgcttttggttgcgcacccgacatgcctcccaaaccactcgaaacaaataatttcatttctgaagccgaatctttacgagatattttccggctggcattcataatggtaatcgttgtaccatgcacaattccctgaggaccaatatacatgtatgaaccggcggtcatctgcccatattgggatactccaagtgcattgaatttttcccaatggtcaggactggaatagttgggcacaaccattccattggtaactactacgcgaggtgcttcaggatgagaagggaacaatcccaaaggatgtcccgaatacatcaccaaagtctgatgatcggtcatagtagccagatatttcatggtgaggagatattgtgcccaattctgaaaaatagctccattgcctccgtagatgatcaattcgtgaggatgctgggctacggcttcatccaaattgttctgaatcatcagcatgatggcggcagcctgaggagtttgagcagggtattcccagatagggcgagcataaattctataatcaggacgaaaacggtacatgtaaattcggccataatgcttcaattcttcggcaaattctttcgccagaacagcatgatgctttgctggaaaatatcgtagcgcattacgaacggctaatttcttttcttccttggttaatatatccttacgctttggagcatgatttatgttaggatcgtaaggtttgggcaaagggagttcatccggaataccctgcagaatttgattcttgaattcggtgttatccataatgataatgcaattgattcgaatcgtaaaaataaaaaaattcgttaaattacggtatatgttttacttgactcaggatgcccgataaaagtgctctagctctgaagagttgagctttaaccgtacctaagggcatattgagttcagtcgaaatttcttcataactcatttcctgaaagtaacgcatctgcaccaagcgtttataccttggtttaagttgatcgactatctcacggagaaattgattggattgttttttcatgagagcttgttcggggtcaaggcagtcatcgggtaaaccccacgaaagttgatcaaaacccgtatcatcacaattataagtataattagaagcatccagcgacaaggtattcttcttcttcctcatgaaatcgatgcaattgttggcagcaatcctaaaaagccaggtactaaatgcatagataggagtatactggtggagatttttaaatgccttgctaaaagcttccatcatcatatcttcggcatcgtccacatcgttggtcattttcagcataagataatacaacgattcgcggtaattgtccattaattttgcataagcacgctggtcgcccccatgcaaggcttgctgtatccattgataatctcgattggccttttcggtgaattctgtacttatttccattgctttcttttaacaaaacgattggtcaataccacgtaatggagtacgatcatttcgatgaattccagaattggcgaaattaacaataatttacctgtttgaagttttttcatggcattgccatagataactaactggcttattaggcgtaatatgaacattgaaactactaatggccatggaaatccgagcaataacaaaataatgaaaaagaaaaatacgaggaattgactcagggaatataagcccagcacgaatttatgccaaggtttataatgcaggcctgtagtcaggtgcctgcgtttttgtcgaatccattccctgaagtttttcttggctgacgaaaaggtaaacgaagcagagtcgagactgcaacgagtattgctcttcgtagctacctgattgatgaataaatcatcgtcgccagactcgagagaataatgcgaaataaaaccgtttacctgataaaacagcgatttcttatagctcaaattgcgacccactcccatatagggcatccctgccatggccagcgaaagatactgcaaagccgtatggaaggcattgaaacgctgaatgatattcccgagtcccttggtttcgtaaaagccactatatcccaaaacgaccgaggtttcatgggtataagccgataccatggtcttgatccactgggcggaagcgggacgacaatcggcatccgtaagcagtataatttcatgttttgccgattttataccaatgcttaatggaaatttcttgcccgagaaaaaattcaggtctttttcgatattcacaatcgaaagattagggtattctttctgaaaattcctcaacacataaaggctatcgtcatcactggtatgatttaccacaaccacctcgaaaacaggatactcctgatttaaaatataaggcagattctttttcagattttcgtattcgtttcgggcgcaaattactacagacacctccggccattgctcaataatagcaggtctataattgtggaaggccaaacgaatgaatataccccaataatagaaaagctggataataattacacttgaataaataataaagagccagaaataaggaagttggggaaggttattaaaatccataagacggagtatgatgattgctgcaaaattattcaaaagccgttgctggaaaatgaaaactccctccaaaattatgaacaatttgttgataagttacaccgcttgggaaaccgctttcgataaaaagacacgtaaacattaattttgcagccttaaaataaatgtctgttttgataaaatttaacataaaatttactgatcgtcaaacccaagcacgaactggatgtttggatacagataacggactcgtgttaactccggcgtttatgcctgtaggaacagcgggcagcgtaaaagccgttcatgcaaaagatcttttcgaagatacctctgcccttattattttaggcaacacctatcatttatatttaaggccagggctcgaggttttgaagaaagcaggaggtctgcatagattcagcagctggaatggtgctatactgaccgatagcggaggatatcaagtttatagcctggctttgcgccgtaagctcactccagaaggtgtagtttttcaatcgcatatcgacggttctcgccatctatttactcccgaaagggttattgatattcagagaattattggtgccgatattctcatggcttttgacgaatgcactccttatccatgctcctacgattatgcctcgaaaagcttgcaactaacacattcatggctcgaccgctgcttgaaaagatttaacgaaacccagcccgaataccattacgaccaaagtttatttcccattgttcaaggaagtgtttacgaagaccttcgcctgcaatcggccgaatacattgcttcgaaaaatgctccggggaatgccataggaggcttgtcggtaggcgaacctgccgaaataatgtatcaacttaccgaaaaagtctgccaaattctaccatccgataagccacgatatttgatgggagttggcactccggccaatattctcgaaagcatagcactgggcatcgacctgttcgattgtgtacttcctacccgcaacggccgcaatggacagttatttactttggagggcatcatcaacattaaaaacgaaaaatggaaaaacgattttagccaaatagaccaagaaggcacttcctttgtagatcacttgtattctcgcgcttatctgcgtcatcttttcgtaactggcgaaattctcggccccatggtcgcaagccttcataaccttcgcttttaccactggctgatggaagaatcgagaaaacatatcatgaaaggcgatttcggagaatggaaaaacctgatgatcccccgattgagtcaaagattgtaaattcgcactttgtatcccatattcatgaggaaaaattttatatcattccgactcaccgtaatcgatcgttatattatccgaaaattcctcggaacatttttctattctattggcctgctcatcattatcgtcgtcgttttcgatgtttccgaaaaaatcgatgatttcttaacccgacgagcacctctgcgagctatcatcttcgattattacctgaatttcattccctattttatcaatcttttcagttcgctcttcacctttattgccgtcattttttttacatcacgacttgccgaacgctccgaaatcattgcaatgctcagtagcggaatcaatttctttcgactgctcaaaccatatttgatctctgcaacattcctcgtcattcttacactctatttctctaatttcctcattccccatacaaacatcaagcttagagacttcgaaaaacaatatatcaagaatcctctccgaagcaaatccctcaatcttcacttacaaatcgaacccggtgtattcgtttacttcgaatcatgggacaatgccagaaaaaacggttaccgctttaccatcgaaagaatagaaaacagtaaactcagctacaaactcatgagcgatcagataaaatgggattcaataaaatcgaaatggcacatcatcaattacaccgaacgctttatcgatacagctacctttgagcaaagcctggtatttggaagccaaaaggacactactctcaatcttcgccccacagaaatcatagtggacaaggaagacatgaagataatgaatttcaatgagttgaaggcgttcatcgagagagaaaaactcaaaggaagcagtacgataaaatattacgagacggagatgcacaaacgtatagccgaacctatatcggccatcatacttacattgattggtatggcactgtcgagcagaaaagttagaggaggaacaggtatgcacctgggtatcggtattggcattacttttacttatattctgttcatgcagatcactactcaattctcggtttatggaaatatggcgcccatgctggctacctggcttcctaatatcttttttggaattatagctatctggttattgctcaaagcccctaaataataacaggtttttatcgacaactcactcccaaagaataactctttagaggaaacatcggccaaaaaactcaaatcaactttcttcctgctgtttacggatggaggcaatgataaacctgacaacatccgacttgcgttccagcataaatcgcgcgtaatcatcttcccggttacgaaagaatacacccttcaaaataggctgagcaacaaaaggaaaaatacacaaggaaaggatattaatgatgagctgggttggatcgcagtttttgattttccccgcgtcaatttctctgtatatttgattgataaaaaactgaggatttagtcctgtccctctgatcaaggcatcgatatgctggcggccatgagcaagttcgtgaagtataaatcccggaatcaatggattttcattcaaagtgtcgagatatttcgaaacaaactgttcgattttcttgaacaatggctcgtcggagtttaaaatcaccatcaccgagggaactaccttaataaaggcctctaaaaaaacttcctgaaaaagttcttccttcgaccgaaaataataatgaataagggctttatttacccctgcctcatcggcaatttcctgcatgcgggccccatcgtaaccattctctataaaaaccttgcgggcggcttccaaaatctcttcccgactcgcttttccctgtggtttcatgttttataccaatcaaaatttatatcctaaagcaaaaataatttttttgaaagaagtttccttaaaaaaacaaaaaaactgccgaatatttaaaaatttaaaactccggcagccttaaaaatatacgataaaaaattatttaacgactaataaggaatttatttcgataaaccattccgtctggcaaatttattacaatcatatatatgccctgagaaagataaggaagtgtaatagtttgctgcctgctattgctggataaggtttttgtaaaaacaacctttccgctcatatcaattacttgaagatttttactgccatatgaaatttcgttttcccattcgatgaaaagttcatgactaaaagctctgtaagaaatcttcaaaatatccgaggcgagataatcgattccggcggcctgaccatcgaaggcaaaatcaacccaaaccgaatcagcgggatgatcaaaatcataaaatacataggttatggttgatgttcccgaatgcgattttgggtcataatccacactcagcccttgagatgattctccagcagccataaccatgggttcgggaagttcaaatacatcgggtggataacaatctccccaacaaaaatacatctcagtaccctcaatcaccgacagatgaatcttgtgcatgctcacattcttcgtttctttgctgtgattggtcaatatcaaatcatattgtatcacctccgtatatgagcccacaacattcagaacagaagcagtaggaatggaatcttctgtgtttctcagactaaggtaggaaggcgaaaattctacacgaaacgaaacgctgtcgttgggattattttccacaaaaaaagtaaacttcagccgtgtatgacccagtacgccaccggcatcataatcggccgtaaaatcagtagaagtgcctccagcatcaatcacaatgccttcgggacttacgttgacaaaccatgggaaacaagctccccagcaaaaagttgcagtagaatccttggcggcaaattcctcatacttcttcacgaaaacattctttgcctcggtagaagtattgcttaccaaaattctggccaccatatattcggtgggcaatccaccccaataaagagtagcatcattggcaatcaactttccatccaaggttttaagctgaagactctgagctgataaccagcctcccaaagacatcaataatacagaaagtaaaatttttctcatcgcttattaatttgggtttgtaaaatgttggttcatgttgcaaaaatagagattttcatcactcggtctaaacattctgctgttttcccttgattgaaatatttatttcaacataatgaaagaaccaaaacggccttcatcgccagcacgagccgagaaaaacatatctgaatgacaacgcgtgcaaaggttcgccatttcgatattgcggggatttatgcctttttctatcaaaattcttcgattggcttcccataagtcgaatacgggccgagaaaatttgggatgattcagcaaaatgcctttggtatcacgaaaggcttcttccactttgcttatgacctcattccctacttcatagcaacatggcccgatggatggcccaatgcctgccaaaatatctgccgggtccgaatcgtaaacattacgaaactcttcgataacttttgcgccaattttcattacagttcctctccaaccagcgtgggcagtagctataaccttttttataggatcaaaaaataacaggggaacgcaatcagccatttgaataaccagacaaatctcctgatgttgcgttatcatgccatcgctgccaaggcaggtttttaaaacttcgttgacacccctgcccttctcttttattgaaatgcgctccaccttgtttccatgaacctgtgtggtaaacacagaactactcacatcgagtccaaatttcgagaaaaggacttttcggtttactcttactctatctttcgacaaagaaccattgaaggaaatggaaaactgctgatcttttagaaaccttcgtgtggaaacaaaatgcagaatttccccgtcaaatctcgaaagattctcgaaataacagcaaattggttcatccttatctattaacatctaaccctgaatttctgcaaaacaaagagattccggacaattttgcaaaaaaacatctttgacgaagacatttgtgctacctttatagaaatttaataaatgagctacgacacgaagattactgattttattaaatcaataaatctccgacttaaccggtaggatcaaatggaaaggataaagtcacaaactaaaaaaacccctaccgaagcaggggcataggactaagtccttcggcatatagccttgttgtgataagataagattggaataatcttcgtcaacaaagatacaacttttttattatgcaacactttcataaaaaatatttaattttaacccatcttctaaggaaaacaaaggtattaactggacaaaccacactcagaaatctaaaattaaatctaataatttaaaaattaatcaattatgagcaaaatccttggactcgatttaggagtcaatagcattggatgggcagttgtagatgatgaaaaagcgtcaattattgactgcggggttagaattttccctgaaggagtagaaaatttaggacagggggaaaaagagacttcaaaaaatgcacagagaagagaaaaaagacaactcaggagacattattacagaaaaagattaagtaagatcaaattacttgagacattgatccctcttaaaatgtgccccttatcattaaactcattgaaaaaatggaaaaattggaacaatgaattgaaatcggatggaagaaagtttccaaatgatcctgagtttatagaatggttgaaaatgaatccttacgcattgcggaaaaaagcattagaagaagatttaagcttagaacaactcggaagaatcttttatcattttattcagagaaggggtttttacagtagtcgaaaaggaaaagattcaggaaagatttatcaaggggaaaataataccattggtatactcgagaccgagaaagaaattggttataataaaactcttggaactactttgtatgaaatgattcttcccgagcatcagacttatatctacagaactgatgagaatagacgtccgctaagagcccgtaaccgatataccttaagagaaatgtatgttaaggaatttcatgctatttgggaaaaacaagctccacatttaggattaaatgataaaactgttacgatattcaaatcctttcatctttctgggaataatgattctgaaagaaataagcaaagaatcaataaaatttacttgcaatatggcattgagaatgttactattactgggaaaaccataaaagttgcacaacagatctccttaaaaactctttttgggggacgaatcgaaattaatgacgaaactcatgaaatattatatagaagtcaggatagtcttttattctggcaacggccattaagatcacaaaaacatcttttgtcaaaatgtactttcgaaaagagaataatgtttgataaaactaccaacaaatggatagaaaccgggcctaccccttgtccaatttctcatcctgatttcgaactatatagagcatggcaattgataaataatatacgatacggtcgaaaggaacaaccgcttgatgctagtcagcggcaaactgttttaaatgtaatatcatatcaggataaagttttcgactttaaagttattattgatgccttaaagctgcaaaatgaatatttcaattacgatgcagaccaaaaagtttctggatgtcctactataaaaaaattaaaaagtttgtttcctactgagatatgggtgcagaataaacatgaaatatggcatgatttcatgttttttgaagatgaagaacttttgacccaacggctcataaaaaaataccatttcactgaagaaaaagcccaaaaaagcgcaaaaattacacttgaagatgggtatgcatcaatctcattaaaagctattcataacatactgcctttccttgaaaagggatttatttttcaacaagccgtcttgcttggagggatcaaaaacacttttggcagcagatgggaatattttaaagattatcatagtgatatagaacaatttatcaaagatctttgcaatggcaaaaaatatcatgaaggcgaaattattcagaatataaaagaatacctttcgagcactgttaataattttggatttaaccctaatgataaagcctttttaaaattataccatcccagtcgggaggtaggtccagagaaaaagggagattacatttcacctgtcgagaatttaagaaatccacttgtccaaattgggctaaatgaaatgcgccggctcgtaaattatctactgaaaaaatatcgtagtatgcccgaatttgggccagatttctgttttgatcgcatccatgttgaggttggacgcgatttgaaaaacaataaaaaaaggcgacaggaaatcagaaaagaaaatgcaattaatgaacaaaaaaataaggaagctcgcgaaagaatcattgaagcaggcttaaaaccttcacgtgataacatcattaagtatctactttatagtgaaatcgaacagaaaaatggtatcgtaatctgtccctatacgggtaaaaccattcgcctttccgatttgcttgggcctcataattttttccaaattgaacatattataccctattccgttagtttagacgattcattcggaaataaaactctatgtgaagccaatttcaatcgttcgaaaggtgaattgacaccttatcagttttatttaaaaaacagtagtaaatctttatggaatgctgattcatgggaagaaatcgagcaaagagtcttccaaatcttgccctataaaaaagcaaggcgttttacttcaaaaaaacccgctatgcttgacgattttattcaacgacaactcaacgacacacgttatatcagcaaaaaatcagtacaaatcttaagggaaatatgcgacgacgttaggtcattccctggccaacttatagccgatttacgccgattatggggactaaacgatattcttagtgaacctataaccgatattcccttgaatgatttaaatataaacgaaagcgaaccaactattcattatcttatcgttgatgaaaacaatcatgttaaaaaagccatcccaaaaataaatttcaaacccataccaatggataatgagttagccatacctggtgaaataaaaaaagagactgggaataaattctattttgaatcagatagtaaatactatgcctcactaaaaattcctgcaaatggctttgaaactgggaaatattgggcctttataaaagctcaggctgcacaggaattcattccaaggtttactcctcaaccccaaattagcgaaaatgtaataattattaagggtaatctcaagaaaaaaagattcattaacgaaagtcatggaattaatttcaatacgaacaaaataatagaagatggatattattgggctataattcctgtaatcaaagctgaaatcaaacaaaatgatattaatgataatagaaagaatgaaaataaaataagcatccaaggtagagtttcaaatcaaaaatttatatcatccatttattcctgtgaagctcaactaatcaacgggttttatactgcattattagactttgatgtaaataatgctgattttttaccggcacttaatttacctcgtcctcctgaaaactattatacactaaatggaactgtggatagccagggcatattttgtcccgatatggactacaattggaaattaaaagccgatgttgcaccagggcgttactttatttattttaaaatacaggaaatcattaattttcaacctattgaaaatcctaagcccattatcgataaaaataataacgaaaaaataattgaaagtttgattagggtggataccgagacgggagaaattattattgatccgaagaaaaatcgtgaagaccagcgtcatcatgccattgacgccattgtaattgcttctgctactacaagttactatcaaaaactatctacttattttggtaatctcaaaaataaacaacgtaatttggctccaaaacccaaattcgaacaacctaacccacactttcaaaatgctgtaaaagaagcaatttcaaaaattttggtatcttatcgaactaactatagagttttggtgcctgtttataagagaattcgtaaaaatcatgatacttatgtttccaaaggatattcggtaaaagggcaacttcacaaagatacattctatggaggttatattcttgaccagggagaaggtaaaatagtatcggctgctaaatatctaccaggtattaaaccacaacaatatcatgtaagatgtaatattaccgaaataaaagatcataaacacgtagcgaaaatcgttgatactactattaagaagctaattgaaaaccgacttcaaaatgtatttaatatcgatatttcaaaaccttataatatcccaaatggcttctttttcgataaggataaaaatcctgctatacggcttccaaatcgcaaaggaggtgatcctgttcctgtatatacagttagaatttttgaatataagggaaatgctgttaaattaaagccaaatataaattgctatgttgatcccagaaataatcatcattgcattatttacaaagatgtagaagggaatctaaaatttgagatggtcaagttttgggatgctgtaaatcgcttgcgtcacaaacagccattatatcagcttccgcctgatggttcacaaataattgccaccgtgcaggaaaacgatatgttcatatttaattatctttatgcctccgatatatccgaagatatgaaaatcccctatgaagagttaagcaaatatttataccgtgtgcagaagatatcatcaacagaaggaggaattttcctgacattcaggcatcacttggcttccactattaagaatcccgaggaagaattaagaatacaaagtttaagaagttgggaaaggcaccaacccataaaagtaaaaataaatatggatggtactgttaataagattattaaatgataaagcgcactctttgcatacagaatgcagggcatttaaacttgaataataatcaattagtttttaccgataaggaaggaattaaaaaaactgcacctatcgaagacataggctatttgataatcgaaaatcgttatgtaacgataagcgtgcaacttattacggctttaaattcgaataacgcggcaattattttttgcgacgaaaaatatttgcctaccggcatgttgctaaaccttgacagtaatcaggtccaaaccgaaatttttcatactcagatagaagcttccgaacctctaaaaaaaaatttatggaaaaatgtcattacttgcaaaatccgaaaccaggctgccttattacataaattaaataaaaatgatcagcctttaaagatttttgccaatgaagttatgagtggcgatacgagcaatagggaagctttagcggcaaaatattactggcatgagctgtggggatcgggttttatacgcgaccgttttgggccaccacccaattcattgctaaattatggttacattatcattcgttcagcaatggctcgagcattggctggttccggccttctttcaactcttggaatattccatagcaatcgctataacgcattttgtcttgccgacgatatgatggaaccctatcgagtatatgtagatgaattggtttatgaggtttggtataaaacagataaacctgaacccgataaagaatttaaacagatggctattcaattgttagcacgagatgtaaatttggaaaagactacgaggccgcttatgttagccatgcagcaatcgagtgcctcacttgccagatgctatggtggaaaacaaaggaagctgtcattccctgattttaaatgatatacattttagagatattatttgaacgacttaatgcatatcaggttatgtggttatttgtatttttcgatttacccgtaggaactaaaaaagaaataaaagaagctacacgctttcgcaaaaatctggaaaaagatggcttcaatatgatgcaatattcggtatatacacggcactgcccaagccgtgagaatgccgaggttcatgtaaagcgggtgaaaagcataatcccggtaaaaggtcaagtaagtatcttgatggttaccgacaagcaatatggtgaaatttataattttttcggtaaaacggaaaaatttttacctgaaggaccaaggcaacttgaatttttttaattttgccaaacgttcattaacaaaactgaaaaaccaaaggttgataaatgttttcttaagagtttatgcaatttttttatcctaaattgatcggaaaagccttgattttacttggtttttggctaagtctgttgtggtttgataagaaattggaatagaagacatttaaggtactgccttatacgtcaaaggttctgttgtggtttgataagaaattggaatagaagacatttgaagaggaatacaccttaataggcttaatgttgtggtttgataagaaattggaatagaagacattgagaagctaagaaatcattatcgtgcagcggttgtggtttgataagaaattggaatagaagacattacttagccccgtgaagcacccatcctgatagttgtggtttgataagaaattggaatagaagacattgaaaacgaagatcaagttatagttttagaagttgtggtttgataagaaattggaatagaagacattaaaaaatactgaaatacctttttaaaatatgttgtggtttgataagaaattggaatagaagacattcttttagtttatataaatgtcctgcaaagagttgtggtttgataagaaattggaatagaagacattaaaaaaccttttttatttaatttttcgctgttgtggtttgataagaaattggaatagaagacattaattaatttatatagcaaaatttaatggacgttgtggtttgataagaaattggaatagaagacattaatatcagttaaaatgtcatttaatttttcgttgtggtttgataagaaattggaatagaagacattaatatgttaaatttgtaggtaaagcgcccgttgtggtttgataagaaattggaatagaagacattttaatggctataaaatctcgtataacgtaggttgtggtttgataagaaattggaatagaagacattattttttgcggattacaatataaagcctgtgttgtggtttgataagaaattggaatagaagacattaaatatgttaaatttgtaggtaaagcgcccgttgtggtttgataagaaattggaatagaagacattcacacctatccctgtcccacataatataatgttgtggtttgataagaaattggaatagaagacattaacacttatataccatctaaagacaactctgttgtggtttgataagaaattggaatagaagacattatggaatgaccttggcgaatacgtagaggtgttgtggtttgataagaaattggaatagaagacattaccaattgaattattataaaagtatgcgccgttgtggtttgataagaaattggaatagaagacattaacggaggaaaccggcgactatgctacgatagttgtggtttgataagaaattggaatagaagacattaacggaggaaaccggcgactatgctacgatagttgtggtttgataagaaattggaatagaagacattttcctcaatagcatcagcaaacaacggatagttgtggtttgataagaaattggaatagaagacattatcacaattttcagatatttctgatttattgttgtggtttgataagaaattggaatagaagacattactgatgctgtcgtagatatagcgctaaatgttgtggtttgataagaaattggaatagaagacattcatagcatctacccactgctcatatttctttgttgtggtttgataagaaattggaatagaagacattaagctctttttcgaacccttcatccattaagttgtggtttgataagaaattggaatagaagacattttagctcccgcatttctgctaccggtgtatgttgtggtttgataagaaattggaatagaagacattataagcacctgtaagtccctcggcaacactgttgtggtttgataagaaattggaatagaagacattcaaggtggggcaaggtcgggcaaaacttatgttgtggtttgataagaaattggaatagaagacattagaagccgcagaaacgcttaatgaacaactgttgtggtttgataagaaattggaatagaagacattttgttgtatccagcacttcgtcctcctccagttgtggtttgataagaaattggaatagaagacatttgcctgcgccaaaaactgattccatgattggttgtggtttgataagaaattggaatagaagacattttatgtcacgcaaaaaaggaactcttctaagttgtggtttgataagaaattggaatagaagacatttgggattttttctctgcgttccaggctctcgttgtggtttgataagaaattggaatagaagacattactcggataaataaagtcgtcatcgatcgtagttgtggtttgataagaaattggaatagaagacattactttatagtccgtttatgaaccgggacgtgttgtggtttgataagaaattggaatagaagacattcgaaatttgacaaggaagaaaaagcggtttgttgtggtttgataagaaattggaatagaagacattgaggtacacgaatggttggtggagcatgcggttgtggtttgataagaaattggaatagaagacatttatcggtgtacggacactttgcgataaagtgttgtggtttgataagaaattggaatagaagacattctgcgacacgattgggctttcgtagagagcgttgtggtttgataagaaattggaatagaagacattaaatacgagcagtgggtcgatgctatgaccgttgtggtttgataagaaattggaatagaagacattttgtgtcactcctttttcccactgtgcaccgttgtggtttgataagaaattggaatagaagacattttcggtgcaagattactttttattgggaccgttgtggtttgataagaaattggaatagaagacattggctttctgtgggtatgtaatcaccgccgggttgtggtttgataagaaattggaatagaagacatttgaaaaaacggtagagttattttactgtcagttgtggtttgataagaaattggaatagaagacattagcctccaccacctcctcctccacctccacgttgtggtttgataagaaattggaatagaagacattcgctcctcctttctcggctggtgcttttgcgttgtggtttgataagaaattggaatagaagacattttctgaattgtccgcaatttcgtcgaatctgttgtggtttgataagaaattggaatagaagacattacgaccttgcatgactatcatttcgatgccgttgtggtttgataagaaattggaatagaagacattaatgcgctcttgtagaggtgtcgaccatgcgttgtggtttgataagaaattggaatagaagacattgggaattcgctaaaagaatggagacagaccgttgtggtttgataagaaattggaatagaagactttcgacgaacgaaaggtaaaaaagcaggatgtcgtggtaagaaagcagcagaattctataaatgcagctttaaagagaaagttacttcgggaaatcttcgtaaaattctttcttctttcgtttgaattcatacttttaccaataatttcaatgagtgtttgacaaactctaactaaaaaactaaaccccatgacttttcaattcaaaattaagctccaacgcatcactaaaccgtcagtttggcgaagaataatagttccagctgcaattaccttcgatgattttcacaacatcattcaagatgcattcggttggtcgaattctcatctgtatgccttttcccccttgggttatcgttcgagccctcaaatagaagctgtacccgaagaagatgaagagacatctgactctttcttctctcttaacctttttttcaacgctgtcaattcacttaatgcagctaaaacaaaacttaccgacattttcaatcgcgaaggacaaatttttacctacatttatgattttggcgacgactgggtgcataaaattactctggagaaaatcgataagttgcatgattcttcatcggcaattctgcttggcggcaaaggtgcatgcccacctgaagattgtggtggcacttacagcttcgaagagttcaaattcattatggccgacaaatccgatcctcaacgttcggaattattggaatggctcgatttaggtccgaatgacgaatgggatcccaatgattatgatctcgtccttgaagctaattttttcaaccaaatctataaagataagttcaaaaaataaaagttatacgaggagatatttagttcaatattcgaacgacacttccatgatttcatgggctaatcatgcccagccactaaatttaatgttgttcccgaatttactcattctgcctccatttcggcgatgatactcatggaagatgatttttcccatcgcacggatggtttacaatagttccatctcttcttttcgttccctatgcttattgccaatccgactgtgtgccaattcttccaattgatccatatcatcactcccgtcaacaatactgtcaattatcttttgaatacttttcgacgatatattgcttacatagctggtaatacgaatgccacacatttccaaggcagattccatttcctgcagaacacttgtgatacacttttgcaatatgccttattttcgtgtataagttcgcaattccctgatatgcttatccggaaccaaacttgggttaaaacatacctctctgtaaaaacacgacaatccattgcacatcttttacatcgctcgttctatctggcatttgttttatccgatatggattcactaaaaagcagctcaaatcccatttcttcgaataggttccctagtggtatcccataaattcatggactctccatggcaattctgttcgctttcatctctctcaaatacttgcccatagaatgccacaccttagggtcgaaaatttcttcacttcaaaagtgttcttcatgttgtttattcctcaaaatattgtaattttgtacaagtcaagaccgactgctatcacatgtactttccgattaaaagttaaacatgaagtcgaccaattgagatatgcctttaaggctaagctcgttcgaacttacacattagcagcggtcttgattctttcatattcttattcgtcaacatattcatgggtaattatcttatcaattcgtaaaactttctgtatgattatccgaatagacagaggttcgctcgagtgtattagattttggctgtttcgttttatttcattcgaagatggtcaaatttgattggaatcgatagtgtatgtttgtgggtttgactaaaaattcgatcgagacagatgtacgaacataaaaaccataaattgagcaaatatctgaaagtggctggcctcatcacaggaatcgttggtttattatttttcctggtattttatttaataaagagggttacgtttaccgaaggcacaaaacttccccatatcattgatttgatgttattagtgggaatggctttcattggttgtatcattggtttttggcacactggtgaagcgggcatcattcttattttttcggccgtaatattttttcttcaatttatgggaggtcatcttagtctttctttcggtggatttgtgtatgccttacctttcattctttcgggagggttgttcctgagttcttattttgttgccaacagattgaaaaacaagaaataaaatcagggacagggggaagattctgcgaataattttcgattcctatgaaggcagtttacgcctcgatgccaccttatacattaaaccggatatgcaggatatcgccatcttgaaccacataattctttccttcgatgaatagtttaccggcctcacggcatgcgtgttcagagcccaatcgaataaaatcgtcgtatttcatcacttcagctcttatgaatccgcgttcgaggtcggaatgaatgacgccagcagcttctggtgctgtaattcctttgcgaatggtccatgctcttacttccttgggtcctgccgtgaaaaaagtctggagattcagcaggcgatatgccgattgtatcaatttattaacgccaggttcattcaagcctacctcctctaaaaatgcccgacgatcggccgggtcatccaattcggcaatttctgattccaattttcctgcaatagtcaatatttcaacattctgatcgtcgaagaaatctcttacggcattactgtaagcatttcccgtaatagcagaatcgtcatcgacattacacacatacatgacgggttttgcactcaagagaaaaaggtcggttaaataacgttggaattcttttcctacaggagctgtgcgtgcaggaagaaaatcctccaaatgatgtttatatacttcgagcacttcgataccagttcgagcctccctgtcgccgctctttgcctgtttctcgagccgctgtagttttttctcgatcgattcgaggtcacgaacgataagttcgagttctaccatctcgatgtctcttacagggtcgatgctgctttccacatgaggcaccgaaggttcatcgaaacaacgcaaaacatgaatcaaagcatcggtatttcgtatatcggccagaaatttactccctacaccttcgcctttaccagctcctctcaccaaacccggtatatctacgatatctaccgtggtaggaacaatcctggccgattttatcaaagcgtcgatcttttgtaaacgatcatcgggaacgtaaatcattcctaaattacttttacttccgcctccccctgcccgagctcttgaactcgacaaacaattgaaaagagtagttttcccaactccagccaaacctataattccacactgtaaacccatgactgttcgattcgattattcatagcaaaattacaaaacaaccgtgatagcaatcgaatggatgtaatccaaaattccttaattgacactcgaggcggagtaaaaaccaaagtcatcgatttttgaataattttgcaaaatcaatcaaaatcctcttattatgaaaaggtttttgtttttctgtatttgtgcgtgtctattcacaagttttacgcttactggttgtatagatgaagtaaaagatgacacccctccgtttatcaccgttgtaggatcaaatccggtttatatccgactcaacagcccattttatgattcaggtgttattatcaccgataactatggggttttcaagatgtggattgatacctccgaattgaacattcacaaggcgggccgatacaaggtttattactttgccgaagatttcaataataatgtagccaatgccgaaagaacggtcattgttcgcatcgaaggggcaaatttaaccggcaaatggtcgggtgaacgaatttcgccttatcctggaggcatttcggttctgttcactgattcgttgtataatcctggaacccgtcatatttacttcgaacaaatcggaggcctctacccttctctcatcaaggccgatttgttgggatacttgggagatacacttggattcagcaaacaaattattgagattaccgatacttctaccacgtattttttagcttctggaacgattcaacacgatggaaaatcctttcaacttttttaccatttgataaccgaaacagccacttcactcgacacttcgtatataagccaactgatctatcacaaataaataataagcccaggtatttttgaatgaaaattaaattcgtctggaaaaatggcacccatcttattgtagcctatcgtttactcatagctcttattgttttttccctttcgcgtttatgtctttactggtttcagcatgatcttttcccctccgaagccattccttctatttttacaatatggcggttagggttgcgattcgatctttcggctgtaatcatgctgaatttgccttatattttccttgcaaccctccccttcccttttcgcaatcataagtactaccgaaattttagttcctttttattttatttcgcaaacgccattggcatccttctcaatatcatcgattcggcttactatccatttacgctgaaaagacttacatgggatgttactggatttttaaaagccacaaacaacatgggcttgctccttccaaaatttttatccgacttctggatttatctgctggttttctttgttctgttttctatttttgttttgctgaccacaagactaaggtacgaaaaaaaactcttttaccaaagcaaatggaacttttttatctggaatttgtttttaatgattgtatggggaggaatagccattgtaggaataagaggaggttttcagcgcaggccgatctatttggtgaatgcagcagaaatgatttctcccgattatgatgctcttatattgaatactccttttacaatcatcaaaacctatggaaaaccttcgctgaaagaagtggtttattatgaagatgaagcagaagccgccagcatattccagcccctaaaaaattattatcgagctacgcaacctacaacgaaattcaatgtggtcataattattatggagagtttttcacttgagcattccgcactgatgaatccgcagctttacaaggattccacggaaggttacacacccgtgctggattccctcatgaggcatggtcttacttttcgagcctatgctaacggaaagcgttccatcgaggctattcctgccatttgt

SEQ ID NO: 3334 - DNA, 9006 bp, synthetic construct
  variation 3641..3642: note = note, n is a, c, g, or t
  variation 6419..6442: note = note, n is a, c, g, or t
  variation 3022..3023: note = note, n is a, c, g, or t
  misc_feature 1..9006: note = Synthetic
  source 1..9006: mol_type = other DNA
  variation 268..344: note = note, n is a, c, g, or t
  variation 2555..2556: note = note, n is a, c, g, or t
  variation 8773..8774: note = note, n is a, c, g, or t
  variation 4445..4446: note = note, n is a, c, g, or t
aggcttgtcggtaggcgaacctgccgaaataatgtatcaacttaccgaaaaagtctgccaaattctaccatccgataagccacgatatttgatgggagttggcactccggccaatattctcgaaagcatagcactgggcatcgacctgttcgattgtgtacttcctacccgcaacggccgcaatggacagttatttactttggagggcatcatcaacattaaaaacgaaaaatggaaaaacgattttagccaaatagaccaagaaggnnnnnnnnnnnnnnnnnnnnnnnnnnnnnnnnnnnnnnnnnnnnnnnnnnnnnnnnnnnnnnnnnnnnnnnnnnnnncttatctgcgtcatcttttcgtaactggcgaaattctcggccccatggtcgcaagccttcataaccttcgcttttaccactggctgatggaagaatcgagaaaacatatcatgaaaggcgatttcggagaatggaaaaacctgatgatcccccgattgagtcaaagattgtaaattcgcactttgtatcccatattcatgaggaaaaattttatatcattccgactcaccgtaatcgatcgttatattatccgaaaattcctcggaacatttttctagtctattggcctgctcatcattatcgtcgtcgttttcgatgtttccgaaaaaatcgatgatttcttaacccgacgagcacctctgcgagctatcatcttcgattattacctgaatttcattccctattttatcaatcttttcagttcgctcttcacctttattgccgtcattttttttacatcacgacttgccgaacgctccgaaatcattgcaatgctcagtagcggaatcaatttctttcgactgctcaaaccatatttgatctctgcaacattcctcgtcattcttacactctatttctctaatttcctcattccccatacaaacatcaagcttagagacttcgaaaaacaatatatcaagaatcctctccgaagcaaatccctcaatcttcacttacaaatcgaacccggtgtattcgtttacttcgaatcatgggacaatgccagaaaaaacggttaccgctttaccatcgaaagaatagaaaacagtaaactcagctacaaactcatgagcgatcagataaaatgggattcaataaaatcgaaatggcacatcatcaattacaccgaacgctttatcgatacagctacctttgagcaaagcctggtatttggaagccaaaaggacactactctcaatcttcgccccacagaaatcatagtggacaaggaagacatgaagataatgaatttcaatgagttgaaggcgttcatcgagagagaaaaactcaaaggaagcagtacgataaaatattacgagacggagatgcacaaacgtatagccgaacctatatcggccatcatacttacattgattggtatggcactgtcgagcagaaaagttagaggaggaacaggtatgcacctgggtatcggtattggcattacttttacttatattctgttcatgcagatcactactcaattctcggtttatggaaatatggcgcccatgctggctacctggcttcctaatatcttttttggaattatagctatctggttattgctcaaagcccctaaataataacaggtttttatcgacaactcactcccaaagaataactctttagaggaaacatcggccaaaaaactcaaatcaactttcttcctgctgtttacggatggaggcaatgataaacctgacaacatccgacttgcgttccagcataaatcgcgcgtaatcatcttcccggttacgaaagaatacacccttcaaaataggctgagcaacaaaaggaaaaatacacaaggaaaggatattaatgatgagctgggttggatcgcagtttttgattttccccgcgtcaatttctctgtatatttgattgataaaaaactgaggatttagtcctgtccctctgatcaaggcatcgatatgctggcggccatgagcaagttcgtgaagtataaatcccggaatcaatggattttcattcaaagtgtcgagatatttcgaaacaaactgttcgattttcttgaacaatggctcgtcggagtttaaaatcaccatcaccgagggaactaccttaataaaggcctctaaaaaaacttcctgaaaaagttcttccttcgaccgaaaataataatgaataagggctttatttacccctgcctcatcggcaatttcctgcatgcgggccccatcgtaaccattctctataaaaaccttgcgggcggcttccaaaatctcttcccgactcgcttttccctgtggtttcatgttttataccaatcaaaatttatatcctaaagcaaaaataatttttttgaaagaagtttccttaaaaaaacaaaaaaactgccgaatatttaaaaatttaaaactccggcagccttaaaaatatacgataaaaaattatttaacgactaataaggaatttatttcgataaaccattccgtctggcaaatttattacaatcatatatannccctgagaaagataaggaagtgtaatagtttgctgcctgctattgctggataaggtttttgtaaaaacaacctttccgctcatatcaattacttgaagatttttactgccatatgaaatttcgttttcccattcgatgaaaagttcatgactaaaagctctgtaagaaatcttcaaaatatccgaggcgagataatcgattccggcggcctgaccatcgaaggcaaaatcaacccaaaccgaatcagcgggatgatcaaaatcataaaatacataggttatggttgatgttcccgaatgcgattttgggtcataatccacactcagcccttgagatgattctccagcagccataaccatgggttcgggaagttcaaatacatcgggtggataacaatctccccaacaaaaatacatctcagtaccctcaatcaccgacagatgaatcttgtgcatgctcacattcnntgctgtgattggtcaatatcaaatcatattgtatcacctccgtatatgagcccacaacattcagaacagaagcagtaggaatggaatcttctgtgtttctcagactaaggtaggaaggcgaaaattctacacgaaacgaaacgctgtcgttgggattattttccacaaaaaaagtaaacttcagccgtgtatgacccagtacgccaccggcatcataatcggccgtaaaatcagtagaagtgcctccagcatcaatcacaatgccttcgggacttacgttgacaaaccatgggaaacaagctccccagcaaaaagttgcagtagaatccttggcggcaaattcctcatacttcttcacgaaaacattctttgcctcggtagaagtattgcttaccaaaattctggccaccatatattcggtgggcaatccaccccaataaagagtagcatcattggcaatcaactttccatccaaggttttaagctgaagactctgagctgataaccagcctcccaaagacatcaataatacagaaagtaaaatttttctcatcgcttattaatttgggtttgtaaaatgttggttcatgttgcaaaaatagagattttcatcactgnnccttgattgaaatatttatttcaacataatgaaagaaccaaaacggccttcatcgccagcacgagccgagaaaaacatatctgaatgacaacgcgtgcaaaggttcgccatttcgatattgcggggatttatgcctttttctatcaaaattcttcgattggcttcccataagtcgaatacgggccgagaaaatttgggatgattcagcaaaatgcctttggtatcacgaaaggcttcttccactttgcttatgacctcattccctacttcatagcaacatggcccgatggatggcccaatgcctgccaaaatatctgccgggtccgaatcgtaaacattacgaaactcttcgataacttttgcgccaattttcattacagttcctctccaaccagcgtgggcagtagctataaccttttttataggatcaaaaaataacaggggaacgcaatcagccatttgaataaccagacaaatctcctgatgttgcgttatcatgccatcgctgccaaggcaggtttttaaaacttcgttgacacccctgcccttctcttttattgaaatgcgctccaccttgtttccatgaacctgtgtggtaaacacagaactactcacatcgagtccaaatttcgagaaaaggacttttcggtttactcttactctatctttcgacaaagaaccattgaaggaaatggaaaactgctgatcttttagaaaccttcgtgtggaaacaaaatgcagaatttccccgtcaaatctcgaaagattctcgaaataacagcaaattggttcatccttatctnnttatctattaacatctaaccctgaatttctgcaaaacaaagagattccggacaattttgcaaaaaaacatctttgacgaagacatttgtgctacctttatagaaatttaataaatgagctacgacacgaagattactgattttattaaatcaataaatctccgacttaaccggtaggatcaaatggaaaggataaagtcacaaactaaaaaaacccctaccgaagcaggggcataggactaagtccttcggcatatagccttgttgtgataagataagattggaataatcttcgtcaacaaagatacaacttttttattatgcaacactttcataaaaaatatttaattttaacccatcttctaaggaaaacaaaggtattaactggacaaaccacactcagaaatctaaaattaaatctaataatttaaaaattaatcaattatgagcaaaatccttggactcgatttaggagtcaatagcattggatgggcagttgtagatgatgaaaaagcgtcaattattgactgcggggttagaattttccctgaaggagtagaaaatttaggacagggggaaaaagagacttcaaaaaatgcacagagaagagaaaaaagacaactcaggagacattattacagaaaaagattaagtaagatcaaattacttgagacattgatccctcttaaaatgtgccccttatcattaaactcattgaaaaaatggaaaaattggaacaatgaattgaaatcggatggaagaaagtttccaaatgatcctgagtttatagaatggttgaaaatgaatccttacgcattgcggaaaaaagcattagaagaagatttaagcttagaacaactcggaagaatcttttatcattttattcagagaaggggtttttacagtagtcgaaaaggaaaagattcaggaaagatttatcaaggggaaaataataccattggtatactcgagaccgagaaagaaattggttataataaaactcttggaactactttgtatgaaatgattcttcccgagcatcagacttatatctacagaactgatgagaatagacgtccgctaagagcccgtaaccgatataccttaagagaaatgtatgttaaggaatttcatgctatttgggaaaaacaagctccacatttaggattaaatgataaaactgttacgatattcaaatcctttcatctttctgggaataatgattctgaaagaaataagcaaagaatcaataaaatttacttgcaatatggcattgagaatgttactattactgggaaaaccataaaagttgcacaacagatctccttaaaaactctttttgggggacgaatcgaaattaatgacgaaactcatgaaatattatatagaagtcaggatagtcttttattctggcaacggccattaagatcacaaaaacatcttttgtcaaaatgtactttcgaaaagagaataatgtttgataaaactaccaacaaatggatagaaaccgggcctaccccttgtccaatttctcatcctgatttcgaactatatagagcatggcaattgataaataatatacgatacggtcgaaaggaacaaccgcttgatgctagtcagcggcaaactgttttaaatgtaatatcatatcaggataaagttttcgactttaaagttattattgatgccttaaagctgcaaaatgaatatttcaattacgatgcagaccaaaaagtttctggatgtcctactataaaaaaattaaaaagtttgtttcctactgaaatatgggtgcagaataaacatgaaatatggcatgatttcatgttttttgaagatgaagaacttttgacccaacggctcataaaaaaataccatttcactgaagaaaaagcccaaaaaagcgcaaaaattacacttgaagatgggtatgcatcaatctcattaaaagctattcataacatactgcctttnnnnnnnnnnnnnnnnnnnnnnnnagggatcaaaaacacttttggcagcagatgggaatattttaaagattatcatagtgatatagaacaatttatcaaagatctttgcaatggcaaaaaatatcatgaaggcgaaattattcagaatataaaagaatacctttcgagcactgttaataattttggatttaaccctaatgataaagcctttttaaaattataccatcccagtcgggaggtaggtccagagaaaaagggagattacatttcacctgtcgagaatttaagaaatccacttgtccaaattgggctaaatgaaatgcgccggctcgtaaattatctactgaaaaaatatcgtagtatgcccgaatttgggccagatttctgttttgatcgcatccatgttgaggttggacgcgatttgaaaaacaataaaaaaaggcgacaggaaatcagaaaagaaaatgcaattaatgaacaaaaaaataaggaagctcgcgaaagaatcattgaagcaggcttaaaaccttcacgtgataacatcattaagtatctactttatagtgaaatcgaacagaaaaatggtatcgtaatctgtccctatacgggtaaaaccattcgcctttccgatttgcttgggcctcataattttttccaaattgaacatattataccctattccgttagtttagacgattcattcggaaataaaactctatgtgaagccaatttcaatcgttcgaaaggtgaattgacaccttatcagttttatttaaaaaacagtagtaaatctttatggaatgctgattcatgggaagaaatcgagcaaagagtcttccaaatcttgccctataaaaaagcaaggcgttttacttcaaaaaaacccgctatgcttgacgattttattcaacgacaactcaacgacacacgttatatcagcaaaaaatcagtacaaatcttaagggaaatatgcgacgacgttaggtcattccctggccaacttatagccgatttacgccgattatggggactaaacgatattcttagtgaacctataaccgatattcccttgaatgatttaaatataaacgaaagcgaaccaactattcattatcttatcgttgatgaaaacaatcatgttaaaaaagccatcccaaaaataaatttcaaacccataccaatggataatgagttagccatacctggtgaaataaaaaaagagactgggaataaattctattttgaatcagatagtaaatactatgcctcactaaaaattcctgcaaatggctttgaaactgggaaatattgggcctttataaaagctcaggctgcacaggaattcattccaaggtttactcctcaaccccaaattagcgaaaatgtaataattattaagggtaatctcaagaaaaaaagattcattaacgaaagtcatggaattaatttcaatacgaacaaaataatagaagatggatattattgggctataattcctgtaatcaaagctgaaatcaaacaaaatgatattaatgataatagaaagaatgaaaataaaataagcatccaaggtagagtttcaaatcaaaaatttatatcatccatttattcctgtgaagctcaactaatcaacgggttttatactgcattattagactttgatgtaaataatgctgattttttaccggcacttaatttacctcgtcctcctgaaaactattatacactaaatggaactgtggatagccagggcatattttgtcccgatatggactacaattggaaattaaaagccgatgttgcaccagggcgttactttatttattttaaaatacaggaaatcattaattttcaacctattgaaaatcctaagcccattatcgataaaaataataacgaaaaaataattgaaagtttgattagggtggataccgagacgggagaaattattattgatccgaagaaaaatcgtgaagaccagcgtcatcatgccattgacgccattgtaattgcttctgctactacaagttactatcaaaaactatctacttattttggtaatctcaaaaataaacaacgtaatttggctccaaaacccaaattcgaacaacctaacccacactttcaaaatgctgtaaaagaagcaatttcaaaaattttggtatcttatcgaactaactatagagttttggtgcctgtttataagagaattcgtaaaaatcatgatacttatgtttccaaaggatattcggtaaaagggcaacttcacaaagatacattctatggaggttatattcttgaccagggagaaggtaaaatagtatcggctgctaaatatctgccaggtattaaagnnagaagctaattgaaaaccgacttcaaaatgtatttaatatcgatatttcaaaaccttataatatcccaaatggcttctttttcgataaggataaaaatcctgctatacggcttccaaatcgcaaaggaggtgatcctgttcctgtatatacagttagaatttttgaatataagggaaatgctgttaaattaaagccaaatataaattgctatgttgatcccagaaataatca

SEQ ID NO: 3335 - DNA, 23147 bp, synthetic construct
  misc_feature 1..23147: note = Synthetic
  source 1..23147: mol_type = other DNA
cgtcctcgacgagccccgccgcgtggggcatgttgtgcacgacggtttcgacaaattgaggcacaatatcacttgcaacaagacaccgaaatcctgcgaacgctaatccgagatcaagccctccgccaccgcagaacaatccgatatgactgaattctgccgactcaagtaatcctggagtaaaagcagacaatcttctcaggaaaggatttgattgctgctcactgacttcgatgtggggtactgcgcgtcgggcaggcaacggctcaagatcgaggagccgttgttggacgtaaccggcttgtgtgcgaccaagcaacagcgatctcccttcaggcgccacctttggcaagcactcacgctgcccgaccattccagactactgagcgtcgccacctggccagcgcgggtcaagcgaaggacgggtctgtcgttacactgaccaagacgaaaccaaacaacgacctgagtcgcatcattatagctcgtgcgtgtgtaggtcgcccgcgctacccccaccgattcgcttcggcatcccgtagccctgcagcttgatgcccggaactgccgggttgctcgggaggggcacgcccacctcgccggcaagggtgcgaagggtgatctggtcgggctggggtgtgggcacaaccacggttgtggtcaagtcgaagcccttgcgtacgaaccgcttgtgcgggcgcagatagcagaccaggtagaggtcgccccactggcacgcaaccgggtcccagcgtccctgtccggcgaccttgagccgcacctgatcgttgaccccggcaggtactgccacgcgaagccgccgcggcatggtggtccgccctgtgccgccgcagaccgagcacgcctggtcgggagccggggcgccgccgtcgcaggcatcgcagacagcgtcgtccctcgggaagacgaactcgcgacctgtgccctcgtaggcctcctcgagtgtcaggaagaccgggaacgtgatatctgcgattgccatgcggttcagcacctcgtgtcggtgaccacgtctagcggcggttcatctgtactggttcgagtgcgcaacctatgtacgccaccgtcatgtcgatttcctgtgtgcaaatcgaccatccaacgccaggctggcttcgggctcggtggtgttactcctgcgtccccggcgaaaccggaaactgtctgcggcaaatgaggtgcgatatggggcgtgcggggcgcatcgttgcaggcagccaagcgctcaccgcccggttgcgctaagttcgaccgttacggggcccagggcgcaggtcacctcgatcacgccgtcggagaggcggcggtggcgggacggcttgccgtcgaccagggcgaccgcgcctggcggggcggccctgaacgtgatgcgcagcttgaggccggttgcgtcggcgatgcggctgccggacagcgagacgcggtggcggccggcctcgatccggaggtggttgccgcggtagagcacgttctccacgcccaggcggctgagctgggtgggcagcgccggcgcgatgtccaggatgccctcctgccgggcctccagaccgaggaacgccagcgggatgaacgccgcgcccagcgaagcgtcggacaggaactcgcggtcgagccccaggccgcccggaggcccgccgccctgctggcgtccgcgctcgggccggccgttgtagtaggcgcggtagaactccttgccctcgccgccggcggcgccgacgtcggcgaaccacgcctgcacctggcgcgtgcgcccgaaggcgcggtcgatctcgccctggtcgccggtgcggcacctcgccatcaggtcgaagagcgaggtgaagcccaccgcgccgccgtcctgcatctggtcgccccagacgaagttggcgccgccggggtcgcgggccttctcccagttccagggccagaagtagtagcgctcgttgcgccgcgtgctggtgcgcggagcgaagcgccaccgcaggatgtccgcaccggtcgacgtgtcaccggccacgatcctgcggccgtcgatccacttgaggatcgactcccgctgcgagggcgtgccgatgccgccggcgagggcgacgacgttgaagtgcaggaacccgtagtcgtggcgcgtcccctcggcgtcgatgttacggcagaagcggccggtctcgggcatccagaagcgcttctcgatctcgcgctttacgcggcgcgccagcgcacggagcgatgccggcgtctcgcggtacgagatcggcgtcttgttgtcgggaccgatgacgggctctggcagacaggcgatgcccaggcggcgggcggcgtcctccagctcggccatggcgttgagggcggtggtgtagcccgtgctgctctcaaggtcgaacctgcccgccggcagcaggtcccagtagctgccgatgaggccgtggccgggcaggtctccgccgaggccgtcgtgccccgcgagccagtcgaggcagagcaggccatgcttccggccctgcaggtgctcgttgaggtaggtgacggcgcggcggcaccggggcagcatcgtggcgagccacgcgcggtcgcccgaccacatggcgaaccgatggaccccgttgatgagcgcggtgttcgtggtggtcatgcggacatcgtaggtcgcgcggacgtagttcaacgtcacggtggcgccgttcgcgccgggcccggccggaacgatcttgagcccggtgatgcgccgtcccgagcggccccactcggggtggagcagcattgggaagaagagcgcgtagcgggcctgcgtcggcgagacccacggcgcgtagggctccgggttcgcgcgaggcggcagcacgctgaagtcggacgtcaccatgcgctcctccgagaagcccggatgcgcgtcggtgctccagtaaatccggaggccgtcgaccagccggtcggcgccggcgcctgccgagtaggcgatgtcgagttcgatgatcgggacctggaagacactgacgtcgaacgcaggcgtggtcagttcgggacgcgcaccggtgacgcggccgacgaggcagtggcccacgtaccccggctgaagcgccatctccttcgccgtccactcggctcgcgctccgtcggccgggtcgttgaactcccagcccgtggggcgcgttacggtcgtgttgcggttgtacttgggccacggccaggagaacgtgggcttgtagccgcccagcgagtcgacgggctccggctccgggcgggctccgaagacgtagccgtacttgtcgactgccgcggtccgtagcgtgttgcggatgatgtcggcatcgctgccgccctgccgggcaaggcccatggctccgcggtctatccaggggaagagccagttgtcccactcgacaacccacatgtggtccgtggccccgagcatgggtccgccgccctggtagacgcccctggcatcgaccgacaggtggcgcatgaagtactcattcgcgaaggcgtcgtaggccgggtcggaggagaagaagcgcggaagccgcgagaagtcaggcagggcggtagccccctgcagccggtcctgggcctgcgcgccgtcagcggccatggcggccagcaaggcgagcgcggccacgaggcgccggaagccgcccttcgagtggttctgcatcgcatctgcctcccatggcgcccggcgcccctaccctgtgttggccgccgccagcagccgctccgcgttgccgtggaggatggcttcggcctcggcggggccataccccagggcctcgcagccgtcgcggatgcccttcaggtcctcatacatcatcagtgtatagcgggcctcgacctcggcgggctcgcgatccctgttgaagtggaaggggaggctggtccggttgacgtagctggttccatgcgtctgacgccggccgcggaggtagagcaccgggttgtcggagccgtagagcagccgattggggccgatgtgccgcagcgccagccgatggacgtcggcattgacgacggcggaggtatcgaagaagaggccctcatcctcggccagcggcaggaggccctgcagcgcgtggggctcggtgtagcagcggcccaggtgggcaatgaccaccgtgatgtgcgggtaccggcggcgtatttcccgcacctcgcggaggttgtccgggtggcccaggcggccggccttggggacgtggagggtcacccaggcgcggcgctggtcgagcacctcaagctggtggtgcggcaggtagtcgaagatgctcgcctcgatgtggcggtcgcggcccgagcggtccaggctgatcatggcgtagtagggcttcacgcccttgacgccgggcaggctcaggagccagtccacctgctcggcgcgccaggaggggcgaaccacggccagggagcgccagccccgcgccagcgcctccgtgcggacgtactcgttgccgccctcgatctcgcacccgaggctgggccagccgaagcagaggcatgagacccggcggccggggaagacggtctggtagcagcgctccgtggtgggggcgtcctgcatatcctgcagctccatcacccagtaggagcgcttcatctcctcggtgatcgtctcgagccggtattccgggtccaagacgtggacatgggcgtcggtgatggccggcggcgcccaggcctccagatgctcctcccagaaggcgcggtccacgtcggtgtagacgtgcgggcccaccagcgggacggcgctcatcggcccgcctcgacctgccggtactcaagcccggcgatgcgggcgaactcggccagcgcctcgcggtggatgcccggcgtcagcgcgcagtggtgcgtgccgcccagcatcgagtaggcctccaggaagcgcgccaccggcgcctgcggccggacccaggagcggatccagtcgctgcaggccgggtgcgtgccgtcctccagcgcctcgacctcggcggcgatgagccggaagctctcgtcggggccggggctcaggttcaccagcgtggccgggcccgggcgcagggcgcaggccagcgtggccgggttctgggccgggctgaaggggtaggccttctcgtagaggcgcggcttggcggcggcggcggccgggttcacctcgcccatgtggctgaggaataggccgtcgccctgccagtcggcgcagaacatctcggtgaaggtgacgccctcccagcccgccagcagcgcgcccaccagtgaggcggtgagcaggtcgccctcgccggcgtagcccacgccccgggccatggccttgcagcactccaggaaggggaccgtgcagacgggtccgtcgggctggacgaaggcctggaagttgacgctgaacgcgccgtagccgcccgcctccagcgccttgcggaggccgaggcccacgcatacggagcggcggtggacgtcggcgggcaggtcggccgcgaaggcaacgctgtcggcggccacctcggcgtcgatctcctcctcggtcaccgtggccgcgaagggcgtcaacccatcggcggcgatctcgcgggcctcgatgccgagccgcccgcgaagcgtctgctcgtccacggcgaagtcgcccatccccgcgaaggagaagccgacccgtagcgcccgcatggagccgaagcgccgggccgccagcgccgcgcgtgccagttcggcggttcgccgcaggggctcgggatcgctcaggtggcccgccaccacgcggtaggccgcgccgcgccgccgcagcatggcggcgaggtcctgcacgccgtggatgccgtggttggccagcagtagcgcggggtccacgtggcgtccgaagtcggcgtccggcgtggtgtcgagcatgacgatgggcttgccgcaggccgccagcgcatcgaccgcctccagcgagggcgagtaggccaggtggagcgtcaccaccaggtccacgtcggcctcggccagacctgccagggcggcctcgaactcggggcggacggtgcagatgggcgcctcgctcacccgcagcccggcgccgcggagggcctgggccacctcggcggcgaaggcggccatgcggggccgcaggtccgggaggcattcgtcatagagggcgaggtagagcggcagcaggcccgcgtggggggtgagtgacatggggcttagcctttctggcccagggcgagccgcaggaggccgatgacccggtcgatgagcgcctcgtcggcgatgagcggcagcttcgtgagcacgatgggcgggcagtcggccttgtaggcctgcacgctcaggtcgatgcccagggcctcggtgcgagccacgaacgcctgcgcgccggccaggttgtggaagcgcagggcggacaagtggcggctcccctcgacaccggccagcagagcggggcgctcggacaccagcgcacgcagggcggcctcgtaggcgtcgccggtctcgcgcagccgcgcctcgttggccatggcccacttcatgctgaccaggtaggtgagcgaggccagctcctcctgcccgttggtgaccagggcgccgaactggcagaggttatccatggccgcgctgaagaggagcctcgaggccgcgtactcgccgttgccgaagcccttgccgagcacgacgaaggtcggcttgagcccgacctcgcggtagaggaagaggcccggcgcccagaggcagctctgaatctcgtcgcagacggtgggcacgtcgtgcgcggcgcagagctcgtaggcgcggtgcaggaactcgggcgtcagcacccgcgccccgtagttcatcatgatgatctcgtggaagaaggccgcgatcttcgtctcgccgccctcgtagcgcgcgaaggccgcctccaggtcctccacccggttgggccggacggcgcagaccttcatcagccccagctcttccatcttcgccgagaggcccggccagagcccgcgcaacgcctgcacgaaggcggtggtgccgtggtagttgccgcagggcttgccgtcgtcatccgcgatgaccaggaagaccggcgtcttgcccgcgtattccggcggacgcgcgccctcctgcgagaggtagaagcggcccatgcacatcttgaatgccgcctcgcccgccaggctgccggtctgcaggttgagtacgcggttgatgacgtcgggctcctccgacgcgaggataggcgccaggtcgtcgtcgccgaaggggtcgaggccgttggcggcgcggacgagccgctcctccagcagccgcgtgatgtggccgcgggtgttgttgtgcgtggcattggagacgcccagcgttcgggcgacgtcgagcagcgcgaagccggggaactcgtggcccagcggcacgtggtagtgctccgacttggtggtgaggtaggagcggccatcctcgccgatccgtacgcagcccagcgtggagaccggcgcggccgcggtgcgcgtggcggcgttgaaggcccgcgtggaagcccctcgggccgaggaggcgagcgcgggcagcggatcgccggagcccaccgtcgccacggcttcagacaccagttcgtggtggtccgtggggtagaagtccaccgggcccagcgccaggtcggccaggtcttcgggctcctcgccggtcaggcggcagcgccccgcgatggccgcgtcaacgaacgcgcgccccaccaggtcggccagcgaagccgacacctgcacaaacggatcatccctacgaccggccatggcggcgcctccctctagcatcccctacttcgtcgccgcgtccacggtggactggtcgacgacctgcgtgtcggtcttcacgatgggccccaccgcctggcctttcagcttggcttcgatggtctcgatggacttggcgcccatcttgcgcgggaagaccaccagcgtggccgtcaggtcgcccttcttcacgtctgccagcgcgtccgggttgccgtcgagaccgatggtgaggagcttcttccccgcctgcttggccgcctgggccgcgccctgagccatggcgtcggagcagccgaagaccaggtcgaggtccgggtacttctggaggaactcgctggtccggtcggcgccctccttgcggagccagttcgccgactgcgacgcgaccacctggatctgcgtcccctccagcgcactgcggaagccgcccgcccgctggtcggtatgcgttccggcggtcccctccagaatggccaccttgcccctggccgtgcctccgtacttcgccttcagcagctccaccgccttctcgccgcacttgcggccgccggccagctcctcgtagcccacgtaggcctccaccttgcccgagggcaccggcgagatggagttgtggacgaagatgggcacgcccgcgtcgttggccttcttcaccgcctgggtcagggcctcgtcgttcaccgcacagatggtgatggcgctgacgccgcgctgcaggctgtcctgcaccttcgccacctggtcggcggagttcgtctccttgtccggctccaggtggctgaagtcccagccgcgcgccttcgccgcttcctcggcgcccttcacgaactcctggtggaagacgctggtcagcgccggagagatgacgaccaccgagaccttgcccgcgggcttggcgccgtcggcgggggcgctcgcctccttgcccggctgggagcaacccgccaggaccgccgccgcgaagagcgcaaccggtacgaagagccgcttcatgtcagacccgcctccttctcttctggaacatgtcgatggtgaccgcggcgaagatgatgccgccgatggccacgcgctggtagttggagttcacctgcatcaggttcagcccgttccgcaccaggccgatgagcagcgccccggccagcgtgcccggcaggttgccctgccctccgctcaggctcgtgccgccgatgaccaccgcggcgatggcgtccagctccagcccgtcgccgatggtcggctcggcggcccccacgtagccggtgtagagcatgcccgccagccccgcgaggaagccgcagagcccgtagccgaagagcttcacccgcaccgtgggcacgccggagaggcgcgaggcctcctcgttggcgccgacgctgtagaggtagcgccccagccgcgtccgctgcatcaccaggtgtcccgcggcgtagagtagggccatgagagccaccatggcggggagcttgacgatgagcggcacgccctcggccacgttgccgctgcccggccagaggtaggccgccggcaggttgtagatggccccgccgccgctcaccacgaaggccagccctcgggccatgaccatgagcgccagcgtggcgatgaagggcggcaggccgacgaaggtgatggccgcgccgttgaggagccccagggccgcgcccagcgccagcgtcagcgccacgcccgcgcctccgccccagccgtggtgcgacatgagcacggcgggcacgcaggccgccagcgccgccacggagcccaccgagaggtcgatgccgccggagatgatgacggcggtcatgcccacggccacgatcgcgaccatggagatctgcgtgaggacgttgcggaagttaacccacccacggaacgagggctcccagacggcgagggccacgtagagccccgccagcacggcgtagacgccggcctcgcgccagagcgcgtgccgcgccggcgtacatcgaacgatggatgcctgttcaggggtccgctgcatagctcccatagtgtacgccgcagggggccatgaagccaacggccggggcgaagggaggcgggcgtgagttcgggctttccggttcgggcgacgccgcgatagtaacgccgtgggtggcccactaacgaaaaagcccccttgcgggggctctttcgcttcggtccggtgaggacctgacgggtgggcggtgaggcccagcctgcggatctaagatccttgttggaggactcaggcaggcatccatccgatacaatgatgagtgtaccgtcggttcttgccaatgtcaagagggaggttagccgtggagacgatcctggggttggatcttggtgtgaacagcgtgggatgggcggtggtccagcgggaggggccggacgacacgcccaccgtggaggccgggtcgtacgtctaccccgaaccgggcgagctggagcaggggacagggctctttaggtcgaaccggcagaagcgcgggcagaagcgccgcatgcgcatccaggtccggcgcaagcggcagcgcatggccgccctgctcaagctgctcgtggcgcacggcctgctgcccgccgagaaggaggagcgcgaccggctgctgagccgcgaccggcccgccggcggcgagcccggcaagcggcccttccaccccttcatgctccggcagagggggcttgacgaggagctgacgctccacgagctgggccgctgcctgcaccacatctgccgacgccggggctacatcagcacccgcgacctgatgcacctgcacctggagaagcagctccccacgctccagcgcgccgccgccgacctcgaggccgaggagcccggcgaggagggcaaggccgccgacaaggagacctcggcgctcctgggccgcctgaaggaggtgcgcgaacagatcgaggccggggccgcccgcaccatcggcgagttctgcgccctgcgcctggccgatcccggcgcctttcccggcggcgtccgcgcgtcgggcaaacggagcgagccgaggcagcagaagcaggacctgctgggctggcgcgccgaccgcttcctggtggaggaggagttcgagaagctctgggccgcccaggcccggttccacccggccgcgctcaccgacgggctccgcgaggaggtccgcacggccatcttcttccagcggcccctggcctccaagcgggggctcgtgggcggctgcgagttcctgcccgcccgcaagcggcttgcccgggccgaactgcttgcccagcgcaccagcgtgctccagaccctcgtgaacctgacggtggtggaccagaagggcgccggcccgcgccgcctgacgggcgacgaggtgaccgcgctggccgacgcgctggagcaccgcgacagcctcacctgggaggaggcgcgccaggtggccttcatgcccctcggcgcccggttcagcgacgagcccgagcgccgcaaggccggcaagcgcacgcgcggcgatatcctgggcaaccgcaccgcctccgccctccgcgcctcgctgggcgacggctggtcggacctggagcccgagggcaaggaggagatggtggccctcctcctccacgcgcacagcctggccgacgtggcacggggcctgcgccggcgcttcgggttcacgcccgaccaggtgcgagctgccgcctcggcgcccctctccgagggatacaccaaccactgccgccgcgtctgggccgacctggagccccacttgcggcagggcctggtctacagcgaggcctgcgaggcggccgggtaccgcgaggccaacaccagcaccgtggccgtggtcgacaagccgctggatcgcctgggcgccgcgccggacctgcgcaaccccgtggtgcagcgctccgtgaagatggccttccgggtcatcaacgcggtcatcgacaggtacggcaagcccaccaccatccgcatcgagctcccccgcgacgtctcgcggacgaacaagcagcgcgagcagatgtggcgcgaccaggacaaacgcgcccgagaccgcaagcaggccgagaagaaggtgctggagaacaagcccgacatcgcccagggcgaagccacgccgcgcggcgcctccatcgtcctctcgcgggccgtggagaaggtgctgctctgggaggaggccggcatgaggtgcccctacgagcccgaccgcatggtgggtatccaggagctgctcaacgactacgacgtggagcacatcgtgccgcgcagccgctgctgggacgactcgtgggtcaacaagaccatctgcccgcggggcctcaacctgcagaagggcaactccaccccgttcgagtggatcggcaggggcgagcggtgggaccacatgtgccgctacgtccggtcattgcgcgggatgtcgccgggcaagcggagccgcctcctggccgaggcctacgacgccgagggcttcaccaaccgcgccctgtccgacacgcgctacctctcgtcggcgatcaagaaggaggtggcgaagctgggcgtgcccgtggaggtctcgcgggggcagatcaccgcgcagctccgctcgctctgggagctcggccactgcgtgcccatcgatgacgaggagaaggagaagctggtccgctggcgcgaggccccggtgaagaagaacgagaagccccggcacgaccaccggcaccacgccctggacgccatccttgcggccctcaccgacatccgcacgctgcagcgcatgaccgcctggctcaaggcccgggaggagggcatcccccgcgaccgcctggagccgccgctcctctggcccacgctcacgggcgacctggagcgggccatcgaccgggccccggtggtccacgccaccaaccggagcgtgcagggcgccctgcacaaggagacggcctacccgccgccggcgccggagaaggtggcggcagcgctggccgccgccggagcctcgccgggaaagctgcccgccaccgtggtggtggagggccggatggtggtgctgggccccgacggccggggcctgaaggcctacgacctggccagcaaccaccacgcctgcatctggcagcgcacccgccccgacggcaaggtggagcgcgacatgaccgtgacctccatgatggaagccgcccgccgcgccgcccacggcgagcccgtggtgcagcccgcccgcgaaggctgggacttcgtcctctcgctctgcaagagcgacatcgtggagtggaccggggacaagccggggctctacagggtggctacgttctcggtctcgacatgcggcgccatcgagctggtccttcgccatccaatccgcgccgtcgcgtcgaggccgcaggatcttcgcatccagggccgccctaagctgcccagcatccgccgccgcgtctgcctgggacccctgggcgacgagatcgcctccgagccgttggatgcctgacctgggccgcgtggtcgacatcgcctcggccgcccgcttgagctaccgcgacctgcaactggtgctggagcgcgagggcgcgcccacggtcaccatcccggtagaggacatcggcatcgtcctgctcggcaacgcgcccatcacggtcaccagccccctgctcgccgccctggccgagcagggggcggccctggtggtggccgacgcccggcacatgcccgccgggctcatgctgcccctggccggcagcacactccacgccgccacgctgcgttcgcagatcgaggcgagtgtgccccggcgcaagcaggtgtggcagaccatcatccgtgccaaagtcgccgcccaggccgccctgctcaaggccgagaaggggacggacaaggggctgctggcgctctcgcgcgccgtgcgcagcgacgacgccggcaacgtggaggcccaggcggcacggctctacttcacggcgctcttcgggagggggttcaagcgcgaccacgaggcgccgggcctcaacgccctcctcaactacggttacgccgtgctgcgggcggcggtggcccgcgcgctggtgggcgcggggctccacccggccctgggcgtacaccaccggagccagtacgacgccttcgcgctggccgacgacgccatggagcccctgcgcccgctggtggaccggctggcgctgggcctgcgggccgatctgcccgagggcgaggggctgcccacaccggtgcgccgggccatggtggccctgctcaccgagagcgtgggatgggagggcaagcggtacccgctgacggccgccctgcccaactatgccgccgccctgcgccgacgcatcgccggcgacgatgaggccctgccatgccccgaaccctgacctacggaggagcgcgcgctatgtggctgctagcgttgttcgacctgccggtgacggacaagaaatcgcgccgcaactacgcccggttccgccgcggtctcatcgacgacgggttcatgatgctgcagttcagcgtctacggtcggccctgccccaatgacgacaatgtgcgggtgcacaccgagcgggtgaagtcgatgctgccgccggagggagaggtgcggctgctggcgctgaccgagatgcaatacgcccgcatggaaatcttcctgggcaaggacctgcaggagacagaaaaagagccggaccagctcgagttctactgagcggtccggccgtttttcgcgggcttcgcccgatcgggacgatagacatctagtgtatcggatggatgcctgcccggtctacccaaccgcctgaccgtcggctgtgcgattgcctatagtgtatcggatggatgcctgcccggtctacccaaccggacggggcgaggagccctgcccatgggcagtgtatcggatggatgcctgcccggtctacccaacagccaggttcgtcgttcactctgcacctccagtgtatcggatggatgcctgcccggtctacccaaccggccagctggacaatgctacgaaggcagagtgtatcggatggatgcctgcccggtctacccaaccacgcagggggaggggcgacatgaacgaacagtgtatcggatggatgcctgcccggtctacccaacccaagctaaacgcattcgcacgcggagaggagtgtatcggatggatgcctgcccggtctacccaacgtcacccacgccatgccgctgagcacacgcagtgtatcggatggatgcctgcccggtctacccaactgaagccgaacgccgcgctgttggatgagaagtgtatcggatggatgcctgcccggtctacccaaccagacgataggcacgccgcgctgttcacagagtgtatcggatggatgcctgcccggtctacccaacacctcatagtcagtccagcgatggcgcccaagtgtatcggatggatgcctgcccggtctacccaaccacatccccgagccaccgacgcacatcgacagtgtatcggatggatgcctgcccggtctacccaacgaatagactggctactggtccttctcggcaagtgtatcggatggatgcctgcccggtctacccaacggccactgacgctaccggcactcccgtcggagtgtatcggatggatgcctgcccggtctacccaacacagtgaaccggacgcgcaggacgcatcggagtgtatcggatggatgcctgcccggtctacccaacatccgtcgaagtcgattgcgtgctgtcgtgagtgtatcggatggatgcctgcccggtctacccaacgtcttcttgttgcctgccactgttgctaccagtgtatcggatggatgcctgcccggtctacccaacaaccacgcggccaacgtcggaaggttgatgagtgtatcggatggatgcctgcccggtctacccaaccggatgatgcgcgccactcgttcggctgtgagtgtatcggatggatgcctgcccggtctacccaactgcccgctgtaggcttccggttccatgccgagtgtatcggatggatgcctgcccggtctacccaacttgagtagcatcggatcggcgtcgaggtcgagtgtatcggatggatgcctgcccggtctacccaacgccagccagcactcacggtacggcgcgtggagtgtatcggatggatgcctgcccggtctacccaacgccgcctcccagatcgtgttgatgtatacgagtgtatcggatggatgcctgcccggtctacccaaccgccgcagggtgcgggtagcgccaccacctagtgtatcggatggatgcctgcccggtctacccaacatgggcggtagcatcctgtagtggacgcccagtgtatcggatggatgcctgcccggtctacccaaccgaaagcataggggcgacccggctggaggtagtgtatcggatggatgcctgcccggtctacccaacgggtgcgcgggtgatgcgctgtggaggaaaagtgtatcggatggatgcctgcccggtctacccaaccaccacatggcaaacgcaacatccctaaccagtgtatcggatggatgcctgcccggtctacccaaccgcaatgacacgcgaggaagacgtgacgatagtgtatcggatggatgcctgcccggtctacccaacagttcgttgcgtgggacattgccggggtggagtgtatcggatggatgcctgcccggtctacccaacagcgggtgatgcggtccggcgatggagtggagtgtatcggatggatgcctgcccggtctacccaaccggcccgaggctagccagcacggcggccttagtgtatcggatggatgcctgcccggtctacccaacgacccggcagtgggcacacctgcgttgggaagtgtatcggatggatgcctgcccggtctacccaacccgcgcaggcggcgatagtcaaggcgctccagtgtatcggatggatgcctgcccggtctacccaaccgaggccctcactggctacgtgtgcgccgtagtgtatcggatggatgcctgcccggtctacccaacatcttactcgccgcgtaactcgccgcgcccagtgtatcggatggatgcctgcccggtctacccaacgggtccgtggagacgttacgaagggcgactagtgtatcggatggatgcctgcccggtctacccaacgcctacggtgatagcgatacctcccacctgagtgtatcggatggatgcctgcccggtctacccaacctagaatgccagacgaatcgacaagcggcgagtgtatcggatggatgcctgcccggtctacccaacacgggggccagccgcaaccgtggcgcagtgagtgtatcggatggatgcctgcccggtctacccaacaacccggcttgaggttgaccacgatgtgtcagtgtatcggatggatgcctgcccggtctacccaaccgtaccctcgcgcttggggggagtgagcgcccgagtgatgcgcttgccgagcagaggtcgatgcgtgagacagggaacgtgcttgtgcagggcggtggtgcggcgggcgtcttacggggggtccttccgctgcgcgtcaggatgacgtcaagggctacgtcaagggctacgtcaagggctacggcaaagggcagagggcaacggcaagggctacgtcatgggcaacggcaaagggcaaagggcaacggcaagggctacgccatgggcaacggcaatgggcaatgggcaatggcaagggctacgccatgggcagcggcaagggctacgccatgggcaacggcaatgggcaacggcgcccgacccgcccatgccgtcatcctgaagccccttcaggggctgaaggaccccccggagctaggccgtcacctcctcacctcctcacctcctcagctcctcccgcccgccaacctgccgtctcgccccttcctgccactggcagagcggcaacctggctagatgaccgccgcgccgggccgggccccgacccgaccggcacgtatgcgcgttgtcatcggagagggcggtacccctcagcgggatacgaatcgggctcttcgggcgtagttcacggcatgggtacgggtcggcgggccgatcgggcgctccttcgtgccgcctgccggaccgctatggcagggcccggcattgacttacgggcctgtggccggtagattctacgtaacccaacggaggtgccgacctatgtccactcctgtgctaacgaccgacctgccgggcttgccccgctttgccacaggcaaggtgcgcgatgtctacgacctgggcgacagcctgctgctcgtggtttcggaccgcatttccgccttcgactgcgtcatgcccagcggcgtgcccgacaagggccgcgtcctcacccagatgtcgctctactggttccgcgccctgcgcccgctggtggccacccactgcatcaccacggacctggacttcatctgcgcccgcgtggccgaggccggttgcaccgtgaccgacgagacgcgggccatgctggcgggccgctcgatgctggcggtgaaggccgagatgttcccggtggagtgcgttgtgcgcggctacctggcgggttcgctctggggcgagtacaaggccgccggcggcccggggcgcgacgcggtggtgcacgggctggcgctgccggcgggcttgcgcgagtgcgacaagctgccggagcccatctttacgcccagcaccaaggccgagacgggccacgatatgaacatcggcatggaggagatgcgggaaatcgtcggcgccgagaccgccgaccggctggcctcggtctccgtggagatctacaaggccgccgccgaccgcgccctgacccgcggcatcatcatcgccgacacgaagttcgagctgggcctccacaagggctcgctgacgctggccgatgaggccctcacccccgactcctcgcggttctgggacgccgagctctacgagccgggccgatcccagccgtcgttcgataagcagtacctgcgcgactggctcacggcgtccggatggaacaaggagccgcccgctcccagtcttcccgaggatgtagttcagcgcaccgccgacaagtaccgcgaagcctaccggcgcatcacgggcttcggcctgtaggccgcgccgccgcgtttccgctctgttcaggtgggctcagcccacggaggtctaccctacatggtcaggttgtacccagccccggcgctctggcgcgggttccttgcggcggcggccctcacggctgcgacgtccgccatcgccggaccgatgacgcgcgccggcggcggctcgaggccttccaccgcttcgtgggcggccatggcgcggagcggcttcgtggcccccgtccaggctcccgagcgcgatgcctggtcgcgcctgaaccgggcgtccggcggcgatgagggcctctaccttgcgcctccggcggaggcggcgaagggcgcgcatcctctctctccgcaggatgccggtaccgggttcgcgggcgtcgacatgcgcaagtcggccacggcgccgcccgataccgtcggagccatggggcccgcgcactacctgcagctggtgaactgcctggcgtctgtgtatgaccggagcggcgtccaggtgggttccagcgtctcgctggccgccttcttcgaggtcgacggcggctacccgcacaacggcatcggcaatccccgcgtcatctacgatcgcctcacgtcgcgcttctttgccgcggcgctggagttcggcgacccatacggagcgaacaaccagatcatcctggccgtgtcgcgcacgccggaccccaccggcgtctgggaccgttacgtgatcccggtgggcgtgaagacggcgctgagcgactacccgaccctgggcgtcgatgcagagggcgtctacttcggcatcaccatcgtcggcgcgacgagcacctacacccgcatcgccgccacgccgaaggcgccgctggttgccgcttcgcccgcgctgggctcggtctgggtctcgggcgacatcacggacatgtacggcactccggcgcccgccgtgaacatggatgccgcgccggtaggcggtcgggcctggtttgcggcgtccagcacgactatgtacggcaacttcacgcttcggtacctcacctggagcggcggctcgccgacgctgagcgatctcgtaacggtctcgacgcccgcctacggggccacggcgcagcagttcgcaccggccctggggtcgacccatccagtatatgccggcaatgatcgcatccagtccgccacgctgcgcggcgaccggctctgggcctgccgcagcgtctcaatcaacaccaatggcggagccgatcagagcgaccggctcggcggcgagtggctctcggtatcggtgcagaccacgacgcccgtcctcgcccagaacggccgcgtctacgatgccggcgtcacgaacccgcgctcttactactgccccagcatcatggtgacgggccagggccacgttgccctcgccttctcgggcagctcggccgccgagtatgtgggcgtctttacctgcggccgcctggccggtgacccgtcgggagccatgcagggcgtgacccaggtcgtgccgggcctcgccgcctatgacgtgctggtcggcgcgaccaatcgctggggccactacggcggcatcgcgctggacccgaacgacgacatgaccgtctggtccacccaggagttcgcttccgagaccgacctctggggcacccggatcacgtcgctccgcgccccggcgccgaccgtggcgagccccggcggcgccgcacagcagaacagcacaggcgtcacgctggatgtcaccggcaccgggttctttgatcctggcgccgggttcgcctcccgcccgaccgcgcagctcaccggcggcgccgtcaacggcatcagcaacgtgacggtcgcggtcctgagcgccacgtcggcacgtatcaccttcgatatctccgacccggccacgcccggcccgcgtgacgtcgtcttcaccaaccccgatggccggtcggccacggccgtggcgggcttcacggtgattgagaagcccaggatcgcgaccaagctcttcgcgccggaccggatcggtgtcatcaccgaggaggttgcgttgaagggttacctctacgttgatgccaccagcgcacccctcgccgggcggacgctctccttcgcggtggccggcactcacgtgggcgacgccgtgaccgacgccaccggcgccgccgcgctcctctgggccatcagcgacggcccggcgacccggacgatcaccgcatcgttcggctacgaccctgattaccgctccggttcggcgtccgccacgctgaccgcgaattcgttcgccaccaaggtctacgtgatcgaccgcaccgcgaagatcaagacctacaccgtgctgaaggcctacctctacctgctcaacaacacgccggtgggcggcaaggccatggtcatcaaggtggacggcacgaccgtggggacggacacgacgcgcgcggccggctacgcccagctcggatacacggtcccgttggccgccggttcgggcattcgcaccatcaccggcgaatgggccggcaacggaggctacctggcctcgaccggcaccggaaagctcaccgccaacaaggccgatatctacatctggacctatgtccgctcagccaaagttggggccaaccacccattgaaggcctacgtccgcagcctgccggactacgtgatcctgcccggcaagagcatcaccttcagcgtcaacggcacggaggtcggcacaggggtggtgggcgccgacggctgggccaattccacgtgggccatgcccgccgacgagcccctgggcgcacacaccgccacggccgccttcgccggcgatgcgtggtatgttgcgggctcgggctccttgtcgttcaatgtggttccgtaggacgcgccgcgcggggtcgctccgcgcacgggtctcggtattccttctcatggcgggcgcggcttcggtcgcgcccgccgctgtttgtgcggccccgccgctggagctccgcagcggcgacggcctgctgttgcgggtcgcggaggacggcgcgctcctcgacgcctccaccggcgcggggccggcggcgatccccggcggcttctcgctggcggaccgcaccgcccggcccggccggggcctcgacgacggcttcctgccccttcgagggcgggcatccggcgtggctcagggcgctgagctggacctgaccggcgccgacggcgtccgcgcgaaggcgacgctatccgccgcgggcgcccgtatcctgttcgattgccgcgtggaagacgcctcgggtcgcgaccgcgccgtggccgtgcgctgcacggtgccgctgcgccgggccgactgggtctggcacgacgacgccgaggtcttccatcccgcgacgcccggaaccgtctgccgccgcaccgaggccgtgatgtggggcgacggccagtgctccccctatccctgggcctgcgtcagctcgccgggcgaggggatcagcctcggcctcccgctggggcaggggcctcgggtcaccgtgctcgacttctcccccgaggagcaggcgctgcggatcacctgttacctgggcctcacgccggcctaccggaagtcgccgggagccgccgacttcagcttcgagctatacaggcacgacccctcccagggcttccgcggctcagccgagaggtacagggcgctccacgccgcggacttcgacaagcgcggcccggcgacgacctacctgggctacggcttcgacgagacctgcgacccccgcacccgccgcctgcgcgtggcgggcatcgaggtggaggacatctccgacttcggcgacgcgcggcccaccgcgtggcatatgcacggcatgtacgacttccgcatggtctccgcgccggagaatccgcagcccaccgacgccgaggcccgggccgccctgcgcctcctcgcccagcagggcgccggcacgggctatgtgccgccggacgagaccctgaagaagctgatggagggccccgacgggcagatcctctacaacggcgacacgcagtactggcccgcgcacacgggctacaacaagaccgatgcgccgggatggggcctcaacttcctggtctgcgagaacccggccgtatcgcccgtcctgctcggcgaggcgacagggacgctggagaagtcggccgcacgcccgggcttcgcccgatggagctggctggtcaccgccgacgcctttgcggggctacgcgccctgaactgccggcgcgagcatattgaagcatcgacgatcccgcccacgtacggcgccggcaaccgcgccataggcctccacgacggggcgtgggagttccagcgcgtggcgcacgagctcaccacgcggctcggttttgccacctcggggaacatgggccacacgctggtggccttctgtgcgccgttttgcgatgtgcccatga

SEQ ID NO: 3336 - DNA, 23144 bp, synthetic construct
  variation 15069..15168: note = note, n is a, c, g, or t
  source 1..23144: mol_type = other DNA
  misc_feature 1..23144: note = Synthetic
atcctgcagcgccgcccactgctcgggagtgcagtgaggctccagctcgggtcgctgcagcgcaccgtcgatgagggcaccgacggggatgccggactcgcaccagaacgccagatgccagcggtgatcgcggtgagcgcgccacgcctcggcttggggcacctccacccactcgcgcacagcgacccactggttgcgcacacctgaactccaagcgcgaggttcgctccagtcgatggtcgcggcctgagtgtccttctcgtcctgcagccaccgcgttgcgtgggcgaaggcgtcgctgtcgcagtcgccctcgaacagggcatttcgcagcacccggtagctgagccgagaccacgtgagccacatggcctcgacgtgcgccccgtgatcggtaccggcgtcgagacgttcacccgtcgatgcgtccagcaagaaggactgccctggtggatggcagatcaccgccagtgcatgcccggctgcactcagatcggcaacccaagctcgctcgacgggcggcgacgtgaactcgagccgcagaccacgagcccacagcgactcgagctgcagggtgcggtgcgaggtggtgtagatgcccgggatgatcgtggccaggtcgctgcaggcttcccagagggtggcggggccgctgctgacagcggcgtgcccgatgaccgagtccgtgacggcgccctgggcggctcgccgggtgagccagcgcttcgccggcgccgaccagtcaccggggaagaatcccgtgtcagtcaggctgtggccgccgagggcaagctccatcggctcgccagggctgtagacgagcagcttggcgacctcgttgacggtcgttccccacgagtgcatcggccgccccccgggcgagcgcatcccggtgatgaacgcttcgatggccgcacccgcccgttcctgctcggcgtctgtagcgccggggtccgcgccgagtgaggcaggtgtgggatgcggggggcacagcgatacgtggtcgtaggcgacgttgcgatccgcatggatgcgggtttcgtagtcgagccccgctggatctattgccaactcccacgccgtctcggtacctccgcgacggcgagctgcccgagtcccttcggcgaacgctgtccgagcttccggcaggtagggcggcatcgcttcccactgcgaccgttgacggacgacatagtcgtgacctcgcccgacatcgtcgagcagtttcgagtgcgagcccaccgaggccgactggaggtgccgtaccggatcgagatgcggctccggatacggcggccagggaacccagacgcggccgtccccgatcgccacagccgactgcagttcgagcgatgggagatgcactcccgagctcgggtactcgccgttgcccgcaatgatcagccgtgcctcgccggcgggttgatcgcccagcgctgagcgctgctctgtgtcgacgccgtcggtgtcgtcgattgcgtcgccgccggcggcagccgagatcgacggggcaggatcgactggttctgcgccgtcgtcgctgcacgctgctacgagcgccccggcagcggctgccagcagccccagtgtggtcaggctgcggcgccttcgaatggccatcgctcagctcctgcgaactcgtcgtgcgaggtcgtcttcgcggtcatcgcgttcgatcgggatcgccgcgaagagtcgatgcgagttctaggcgcgttgtttcagagcattccaatgattttcaagatatgtgatgtatacggcgaaatcgccgcggtctcgcacttcctgcgagcgcgatggtctggccccgctgctgccgtccgcaggcgcgaaggcagctgctggccctaggtgccggcggcgaatgaggacggccggtgccggcgcgcccacagggcaaacaccaggctgatcgctccgtagccggcatacgcagtgaccagcggcgtcaccgtgccggcgatcatgcggtcgacgagcatggccagcaacgcgccgccgccagtagagatcgtgccgatcaccgctgatgcggtgccggccaactcgcccatagggcccatggcctgggcctgcatgagcgggttgacgaacgtacgcagggcattgatcaccacgatcacggcgaaccagccgaagaacgacggcttgccgtcggcctgccatgaccacagcgcaagggcgcacgacagcacgacggtggtcggcagcagcacgacaatcatccgatctgcgccgatccgagtcacctgcctgctgccggtgaacaccaccagccccatgaacacgctcattccggcgaagtagtaggcgaataccccaccccggccgtacacgtcgtcaaacagcagctggctgctccccaagaacgcgaagaatgcgcccatgtcgaacatgacagccagcgccgagccgatcgtgagcttgttggcaaataccgccacgatggcctcgcgggtgcggctgagcgtgagggggcgacggcgttcgggcgggagcgactcggggagccggatgacccacagcgccagcaccacggtcagcgccatcggggcggccatcacccaacgccacgaaccgagagccagcaccgcctggccgagcaatggagcgattgcgggcaccaccatgaacaccgccgcgacggccgacagcacgcggcccagccggtctccctcgtacagatcacggccgatggccagtgacagtgcgcggggacctgcggcgccgatgccccagaccaggcggctgacgatcaggaagccgaacgagggcgccagtgctgagcccagggccccaagcgtgtacagggccagaccggcgtacagcaccggcttgcggccgaagcggtcggtgaaggggccatagagcatctgcgcgccggccaggccgaagaagtacagcgtgaccgtcagcgccacccgaggcgaatcggcagcgagcccgaggccgagccggatgtcaccgaacgcgggcagcgccatgtcgatgcccagtgccgtggtggcgctgatggcgcccagcaagaagacgagttcgcgttcggcaatccgtctcggctgcggatcgcctgctgggttcacgtgccggccgtcacgatccggctgtcagcggccgtcgactgcggcagcgagcacgccgttcaccaaggcgccgctgcggtcggtggcgcccagccggtgcgccagctcgacggcctcgttgatgaccaccgccgcgggtgccgcccctcgctccagctccaacaggccttgcatcaggatgagccggtcgcacacgccgaggcgctgcggcgtccagccctcgttcagcagtccaccaagccgcccggtcagcgcctcgcgctgggcgtcgacgccggtggccagctcgagcgcgaacgggtcgaggtcgctgacctgctctgcaagcacatcggccagctcgcacgacttcatctccgcctcgtacagcagctccaccgagcgctggcgcgcctcgcggcggcgggtcggctcgtcgggagcggcgaaggggtcgctcgggcggctcatggctgtggctccgagcatgtcgcggcggcccgagggcgtcagccgcgggcccgctcgatgtagtcgccgctgcgggtgtccaccttcagccgctcgccagtctcgatgaacagcggcacctgcaccaccagcccggtggacatcgtggcctgcttgcgtgcgcccgatacccggtcgccctgcacgccggggtcggtgtcggccacctccagcaccaccgatgcgggcagctccacgcccagcacctcgtcgccgtagcgcacgacggtggccatctcgccttccaccaggaaactcgtggcgctgccggccgccgtgcggctgaccgggagctgttcgtagctgtcggtgtccatgaacaccagcgagtcgccgtcggcgtacaggtattgcatgtcgcgctggtcgatgacggcgcgctccatgcgctcgcccgctcggaacgtgcgctcgagcgtggcaccggtgcgcacgttcttgagcgtggtccgcacgaacgcgccgcccttgcccggcttgacgtgctggaactcggtgagctggaacagcccgtcggcgaggtcgagcgtcatgccgttgcggaagtcggcggtggagatggccatgtcaacgcctcgcggtcagcctgagtgcttgcaggttcgcagcgggacggtacaagcacggcccgccgccacgacagggcgtcacgatggccgttcggcttggtcgccggtatcgggggaatcggaggcggcggccgcatcgatggccagcgcgactgcccgcgggtagccagcgccgccctcccccgccacccgggcggtcgccagcggctccaccaccgacagatgccgccacggctcgcgctcgcggggctcggacaggtgcagctccacgatcgggccctcgaatgcggcgagtgcgtcgtgcagtgaccagccgtagtgagtgagcgcgccggggttcaccacgatcgcctctacccggccgatgcccgcgtgcaccgcatcgaccagttcgccctcgtggttgctctggcggtgctcgagatcccagccgcgctcggttgcggcccgacgggcggcacgcacgtgatcgagcagcgtgtcggtgccgtagatctcgggctggcgggtgcccagcaggttcaggttcgggcccgacagcagcagcacgacatggcgaggcatgactgcactcacatccgctcgagcgcgctgcgcagcacgccgggatcgatgccgggcaccacttcgaggccgtcgggaccgtcgagcacgaacgtgatgcctccggcggccttcttgtcgcggccgaacagctcgatgatctcgtcgcggtcgatgccgtggggcaggctcgcattgagcccgtaggcggcgaccacccgctcatgctcggccacacgatcgtcgtcgatgcgtccgagcacgcgagcgaccacggccgcgtagcgcaggccaatggccaccgcctcgccgtggcgcaggtcgaaccgcccggcgatctcgagcgcatgcccgagtgtgtgcccatagttcagcaacgcccggcgaccgccctcggtttcgtccgacgccaccacctcggccttgatggccacgcacgccgccaccagttctgccccttcgagcgagctgagcggctcaccgccttctaggcgacgcgcgagggacgggtgggaaccaatgagctgcgcggcctgcggtgtgcagccgatgaagtggtacttggccagttcgccgtagccggcgcgcaattcgcgctcgggcagcgtgtcgagcacctcggtatcgcacagcaccgctgccggctgccagaaggccccgacgaggttcttgccctcggccaggttcacaccggtcttgccgcccacggcagcgtcgatctggcccagcagcgtggtggcgacgtgcacaacagccacgccgcggtggtacaccgccgctgcgaagccggccacgtcggtgacgacgcctcccccgacgcccaccacgacgtcacggcgggtgaggccgaagcgagtgaaccggctgcacaactcgccgatggtggacagctccttggcctgctcgccgtcgggaatctcgactgtctggaaaccgatgccagggtcgatgtcgacgccgatgcccggctgtgtgatcaccacagcgcgctgcgccccggcggtcagcttggattcgcgcaagaccgaggcgagctcatggcgcgcgccgtagccgaccagcacggggtacgagcggtcgcccagcggaacatcgacgcggatggtgcccgacatcacgggcgagggtaccgatgctcttacacgctgagccctgccggcaccgaccaccagatcaccgccagcgcgccggccaccaacgagggaccgagcgcgaagcggtggtcggtgctgcgacccgccacgacgatgccgatcgcgcccacgacggccgcaagggcgaaaccggccagtagccccgtgagcaccgtcacgagcccgccgaggcccagatgcaagcccaggtatccgccgaggcgcacatcgccgtagcccaggctgccacgcgatgccagccagatcacccgcatcaggccccagccggccagtcccccgatcgctactgccacggcggtgtcgccgagccccgggagaccgccctcgatggctgccgccgcacacagcagaacgacggccccgaccgaggtcgcccgcagcagccgggtagggatcaggtgggtgcgcaggtcgatgcccgagatcatgacgccggcccagccgaacgccagcagaggggccgcataggcgctcgagccgacccgcagcaccagcaccgccccgaccgcagcacacactgcgatcgccgccgcaggatggaggctcacgccgaagcagcgccaggcgcagcgaacagctgcgacaccggcagcagagccacccaatgcgacggctgtgacggcgacgagagttgtgtccaactcggcgatcacaacggtctcgccgctgacggccgcatcgacacgctgggacgaaccgtccttgcgcaatgggtttcacacgcggccatgccctgcctccggtcgtcgtcagccgcccaaggctgcactcaggccggggtgctacccggcgatgtcaaggccgacggccgcggccatcacgtcgacgggggcgtctcggccagtccacatcttgaactgttcggcggcttggaacaacagcattccgacgccgttcagcgtcgtcgcacctgcttgggctgcggcgtcgagcagcggcgtccgcgcaggtcggtagatgagatcaacgacgatctggttgcctcgcagcagcgtcgggtcgatcggcatcggatcgccgtcagccatgcccagcggtgtggcgttcaccacgacatccgcctcgctcgccgattcggggccgccgacggcggctgtgcccctcggacggtcctccgctgccccacccgacttctcaactgtcgtcgagccacgacgcgcaccagaagcagcggccgcaatgcggccggccgacacacccagcgtcgcagcccgctccgcggcgtcgggcgagcgactcaccacagtcaccgatgctccctctgcggccaaggcgacgatcaccgcccgcgcggcaccgcctgcgcccagcaccgtgacgcgctttccggcgagttcggcgtccacttgccggcgcagcgagttgacgaagcccgcgccgtcggtgttctcgccgaccaagaggccacggcggtgccgcacgcagttgactgcgccgagcaggcctgcgataggcgacagctcgtcgcacgcctcagccacctccgccttgagcggcatggtcaccgacagtccgtcgatgcccagagcgcgcatcgcagccacggcatccgcaccgccgccggccggcacctcgaacgccacgtacgtccagtccaagccgaggtgcgcgaagccagcgttgtgcagcgccgggctcagggagtgccgcacggggtcgccgatcacgcctgcgactctcgtgtcaccggacggtgcagtccgcatagacacagtgtgcacgccagcgaagctcttcgggtgggccagtgccacgagtcgcggcaagcccgccaagatggccattcggcacttgcgaaaggtcgctgttcgtgtgacttgggctcgctactgtcaacggtgtggtgggcgatgacacttcgaacgggcctccggcagccccctgtgatcccgaagctgcgttggcgcgactcgtcgaggacggtgtcgtgtggggcgacgcggttgactggctcgtgtgcctgccagccggttctgtggatctcttcttcacctcgcctccgtatgcggacgcgcggcgttattcggcaatccatccggatcgctacgtggagtggttcctgccgtttgccaaagcgatgctgcaggccacgagggaatccggttcatttgtgctgaacatcaagaaccgcgtcgcagcagccggccacctcaggggacagcggcatccctacgtgtacgagttggtgctggagttgcagcgcatggggtggcgctggctcgagacctatatctggtccaagcccaatgcgattccgggtcggttcgggccgcgtacgaaagacagcttcgagtacgtgtaccacttcgccaagggcgttcggccgttctttgatctcgatgcggtccgggtgccgtatcggtcgagcgagcaggaaatcgcacggcggcagcgtgatcggaatggtcgacggaacactgaggccgggttcggccgtgaccgaagcgctacctatgacaagggtggtgccgatccgggcaacgtcatcgaggtccctcaggcgtacaaccagcactggggtcccgcgggtcagcacacggcggtgatgcccgaaggtctggccgagttcttcgttcgggctgcctgtccctgtgacggattggttgtggatcctttcgccggctcggggacgacggtggtcgttgcacgccgccacggccgtcgtgcgggcgggatagagctgcaccgcgagtacgtcgaggtatgcacacagcggatacagagtgaccaatgcgaacccgagccgggtgagctgcggcttgcggtttgagcatggcgctctcggagtctgaggaacggatactccgcgcagccgggtcggacccgagtccggtggcgcgtcagcaagcggtcggcgtaacgctcgcgaaacatggcgacgaagccgaggcctcgcgcgcgctcttgacccagagctacctcacccacctcagtccgtcgtttcatctcgttccgcgaggcaactcgatgttcgacgaggacgctttcaccgaggcgtactcggcgctggtgacggacacggagaacttcactcgtgtcgatgcagcatccctggcggcggtgctgctcgaatgcccggctgcgctggcaccgctgcgcatgattctcgggctgacgcataacgaactggcagttgccatccgtcttcacgaccccgactcgaacctggccggaggttcgctcaagaacctcgaacgcagcaccgcacaggaacaccggacggcggctcgccagcgaatcgtcgggtcgattgccggtgctgtgctggcgatgatgaatcgtgacctgctgaccgtgccgcctcgcgtcacgacccatttccattccaagctcgacaagggcgacacgctcgacgggtggcgaagcgtgcgcgagcacaccaacggggtgccctactcgacgctgctcttccagcggtacgtcggcggagtctggcgacaagtgcaggacgcctactccgaagtcaagggggacgccgtcctggaaatcccgctccaggacctgctggaggcacacggcgtgccctaccaccggacgaagcgcggagcgaccggtgccgcggagaccgcagcccggttcggactcaagccggggcccgacttcatcattcccgacgactcacccacccttgtcgtcgaatccaaggttgcagaagacggcgggaccgcgcgcgacaaggccgcacgcatccggaccttggtgacggcggcgaacgaacgcggactgcgagcatgcgcactgattgacggcaagggatggaccgaacggccgaacgccctctgcgacgtcatcctggccacacaaggccgtacctacaccttggcgacgatcgaccagatcttggagctgcccgagatccgggccctcattgccgaagcttgagtcacgcccggtcgcagctcgcgcccaagggttcgccggtccacgctgagatcgtccgcgggcaccctcagtcgagagggagccggtcgctgcccgtggcgagtacagacgggacgaggcgggccggagcccgcctcgcaacgtggtgcatactgtcccgcttcggggacgctgcttgttgttggcacccgtaggtaccgccaaccattccctgcgccgcagactactctgattcgcccgctcgccgacgggagcttcagcagacggtgacccagtgttgcgactcggactcgatctaggcaccaacagcatcggatgggtgctgtatcgcctgaatgatgccgactcgcccgagccaatcgaaatcgtggacggcggagtctcgattcacagcgacggccgcaaccccaagaaccgcgcatcgaatgccgccgaccgtcgcatgaagcgcggacctcgcagaaaccgcgaccgcacgctgcggcgacgccgacgagtggcggcacagctgcgcatatgcggcttgctgcctgaccccgccgaagatcgcgccccgtggcgtcagctcgacccgctgaagctgcgggccgaggcgctggaccggccgctcagccggttcgagctcgggcgtgtcctgctgtcgttcgcagagcgacgcggcttcaagagcaaccggcaggccgacggcggcgaggaaggcgccattcgcgcttcgacagctgaactgcagcgtcgtatcgaccagtcaggcacccggacgctcggcgagtacctgtggggtcgccgccagcggggctcgacggtgcgggcacggcccggcggcggcccctatctcggcggcggcctctacccggaacggtcgatgatcgagcgtgagctcgaagcgatccgagatgcccaagcaccgcaccatccagaagtcaccgcggacgcttggaacgatctcgtcggcagcctcttgtatcagcgaccgctgcggcccgtcgaacgtggccgctgcacgctgctgcctgacgaaaaccgcgtcctcaaggccgagccgctgttccagttcttccgcatcttgcaggaagtgaacaatgtggaggtcgcgccgcccggtcaagccgctcgcccgctcacggacgaagagcgcgaacgcgtggtcgcgaagctgcgacgcagcaggacgcgacgtttcgatcagctggttgccgacgcggggctgccggagggcacgcgctgcaatctgcgcactgtcgcgcgagaggaactggacggtgaccgtgccgccgtaccgctgcgtgcgaagaagtgcttcggcagaaaatgggacaggcacagccttgaggagcaacagcagatcgtcgaacgcctattggccgacacgaatgctgatgatctcgttgactggctgatggacgaattcgggctcgacgaagcagcagccgaggctgtctcagaggccaagctcccacccggcaccggcaacctgtccagagccgccattgggcgaatgctgccgttcatgcaaaacggcatgcggtatcacgatgcagtcacagcggcgggcctgggccgccattcggaccggcacggtgatgccagtcacgagcgccttccctactacggctcggtgctggctcggtatgcgaccggcgtcaagcctgatgccgcctcggaggtcgaacgcttcggccgcgtcgcgaacccgaccgtgcacatcgcactcggccaagtacgcaggctcttcaacgccatcgtcgatgcctacggcaagccgaacgaagtggtggtggaactgtcccgcgatctgaagcagaccgaggagcagaggcgcgaggatgagcgacggcagggcacgaaccgcgaacgcaacgaccgcctacgcgagctggcggaagaagcaggtgtccctgagccgtcggctcaggacatgcgcaagctgcgactgtgggacgagcaaggaccgccgaaccagcgggtctgcccgttcaccggaaccccgctgtcgatagggcgggtcttgtccgacgagaccgaggtcgaacacctgctgccgtacagccgcacgctcgacaacagcatgaacaactccgtcgttgcgatgcgtcatgcgaatcgggagaaggccaatcggacgcctttcgaggcatggggcgcggactcagaccgctatggcgagatcttggctcgtgcagagtcgctgccgaccggcaagcggtggcgtttcaacgctgatgcgatgaagcggttcagtgagcgttccgacttcttggatcgccaactcaacgagaaccgctacctgtcgcgcttggtccgggagtacctcgaatgcgtcgtcgagcgcagcagcatctgggtgacgcctggccggacgacggcgctgctgcgtcgggcctggggcttggagagcatcctcgctgcgccgggcagcgatcgaaagaaccgcgaggaccaccgccaccacatgatcgacgccgccgtggtgggcatgacatcacgatcgctcttgcagcgagtcgcccaagccgctgggcgcggcaccgatgtgggccggatcgcggccgacatcccgccgccatggcccgcattccgaaaggacatggaagcacttgcgagaaactgcatcgtccgacaccggcctgatcacttcactgtgctgggcgacaagcgcgagcgtcgccgcgccggacgcgacgtcacgagcggcagcctccacaacgacaccgcctacggggtcattgacggcccagacgagaagggcatgatgacgctcgtcgagagaaagcacctcactgccatcaagcccaaagacctcggacgcattcgagatctcgccctcaaggctcgcctgcaatccctttggaagcaggtccaagcggagaacgccgagagcagcgaatccgaacagtggcagcgattcgcgccagaggcccgccgacagatcggaatccgtcgcgtccgattgctcacgacgatgggcgaaggcagtttggcgttcatcggagacgccaccggcggcatctacaaggcctacaagactgacggcaatgcctacatggacatctggctgctgcccgatggcgggacgagaggcgagaccgtcagccgtttcgacgcgcatagtcagcggggccactcgcaaatcaaggcgaagcacccaactgcccgcaagctgatgcgtcttcacatcgacgacatggtggcgatgggtgagggcgagaaccggcagattctccgtgtccagcagctcagcgatcagcgggtagtcctcgttgaccacgctcaagcaggcaagagcaaagagatgccctcgttcagcaagagcgcgacccgcgtgctggtcgagggcatgcgcaaggtcagcgtcgacatcttgggccgtgtacacgacggcgggccgttcaaggccgaggccaggcagcgatcgagggaatgaacccatggagcgccgagtcctcgacatcgcaaccggtcggcgctacctgtccaagaagcgcggttcgctgtctgtctcgtgcgacacggaagggtctggggcctccgggcatctcgtgcccttcgacgagatcgagtcgatcatcgtccacacgccgcaagcctcctattccaacggagcgattgtcgaactcgcccggcgaggcatacctctggtttgctgcgacgcctatcacacacccgctgcatgggtgtggccgatccaagccaactacgagcagagcagacgtatggcggcccaagcgaagatgcctgacgaacttcgcgccgcactttgggcggtcctcatccgcgcgaagctggaagcgcaagccgcagtgctgcacagcgaaggccacgatgccgcagccttggaggactttgcctgtcgcgtgacacccgataactgcacgtcgttggaagcgcacggagcccggctgtactggacctgtctcttcggtgacgacttccgtcgccgtcgcgacggtctaccaccgaatggcttgctcaattacgggtacgccgtgttgcgagctaccgttgcgcgcaacgtttgtgcatcggggctgcatccttcgctcggtctccagcaccacaatcgcttcaatgcgttctgcctcgccgacgatctgatggagccgtttcggcccgctgtcgaccgcagtgtcctcgaactccggcgcgaaggacatcaagccgtcgatgtccatacaaagtcagctctcgccgctgtactggcccgcggcgtaacgacatcgagaggtgtcacgcctctcagtcgctgtgtcgagtgggcagcgcagtcactgaccaaggcagtgctggagggcgaacctcgaatccaccttccagatagccggtcaattgcgggatgagcgaattcagtggatacagattcatgtggaccgttgtcatgttcgatctaccggtggtcactaaaccgcaacgtcgacgcgccacaaaattccgaaacgaactgttgaacctcggattcgaaatggcgcaattctctgtatacatgaaattttctggaagccgttccgcagtcgacgccctcgcatatcgcattcggtcgcgaatacctcctgaaggaaatgtcagcatcctggcgctcactgacaagcaatatggtcaaatgcaggtcttcaatggaggggcgcgacaagagcgtgacacttcgcgaggtcagctcctgctgttctgatccgctttggttgcttaagttcaggtccgcgctacgtgaacatccggtcagaagcctcggccggttagggaatggtcggctgccaaaactcaacgccgacgagtacacatcagcgcacaactttagccggttagggaatggtcggctgccaaaacgtggtccgggcgcggacgagcaacggcagcactttagccggttagggaatggtcggctgccaaaaccagcgctcgccgcgtacgtcacccgttccgactttagccggttagggaatggtcggctgccaaaaccaagtgggtaccagacgccgtgacgcgcctactttagccggttagggaatggtcggctgccaaaacgcgtcggccgtgatcccgcacacatcacaactttagccggttagggaatggtcggctgccaaaacggactgtccatctcgacactgcatcgcctgcactttagccggttagggaatggtcggctgccaaaacccgatgggtcggcggttcgcaggacattcgactttagccggttagggaatggtcggctgccaaaacatcgccgtggtgggggtgagggtcaggtcactttagcgggttagggaatggtcggctgccaaaactttctacctcgaccggcgcaacctgcccgaactttagcgggttagggaatggtcggctgccaaaacnnnnnnnnnnnnnnnnnnnnnnnnnnnnnnnnnnnnnnnnnnnnnnnnnnnnnnnnnnnnnnnnnnnnnnnnnnnnnnnnnnnnnnnnnnnnnnnnnnnnaactttagcgggttagggaatggtcggctgccaaaaccgacctcagccgcacaggcccagttcttggcacaccgccttgtcgcgctggaactcctcgtcggtctcggagaacgacagggtgccgtcgggagaggtcagcacgaagtacatccagggtccgtcttccggattcagcgctgcctcgagcgaggcgcggcccggggtggcaatcggcgtgggcggcagtcccacgagcacccgggtgttgtacggcgagttgaccgccagcagctctgcggtcagctcgctctcgcccaccacgtagacgaccgtggcatcgaggccgagcgaccagccccgcgccagccggttgtagatcacccgcgccaccttggcccggtcctcgggccgctgggcctcccgctcgatcatgctcgccacgatcagcgcctcgtacggcgtcaggcccacacgccggggggcatcgtcgtagcccagatcggtcagcaccgcatcgagccggtcgaccatcagcgcgaccagctgctcggcactcgtctgggagtcgaagaaataggtatcggcgaagagctgtccctcggccggttcgatgacgccgtcgggcagcacgcgaggcactggcgcaaccagcgagagcaccggcctctcgcggatggcctcaccgaagtccctgccgctgaagctcaggccctccacctcgtccagcagcgcggccatctgcgccaccgtcaggccttcgggaatggtgagcgattgctgggcggcttgggcaacccggctcggcccggcctcgagcaccgccagggtctcccagacggacgagttggattgaaacgtgtactcgccggcctgaaacgccgggccgcccttgaacctcacgtaccactcgtaggcccgcgaactggggaccacaccgtgatcgccgagcaggtcggagatgctcgctgtgctcgatccgggcggcagcgtcagcacgatctcgccggtgggatcgccgggaggatcgagctgctcggacacccagcggtagccgcggctgcccgccatccaggcgatgacgccgagcaccacgagaaacagcaacgcgcccggcgtgcccaagccgcgtcgcgtgctcaccacctcgaagtcgacgcctcggcggcctccgaccggcggggagctctgcacaccggccccaggcactgatggcgacacggaggctcccggcggcagcggacgttgggcgtctgtggccggcgcggccgaaccgtgatcgccgccgatctccgtactcgctgcgagacccggctcggctcggggagattcgccgtcggatgccagccccacgaggccagcgagccggtctgccagccgtcgcacggccgatggcgctctcacggcagtcgcacggccggcgttgccggtcgcgtggcgcacctcgcggctgtcgcggggagcgtcggtgctgtcgtcagtcacgtgcgtcgagccacgactgcaggatgaccgcagcagccaccttgtcgatgaccttgcggcgagcggggccccgcatgccttgttcggaaaggatgcgctccgcgctcacagtcgtgtagcgctcgtcgtgcaagaccaccggcacgtcaagcgccgccgctatctcgccggcctcggctcgcacgcccaccgcagccggtccttcgctgccgtctagcgaggtcggcaggccgatgacgaccacctccgcacccacgtcagcgaccatacctgcgagtgcttcgtggtctcgggcacgctcgccactgcgttcgaggacttcgtagggcactgccaccgcagcatcggccggcgcgatggccacgccgatgcgcgccgagccgagatccacgccgacagcccgcatcatcgggcccggcgccccactcacttcccgagtgccgccgctcgggcctgggccagggcgtcgccgatgccgtcagggttgcggccgccggccacgaccagcggcgggtcgcccttggcgccgaagccaccgccgacggtgcgggccgcatcgcgcagcagatcgcctgcagacagatcgccgcccggatccaccgcggcaaccaacgccactcctccggccgccggcgcggaggccagcaccacggcgcggatgccgtcgcggtcgcgcaccgacactgccaagtcgcgcagtgagtcgcgttcgagatcaccgagttcggcgaccacgacgccgtcatcggccccggcagccagctcgtcggctcgcgacgcggccatggagcgctgcaggtcgcgtacctggcggcggagctcgcgggtctcgtccagccgtcgctgcatggctgaggcgatctcgtcgggctgtgcattcagcatctcggccagcgagtccagtgtgtcttcggcgtcggcgagccgatcgacagtcgcgaggccggtgaccgcttcgatgcgacgcatgttcgagccgatgctcgcttccgagacgatgcgcaagtgcccgatatcaccgagcgcggccacgtgagtgccgccgcacagctcagtcgagtgctcgccggcctcgagtacccgcaccacgtcgccgtacttgtcgccgaagaaggcgacagcgccgatggcttgcgcgtggctcatcgaggtctcgtagtggcggcagcggccattggcgatgatctcggcgttcgcgacacgctcgatctcgcgcagctggtcgcggctgaccgcctcgtaatggctgaagtcgaaacgcaggcggtcgggcgccaccagcgagcccgcctgtttgacatggtcgcccagaacctcgcgcagcgcccagtgcaggatgtgggtgccggtgtggttacgccggattgccgcccggcgctcgtcgtcgatcgccgcagtcaccagcgatccgacctcgacgccgtcgcccacgacacgcccgacgtggcggtgcaggtcggcgagtgcgtaggtgcagtcgagcacctcgatgctgccgtcgggaccggtgatggtgccgatgtcgccgatctgcccgccgctctcggcgtagaacggcgtgcggtcgaggaacacctcgaccagatcgccgcccaagtcgtcactgtcctgcccgccgtcgggcggtatgtcgaaagtggcgagcacccgagcgtcggccaccgtcgatgcgtcccgcacgaagtccgtgggcccgaactgcgccaggatctcccggtagcgctcgtccgcaaacgtcgggccgccggcccggcccgcccgtgctcgctcgcgctggcgttccatggcagcctcgaagccgtcacggtcgaggctcaggccgcgctcggtgaggatctcctcagtcacctccaccgggaaaccgtgcgtgtcgtggagcaggaaggcgacctcgccgtcgaacactgtcgaatcgagcccagcagtcgcttcgtccaggatcttctggcccgcagcgagggtggtccggaagcgctcctcctcgcgggccacgacatcggcgatgaactgccggttcttgaccaggtcggtgtagtgatcgcccatcacatccaccacgatctcgaccagccgcggcatcacgacatcggtgacgccgagcacccaggcgtggcgcacagcccgacggatgatgcgccgcagcacgtaaccgcggtcttcgttggaggggaacacgccgtcggagatgagcatcgccgtcgtgcgggcgtggtcggcgaagatgcgcatcgagacatcggtctcgggatcggcgccgtaggtcttgccgcagatgcgctctgcctctgccagcagcggcgcgaacaggtcgatgtcccacgccgcgggcacgccctgcagcaccgccaggatccgctcgagtccggcacccgtgtcgatgccaggggcttcgagcggcgtcatgtcgccggtgccgtcggcagcgaactgcatgaacaccaggttccagatctccacgaagcggtcctcgccgccgtgcgcaggacccccgccgtcgccgagctcgggtccgaggtcgtagaagatctcgctgcagggcccgcatggccccacatcgcctgcggcccaccagttgtccttgtcgaggcgctggatgcgctcgggcgggacgccgaccgaggtctgccagatctcggcggcctcgtcgtcgctgacgtgcaccgtcacccacagcttctcccgctcgagtccgagcacctcggtgacgaactcccacgcccacgggatggcttcggccttgaagtagtcgccgaagctgaagttgcccatcatctcgaagaacgtgaaatggcggttggtgcggccgatgtcgtcgagatcgttgtgcttgccccccgcccggacgcacttctggatggtgaccatgcgacgcgtcggcggcacctcctcaccgaggaagtacggcatgaacggcaccatgcccgccaccgtgaacagcagcgagggttcgtgcgggatcaggctcgcggaagcgcggacatcgtggcctcgttcggcccagaacgagttgaacgcttcacgcagttcgccagcgcgcatccccagaggatacgacgcactctcgcggcctctgtggccgccgacgcactttcgcggcctccgtggccgccggaggggctatcgcggcctctcaggcggcttcgcggcgatggcggcgttcggcccagcgacggtcccgctcgtcgcgcagacgctgctcagcatcctccatctgccgcttgccgtcatcccacgccgcgtcgaggcgcttgcggccgtcctgccaagcgtccttgagatcacgacgcatctggcgggcagtgccgagcgccgtcgccgtgccgcgcacgggcgcgtatcggtcgaggaggtgacgcagccgccgctgcacccacagcgaggcaccagcacccagtccggcacccagcgtcagccatcgcaatcgtttcagcatctcagcgccctgcttcctcgctgcctgcagacgtctcgctctctgtgccaccgaacttgccgcgcagggcttcggctgctgcccgcaccttgtcgaccggcaccccggcaatccttgcagcgccggccccggcggattcggccagccctgcgaccttctgcgcgatgttcaacaggtcgcgcagccggccgatctcggtctgggccatctcggcggtatcggccaactggccgagcgccggcccgaccttggcgtcgaagtcctcgagcttgcgccggaactctcgcatcaatgcgaacgcctgggtcagcacagcgatcagggccactagcgcgaccaccacgcagacagtcaccaccacggcggccagatcgctgctgctcatgactcgtcctcgtccgcactgccgccctgctcgccctcacgggcgacggcaccttgctcgccgtcgccggcgacgactgccagccccaactcttccagctggtcggcagagatgtggctcggggcgttggtaagcggatctgcaccggactggctcttgggaaacgcgatgacctcgcggatgttctcctcgccgcacagcagcgccgccagccggtcgatgccgaacgcgaagcctgcatgcggcggtgcgccgtagcggaacgcgtccaacaggaacccgaatcgctcctgcgctgcggcggggtcgatgcccagcagatcgaagacttgctgctggatgtcgccccggtggatccggacgctgcccgagcccagctcccagccgttgagcaccaggtcgtacgcctgcgagcgcacgtccagcagggtgtcggcgtcgaagccgccgcccgacgccatacgcgccgaagccgcagccacaacgtcgagatcgtcggcatggggcatcgtgaagggatgatgcgccgggatcgggagtccgtcggcgctcacatcctcgaacagggggaagtcgaccacccacaggaagtgcaggcccccctcgttcaccggcgggcggcccagctccagccgcagcaggccgagcaccccgctggccctgcgccaggtgtcagccacgaggtagcacatgtcgcccggctcagccccgaggcgccccagcacaccgtcgatctcagcatcggacatgaactttgcgaccggcgaggtgacggccagccggccgccggctgcgctgcgggcaccctcggccagcggctcgccggcgctgacccgcatccacacgagacccttggcgccccagcgctggcactgcttggtgagatcatcgactgcgttgcggctgatgtcgccgccgccgggcacccggatgccccgcaccgcaggcgccttgaacgcgttgaacccggtctcggcgaacagatctgtgagctcggtgagctcgagcccgaagcgcaggtcgggcttgtccgacccgtagcggtcgatcgcctcatgccaggtgatctcgggcatcgccgcggggcgcacgccggtgatctcttcggccgcttcggccactgcctcgctgatcacggcgcgcacttcggcgccgctggcgaagctcatctcgaggtcgagctggctgaactcgaactgtcggtcggctcgcagatcctcgtctcgcaggcagcgggcgatctggtagtagcggtcgatgccgcccaccatgcagagttgcttgaacagctgggggctctgcggcagtgcgtagaagcggccctgatgcaggcggctgggcacgacgaagtcgcgggcgccctcaggggtcgaagccaccagcgtcggtgtttcgacctcgatgaactctgctgcctccatcgaacggcggatcgctgcgttcacgcgtgcccgattcaccaggttcgagtgcatgcggggattccgcaggtcgaggtagcgatggcggatgcgcagcatctcgtcgacctcagtgcggccatcgatctggaacggcgggggctccgagcgcgacagcacctcgacggtcgcatcgccgatctcgatctcgccggtggccaggtcgggattggctgtatcttctggccgttcacggactgtgccggtcaccgccagcacgtattccgagcgcagatcgtgagcgtgatccacgacgcactgcacaatgccggtgcgatctcgcaggtcgacgaaggccaagtgctcgccatgctcgcggcgccgcgaaacccagccgcacacggtgacgttcctgccgatgtcggcgcggctcagccgcccgcagtagtcggttcgcattgggtcgcccatcacgttccaccttccgcattgagctcgtcgaagatgcgccgcagcgtgcccagcaggtcggcacgcggcacgatctgctgcgcaaagtcagcatcgccgccgtcagggcgccgcagcggtcgcaccgtgacggtgccggcgtcgacctcgtcggtccccacgatgagcgctatctcggcaccggagcggtccgcggcgcgcatctgcgcccgcatcgaccggtcgtcgaaggcccggtctgcccggatgcccactgagcgcaactcatgggtgagatcgcgtgcggtggcgccgcccgccgtgtcgatcacccacacttcggcccgctgtgccggaacgtcgaagacgccttcggcgtcgcaggccagcagcaggcgctcgatgcccagcgcaaagccgatgccgggcgtcggcggaccgccgagcgcttccacgagcccgttgtagcggccgccgccgcacaccgtgtcctgggcggcgtcgaggctggcggcctggaactcgaatgtggtgcgggtgtagtagtcgaggccgcgcaccagcttgggctccactcggtgttcgatgccgagcgcagtgaggccctcgcgcacccgctcgaagtgggctgccgtttccgtgttcaggtagtcggtgatctgcggggcttcggcggccacggcctcggttgccgcacgcttggagtccaggatgcgaagcgggtgacgctcgatcttgtcccggtcttcgggatccacgtcggcggcccgctgccgcaggtatgtgctcagcgcttcgccgtatgcgacgcgcgtgtcggcgtcgcccatcgagttcaccagcagcg

SEQ ID NO: 3337 - DNA, 23117 bp, synthetic construct
  misc_feature 1..23117: note = Synthetic
  source 1..23117: mol_type = other DNA
gtggatccgttcacgcgtccgcagtgttgtcctattgcggacggtgcagcggccctgatcttagcaggcgatcgggtcgccgctcaaatggacagggcgattgctattcggtctgccgttctgacatcaggtcggtatgaaaatccagccgatttaacacgctggcatacggattatgcctcggttgcgctggcctatgaaaaggccggtaccacgcccgaggacgttgatattgttgaatgccatgatgctttttcaatcgcagaaatcctgcactatgaagcccttggtctatgtgagagaggcgagggcggcaggttcgttgaaaggggcgatgcctctttgggcggcaaggttccggtcaatgtgtccggtggccttctcagtcgcggccatccgatttccgcaacaggtgtagcgcaaatcgtagagcttgtgacgcagttacgacaggaagcaggcgaccgacaggtcgaagactgcaacctcggagtggcgcactgtatgggcggtgacaaaaagggagacaccaagtcctgcacagtggcggttttatcgcggtaaggccgcgacttttttggacccagttttgggaagatgggagagagaatatgtttaagattaccagaatgcatcgattgctgggaacaaccgtattatcgggtagtttactggcaggcgtagtaactgcgccagccgcgaccgcacaggagggcggtttccagttagaggaaattacagtgacagcgcgtaagcgggttgaaagcctgcaggatgcgcctgtttctgtaacggcctttacacagtcaggcctggcgaacaaaggtattaccaatgtcagcaatatttcggcctatacaccgaacgttgacattaaccacggcaaagcagatggcggcagcaccaatgcatctatctttatccgcggtgttggtcagaatgactttattttcccaactgatccgggcgtgggcatctatatggacggtgtctatatcgcgcgcagtattggcggcatgatggatcttgctgatatcgagcgggttgaagtgctgcggggtccacagggtacgctgtacggtaagaataccatcggtggggcgatcaatattatttccagtcgccctgacggcgaatttggcggtaaggtcaaggccactattggccagcgtgacaggttggatattgaagcagacatcaaattcccgatcacggatgacaaagtctccgccaaagtggcagtggcgtctaaaaaccaggacggatatgtaaaacgcacgtcggatggtttggaccttggggataccaatgttgatgttatccgcgctggtttgaatgtgaatgccagcgaggatgtgacggtatatctgaattttgatgccagccgcattcgtcagaacggtgcgccgggcaccttgctggaaacgtttgattcaccgggtagtttgtatggtctttataatgccatcggagcgccgttaattgccgcaatggaagggttgcccgagggcagtatttatgatgaccggtatgtaacgggtgatccgtacttgtctagcggtacagggccaacgcaggataaaaatgatacctgggggctaagctcgacaattgactgggcactgtctgataccgttgcgttgaagtccattacggcgtaccgcgagatggatgctgttattcaaacggacattgactattcaccgttcccggtaatccatacggatgaagaacaggaccagaaacagttcagtcaggaaatccagctgagtggtgatgcgtctgacggccgcttgtcctggttgcttggcggctattattttaacgagcagataagtgatcaaaatctgacccttctggcgaacggtctgtatcaatccctggagatgatgccaggtgcctttgttccccttgtgccggggataacctgtccggcagcaccgccagcaccgtgcgttggcggcgccggcaatccgctaaatagtatgctggacttggatgtcagtccgacgacgagccttgatacagacaatttggcggcatttctccatgtcagctatgatatcagtgagaagctttcggtaaccgttggcggtcgttactcctacgagaagaaaacctatttcatcgactcgatttacccggcatcgggacgtgttgcgactccgccgacagaagacagtcagaattggtcgaagtttacgcctaagtttggtcttgattatcatgtgaatgaggatgtgcttttgtatgcgacttattccaaaggctttaaaagcggtggctggaacccgcggccgttacagcctgcagagttcaagcgctacgatcaggaaaatctgactgcgtatgaagttggtgtgaaaagccgcctgttggacaaccgcatgacccttaatgtcgcgggtttccttagcaactataaagacctgcagcttttctccaattcggttaacccagaaaatggatccctgctattaacggttgataatgcaggtgatgtcgatatctggggtttcgaagccgagatggttgcacgcctgtcagaagggttcgatgtgaatgcgggcatcggttatatggacaatgagtataaaagccttgctgcatcaacgggctattcaattgacaacaaactgcctaacgctgctaaatggacacttaatgcaggggcgcagtatggtttcgatctgaataacagtggccggttgacgctgcgcggcgatattgtccaccgcagcaaaactttcaataatccgcaaaacacgcctgaaattgctcagaaggcctacaccgttctgaacggtcgtctgacgtgggacagtgctgatgaagattggcaactggctgtattcgtcctgaatattacggacaaggaatatttcaccagtgcagagtctattccggcatttggtatcaggaacgcagtatatgggcgcccacgcgaatggggcctctctctctctcgctcgttctaaggttacttaatgcaggattggatgaatgggccggtactccggcccattttgttttgcagcatgtccgccccgtggggcggcaaactctttcaagacttaggatgctaaggcctgtttcaaaggggccagttcttcttcgacggctttccactgtcccatgcctttcgtatagataggctgtcggacctgctcactgcttgcggttctgaccgggcgtttattttcaaagaagcgtagacagttttcttcaaatggcaggccaatatggtccagtatcgtgcgaatagtcgcttctgtattttggaccatattttcatattgaacggtcaatacttttcccggtaatgcctcgttgaaatggtcaataacccttaagtatcctttgtagtaagcaccgatgtggcccaggttatagctatattcatgtccagcagcgaaatgctggcggtatgcactatagccgcaatccatcgggtctcggcgggcatcaatgataatagcctggggcaggattttgtggataaggccgatacgttcatagttgggcggcaatttatcgatgaaatagggcttcccagtgcggaagattgcgctgttatccagatactgttgcccataggcagtgagcgcatcaggactgaatttttgcaggctttcaggatagtcgcatttaaaccgtctgccgccttcgatacggatggtgcgttccagattgggcagggtattcagttccatggtcccttcaatggcagaatggctggcaaggatttgttctatcagagttgacccggcccgcggcataccgacgataaagatcggggtcgggccggtgggcactgtttttgcctgttgctgtaatgtctggctgtcaaatgaagccagtagcctggtgataaactggtcatttttaccgggatcaaaatctatgtccgggcgcaggttgtttgcgactgtatattgtgcgaaggctgcctttgcatcgccgcggttttcaaatgcctttgcaagtgcgaacgcagcctgtgaccgctgggctgcatccagcgtttcatcatccaccagtgtctgcatatctgcttcatcctgcggggtgaactgaaatgtcttcaggtcggcaagtccccaccagcctgcaccgttccccggtgtgttcttgatgcaggcccggtaagcttcttcgctttcggaacgctgccccaaaatttttagagcatgaccgcgcatcaggtccagtttgccgcgttcttcgctgccgccaggcaatagggcaattgccttgtctgcatggtcgagcgcgctattgaagtcaccaacatggccagcgacccgtgcacgtatccagtggctggtgacacttggatcaagggttaccagcatatcggcgactttgattgccttttcataggcgccaactgcctcgtatgcctcgctcagggagcgatacagcatggggttcgctggatactgtgccagcgaatgttccagtatttgtgcctgttcttcatgggcaccgacagtgctggcaagataggccaatgcaaaggcaccgcgcggatgtccattaacacgtgccagcatgttgcgtgcggttccttctgcgcgggcgaagtcccctttctttatagctttctgcattttgggaaattcagcacccaaggggtctgtattttcgcaggcctcattggctgtcagtgcttctttcatattgccacacgcaaactgggcctgtgcaagaaacacccaggcctgatagaaatttggttgtagttttgttgctgcctgcagcccttctaccgcgagcgccagattgtcagctttcattgcgagaaaacccagatcagcctgcgcagcagcggactgtgggaaccgcctggcagtgtcacataataccttgagggacgcgtccttttcacccgcgcgcatcagtgctgtggcatagagagacagtgcggtttcgtcgtccgggttatcagttacatgcgctgcaagcgttggaattgcctgtgtccattgtccatttttgatgaggtcagccattttgctgtgaaaagacatacgcatgttcccgatctttaaaggttggcttagatacaagtgaggcggcaacttggggtcaccgcctcgtttactgtattttagtctggcctagaaagtaaagtccaggcgaacagcaagatttctctgatcgccgtatgtttcatacagcgtattaccggaccagtcgctccgggaacgggagcggcggtaagtaatgatgtttgtattcagaacattattcacatgcaggctcaggcgtgcattctcgttgatctgaatagaaccggacagattcacaacttcatacgcaggagagacgtcagaatcttttgtattaaagtgtgatttatattcaccgtaaccggcaacatccagacgcacacttgcttcacggccatacagttcaaattcctgatccagtgctgcatagaagttatacttaggcaccatggtcatatcgtcaccatctttggcacccagtgattctacgtcactggtcatttttgaatctgtatatgcagcgttcaagatcagcttcaagctgtctgtaatggttgtagtactttcaaactccagaccacgggaccgtgcagacgccgcgtttgccgtgtaggagaagccacaggacggcatatagacaacagcctgtacgtcggtccagtcgatctggtacacagcggaagagaactgaaccttacggtcaaacgcaaaacctttgaagccgatctcatagttcttgatcttgtctgacgaatatcggtcagtgtaagagccgatattctcgtcgttgcgacagtcagcaggtgcgttcgggccgttgttaccacccggacggtagccttcggaatagatcgcaaaaacggcgaagtcattggacggcatccagtttacactgattttcttccgtgtgccgctctcaccgtctttggtgattgtttcctggggttcgtcgccgatccagatgcctgatacttcatcatgcaggtcatctttcagatcataatagcgaaggccaccagttacttccagcttgccagcgtctttcaggtcaaacgtgtagcctgcttcaccaaagaatgcgagctcgcgcgtgttccacttgtgaacggtgtaattgtagtttttggtcgggtcgccatacaagtcaaggccgatctgagttggatcacccaggccccagtattcaccccacaggtatgctgcaatcgcacgggacttgttgtcgctggcgtgatactgccactgtccgtcaggagtcttcagaccgatgtccttgtcgtagaagccaccaacggtccactgaagaggtccttcgccgttggactgcaggcgcagttcatgtgtccagcgatcattgccgtccttgtcgatgatccatgtgcggaacatatcgttcgcatcaaactgtgaccagccagactgacggccatcataggtattgcggcgccaggaacctgaatattccagatcaacaccgtcgaccaggttatatttttcaacattcaggacaaccagattggatgttgttttaacgaatgggtccatgatctgccagacagcaaatttcgggtcgtgaccattaagctgaccaccgcgacattccgaccgctcagttccttcagggcagcttgggaaatcgaaagcgacatcatagccgtatttcgcatcggggttggctgtcaggatcgcttcataataataatcaggcgtggaccggtccgcatcagagcgggtgcttgaatactcacgagagttcacgaaagaaagattaactttcgtgtcttcgttcggagcccacaacgcctgtgcgcggatgaagtggtcttcattcgtgcctgtattattggtgtatgtgttcagaattttaccattttctttggcggcagaacccgtcacacggaacgccagtttgtcttcaactacaggaatgttgacatacccagagccgcgaacaccaacacccgggcggttcttctctgacaggaacagggcagagccaccaatttccatttcattcaggtttggctttttggtgattacgcgaaccgtaccaccaattgcatttgaaccgtacaaagtcccctgcggaccacgcagaacttctacacgctcaatatcatagaggttgctaaagtcgtatggaataccgtcggtaaaagtagaggttgtacccggtgtgctgtcgttaccgccagcaagaccgcgcaggatcagttcgccacgtgggctggctgcacccgccacagaacggaaaatctcttccttggtgacaaggttccgtttcaggatttctgtttcgccaacagccgcgatgttcatcggaacttctacgatcagttcctgacgtttccgtgctgttacgtaaatctcctcaagacttgcaacttcttcctcttctgcagccattactggtgcgtttggcgccgccagtaccccagctgcaacagagcctaataataactttttgaaatattctgaattgcgcatgaatatttcctccctagctaaattgttaacgcgttaaatttagtgccacgcgtactagatcaaaagttacagactgatacaatcgtttatggggggttgtctgacattaaggctgtattatttgcaggtgtggtattcctgacacaatgcgatagtcatttcagggtatggttgtacttttccgttggtccctgccaaggctcaccccatctcaaatctatttaagcgtgttcggctttttgttacgagcgcaccgcacgtactagccatctgttaaaggactttacattgaacaaaatcatactggctgccctttgtatcagtctccaaacctttacagcagggagcgtttgggcatcggattccgatttatcctttaagcctgtgcatatcactgatggtatttacagtattatttcaccgtcctacggcagaccaacggtagaaaatcaggggtggaattcaaatagctattttgttgtgacagacacaggcgtgctggtgtttgacacaggctcatccgagaaaattgggaaagcaatcatcggggctgtacagaccataacggacaaaccaatacggtgggtgataaattctcatagtcatgctgatcactggttgggcaatgccgcctttgcagatttgggcgctgagatcctttcttcaccgcaggcgattgatacaatgaaaaatgacgggccgctggatgtcaaagccttcgcgcagatgacagagggggccacaggcacaccgcgcctttctttgccgggcattataataaaccatggtgaaaaacgcctctttggggacttggaggctgcgttcattttctcaaatgacggtcattctcccggcgatatattggtatatctgcctggacccaatgtggttttgggcggggatgtcgttagctctgactatttgccgatcatgacacaccacggaaacctgacagccttgatagagagtttgcaggccctaacggcattaaaccccgcgattattttgcccggacacggccagccaacaaccaccagatccgttattcgtgatagtgagttattgcgcgacgtcgtaaaattagtgatgaacggcaaagcaaacagtaaaagccctgaggaagtcactagggatgtggtgactgcactggggccaaaataccgatctgagtatgctgactttgacgccaatagccagtatctggtcacgatgatctaccggtcaactgtctcagaccctgatggtggctcaggtcgctagaagatacagccctgtggtttgatatggggttttaagaaaacctgtctgggccacggcaaataagtatttgacagatcttggataactaagggaaaattctcgccttagatgtattaactagtcttaaattaaaggttgagggtgctttttgattggtcaggggtcgagaaagattatgactctaagacattataaggaccagaatggctagcgcaaacctgcctgaccgacatgatgacgggccccctgaaggggcaaaaactgaacatgattaaaactgatgtgcgcaggggtgaaaagactgtgactgtgattgggggagaagtgtgatggcgtttcaacaagttactggtggccgcctaatagacccaaagagagatttggaactgtgcttctatagtggtcatatggatacttctacatattttttccacagaactggccaatgcagagataagaacaaagaatgtgacagcttggggggtgggtttaaggtagtgagcaaatttgcccggatcatgacggatgaagaaagatcaatttatccagcggataagacacatatcgttgaatttcgtattgtcggaaagcggggaagaaaagacggcgatgaatatctgccacctctaaggacaccgcaaatccaagggtacagccgcaaggaaagtttgaaaataatggaagaagcagttctggcattaaatacaatcgataagacaacgtaccctgaactgtttgaaagatgccaatatcaacaacatattgtcacgttttggccttttgcatcaaaatggcaagaaggtgaaggataatatcatggccctaacacttgaaggtgcgattgaacagattaggaattccaccaacacgggcatagactttctcaatgaaatgcgcagcttgatcgtaaatgatgtagatgcatcggcacccgccggttcgactgtgctggcctaaagcggcaaatggcatgattgggtttggaaagaagggtccggtacgtttttctgaccgtaagtggcgcaccgggaaggattgccataattcaacgataatttttattgtataaatgggaaaaggcgggcctgagcaccgcctttcaatctggtgtatcttgcccgaaggctcaacttgttgttgactggaaaaaaccaaagccagccacaatctgatctgctgtttacatatctagcactccctgattagtatagcaatatctatttgagggggagtgaattatgcacagattagggctggatgttggcacaaacagtattggctggattctaattgatactgagaatcacagtttcgttgatggcggtacgttgatttttccagatggacgcaatccaaaagacaaaacatcaaatgcaaccaagcgtcgggaaaaacgaggtccacgccgtaaccgcgatcgtggcctacgccgcagaaggcgtttagataaccttctaacagatttgggcctgctaccgacacagtcagaagaacgtgacgccattttcaagcttgatccctggtatttacgagcaaaggttcttgatcggcaagtcacaccctttgaactgggacgagccttgtggtctttccacgaccggcgcggctttaaaagtaacagaaaaactgacaaagctgatgacaaaggcaaaatgaaacaggatatcaacctgttacaaaagcgcattgatcaatcacctgccagaactctgggcgagtttcttcaccttagaaagaataaccgccgacacaaaagtggcagaagcatcaaggcgcgtttgggtaacggcctgtacccggatcgttccatgattgaacaggaactcggcgtcatcatggcagcgcaggctgaatatcatccggacataactgaaaaagactggcaatcaatcattgatacgattctctaccagcgactactaaaacctgtagagattgggaaatgcaccctgaaccctaatctgcctcgcgcctacaaggcaatgccaacctatcaacggtttcgcattctgcaggacctcgctaatctgcggtttgcacgccccggtgagccacaacaacttcttgatcagtcacaacgctataaaatgtattatgaactgctcaacagaaaagatctgccgttcgaccgtatgcgattactactcgacttacctgccggaacacatttcaatttggaaggaactagccgcagtaaactggatggcgacctgacagcctactccatggccaacaaaaaccgctggggcaaggagtggagaaatttgtcccttgctaagcaggatgaaattgtcaccaagcttttgcatgaggaaaatgaggaagcactgatatcctggctgcaagacaatggcatcgctgacaaatccaccgcagagagaattaccacaagtccactacccgccggcacggccagtttttcgctttctatactgtctgcactggttgaggtcatacaggaccagggattgaacctgtccgatgctgtaaaagaaatcggctacgacagccacagccaattgcagcatgatggctctgctgtcgccctgccgtattacggcgcagcgcttccgcgaagtgtgctgggggcagactctacaaaagatggtaataccgaccccgtaggacgctatggccgtctcgcaaatcccaccgttcatatagcccttggccaaatacggcgcctgttcaatgaaattacggaccttcacggaaaaccttcagaggtggcaattgaactggcgcgtgacttaaaacgatcgcaggacgataaaaaagaaatcgagaagcagaacaaaaaaaatcaggatctaaatctgctattgaaagaacaaatggaaactgcgggcgttcccttttcccctcataatttgcgaaagatgcagttgtggcatgaacagaaaaacgctacgggcattgctgaatgccccttcacaggtacgccccttaatatagaaatggtattaagtgatgccacagaaatagaacacctgctgccattctccaaatcccttgacgacttgcgcaataacaaggtcctggttatgcgcgatgccaacagggaaaaaggccgcagaacgccggccgagtggttcatgcagtcaaagtccgttgacgcctatcaggcaatgatagcccgtgtacaggactgcatcccggccaaggcatggcgctttgcccctgatgcatggcagcaattcgaagctaaaggcgactttctttcccgccagcttaatgaaacccgctatctatcacgaatggtgcgggaatatctaacaaccgtggtacatccagacaagataactgtttctcccggccatctgaccgcccttcttcgcggaaaatgggggttaaacaatatactgaacgatagcaacataaaggacaggctggatcatcgtcaccatatgatcgatgcggctgtcgttggtcttactacgcgctctatcctgcaaaaagtagccacagccagtcaccgtgcagaagatacagaccgcctgattgcagatatgcctgtaccgtgggaaggtttccgcgaggagcttgccagcctcgtgcgtagttcgactgtgcactttaaaccaaaccatgcgaaacccgcaaaaggtacgacaaccggcgccctgcacaatgatacagcttacggcattgttgatggccctgacgcaaaaggcatgtacacgctggtatacagaaagccattagacagcatgtcaggaccgggggagcttgataaaattagaaatcctggcctgaaacaaaagttaaaaacattctgggaaagctatgcagagggtgcagtaagcgaaaaacaaaaatggcaacaattctgcttaggatgctctgccgatctcaatatacggtcagtgcgcatttacgaaaccctgtccgcagggtcgctcgcactgatcagggataaaggcgggaaaccctataaagcctataagacagacggtaacgccttcatggatatctggctgctgccgaacgggaaaaccaagggcgagacagtcacacgctataatgcccaccagaaagactggacgtcggagataaagcgcgaccatcccacagccaaaaaactgatgcggctccacattaatgacatggtcgcaacaggggaaggcacagaacgccgcatcctgagagtgcaacagctatcgggccaaacaatcgttatggtagatcataacgaagcggggaatattcgtgaaaggtcaagaacaaaagatacgcaattgcaatacaaaccactgcaaaaatcagcggggaccatcatgaaagaaggattacgtaaaatttcagtgtcccgaacaggcaaaatactggatcgcggcccgattaaactgacataaagacaagggacatttcattggaacgacgcatcctagatatttcattatagcagatcagatcgtggcaggcagccaaaacgacttttccgaagcatccttggccgatctggttatagcagatcagatcgtggcaggcagccaaaacaagtctatgtgtcggcacaagtatgcaaaggttatagcagatcagatcgtggcaggcagccaaaacttcggtcgcgtcacactgcaaaacaagggcgttatagcagatcagatcgtggcaggcagccaaaactgttcaccgctcggcctacagccgatcggggttatagcagatcagatcgtggcaggcagccaaaactccaaatccttcaaatactcgcgccatccggttatagcagatcagatcgtggcaggcagccaaaacgcgccgtcaatatccacttcaatctggaatgttatagcagatcagatcgtggcaggcagccaaaacgggtataaaaaagcacagcccaccggtggtgttatagcagatcagatcgtggcaggcagccaaaacccgatgaccgacgatgtcccggcgcgaaacgttatagcagatcagatcgtggcaggcagccaaaactcgttgccgctgttgatgaatgaataataagttatagcagatcagatcgtggcaggcagccaaaactgccctgcactagctacaatatttgagcgagttatagcagatcagatcgtggcaggcagccaaaacactactggatcagaagcacaaaacaaacgcgttatagcagatcagatcgtggcaggcagccaaaactcggcctgcatgatttcgaggcggctcaaagttatagcagatcagatcgtggcaggcagccaaaactgccctgcactagctacaatatttgagcgagttatagcagatcagatcgtggcaggcagccaaaactgtcccgcagtttggggaggggttgcgcctgttatagcagatcagatcgtggcaggcagccaaaacttccactcattcacccaattctcgaagcaggttatagcagatcagatcgtggcaggcagccaaaacctgttaactgtggcactaaatggaaaaatagttatagcagatcagatcgtggcaggcagccaaaacgaggttttagaggttagtcaaagaacggtagttatagcagatcagatcgtggcaggcagctaaaatggccatgaaaaaggaagaagggtccggtacgtatttctgaccgtaagtggcgcgccggggaggatgaaaatgagaactggttacttacagtgcaccttaagcttaaggccttttagtttttgatacgcaaagtagagaagggcttcaatcaaacggatggatattattattactgctcctaaactctctatatgccaactcttgctgacggtgtacaagactgagcatgtttcatcttcatggttctgctgctgcattggatacgttgaacagatatactgcggaacaaccgctcaagtcgtggcataatccatcggaaccaaaaagcgcccgaatagagcgctttcttttttctaacctgcctgtctattagtaaggcctttttgctatcagctcaattgtgtgaaaataacgcgtaggtatgccaacacctgtaatatcattttgtgtcacaccctctagcttgatgccgcgcttatttccgtcagggttttgggccgtcactcggataattccagtctcatcaggtgctaaaacaccagaatgaatagccatagtctgaaagttgcttctcgcgtcataaaccatctgaccgttataccggcctgcgtaaatgtctgaagcataatcaattgctgtaattgaaatcacgtaggactctttttgcctcatccttcttggcctcactgttgctttgtgctcgtttaggaggctgatgtaggagtcatatttgctgataaaatctttgtcgttggtcaatttctctttaaggtcgtcatttaccgtatatcctgcgatcaaaccccacttttcatcaaaagatgtacccgttattttattgatcaataaacattattgctgaaatccatcatccgttttagcgagatcagatattgcaccgtttttgtatctataaagatgccggacttgatttctattttcgtttattatgtcgcatatatgagaagggtatgaagtataatcatactcatcccttttgtagctagaatccatttttatttccttcatcccagcgactaatagaacaatagacttatcttcttctatcaatttatccgcaatatccttccgtaaaagcaagtatttactcgacggatacttagagaataaatctatcttacgcattttgactgcgggacatcctttcgcatcgtacaggtcgggtgatcttgatctgatacccaaattcagttgatcggcaattcttgtatttaggaacgggatccctgacacatcgttacatatagaatgataagattcccaagtataatgggataccatactgatacaattaaccccaccactcgtaacccattcacccggtttacgatattcatcctctattagcacctgaccatttaccattaatccagagtgaagtatgggctctgcctcttcgtcggtaatatattgatgcttcgtaaagtgttgctcttcagtgggctctttacacggcgcgaaccaactttctgacgcactttccctccaaggggtttcaccgaaatacgtgtaatagaactcagccggagatgtgaattcatccaaccttatttctggtgaaaatgactcaataaatgtctctaagtacttatcctcgacaataaaagccttaacgtctaaccaaaaacttctatcatctgtttcgcagtctgatttcaaatgagcgtcgataattatccacttctgatcagcttggttcacacttaaatacttggtgaggtccggatattcatactctgccagccaagtctctatcttcatttcttccgagtatatcactggcaaaggaatatctgcttgctctggcggcaatatgaaagtggggtcaatatcacaatcactagtacgctcattttgccggaactcaggcagttttccatgtgcctgtcgcagaccaaccatttcaaaaaaagcgatccaagaatatttcttgccatatctatcaattttgcttgcctcaccgccttgacgcccaaagacttctcgtcgttcaagaggttcaaaacgatcagtgtcataccctaggtctgctattctccactcaatctgctttagaacatcttggtactcttgatgattagaatcatagttggcccgaccttcaatcaagcgtccaatagtatagttaccgaagtccatatggattgcaggctttacgtaatcacatgtttcctgttgaatctcttcagggtcaggaaatatatttgagatggtcgggaatggtggctccatgttttcaatttcagcacttgtaaattgaaagggaccaattttatgagcaagggcaattatgccaagcgcatagtccctaaccaaaacatgattagtcgagtgtttagcgtcttctctgaatattttcttatacaacaggcgggcaaacacactcaaatcagacttatatctttcatctgagccatgccacttaagcatcgttactccatagcaggcagcaagaagcctttcagaaacatatggatcattcgtagttagaagcctaaggcaacatttatatatctcccgtgggaatgctgccccgatcaaagctaacgctttagtggctaagtcacgcaattgacgatcaactgtcaccagcaaccaacttagaacccttagtaaacccggtacataatcagcggggatatttatgcattctgctttagttacccattctattagacgccaagggctttgttctttgtataactttcgaagatactcaccccaatacaaatccctgtcaggcatactcatatcggcgaggtaatcgctaaatttcttactcccaaggggatggttaggcttcaatgccaacaccattagtgcatctagagtattgtcaattatttcttgatcttttgttccaagtaattgacgaattatagaatttgtatctaaaccaatacctgatggatgtcgccaatataacccttctaaaaagggggtaacggatgaagagataagcctcttatcctttggcaaatagaatatcagttcccgcttgttatcatatttctcacccgataaacgcgtgggaaattctatcattaatgcttccgccaagcctggttctgcatattccttttcccaagaattactatcaaaattgaatattttgcccaaaggcttattcccgtagaaacagcgcctaatagtgtcttctgaggatgtatctaagtgattttttagcagccatctcgaaataatatgatcgctaaacttctggtatggaagttgaataatttcttctctagagtctggttctccgtggtcaaggtagcgtatgccatcaattagtaagccttcattcagcatattgcgaagaaagtccttagcggcctgcctgctttgaaacccttcgctgctcatcaacaggtctagagcttcagtatgaagtatgtaatctgttgatttttctgccatgcttttggcaattccaaccgtagtagtaggattaacttttaattccttaataatgttccaacagaaattccttgatagaccatgctcatcttctaaccgcctgccaacttttttgacaaaaccctcgaatatataagtcattccaacctgacctgatgttatccctaggaagttttttcgagctttcttggttgtcaaatttgaaagttgctcacaaacaattttgagcattaggggccttgagaattcatctcgcaaaataggcacttctggtaagtttaaattgtaaaaatggaagaactctttttgagcatcaaactcgttttctgcaaatccatagtgagtaagtttagtatgtgcgagataaatagcttctggcacacaaaggctttgaaaaggagagcgaaccgataggactaaaccaacgaatgggtagtttgaggctaaggttaacaaactggagatctcattgtaccactcttctttatccccctcattaataccatcaattataactagtgagcgttctcctatcttccttcctgcctcattaaggtattcaaataatgctttgttatctaggccatccaaaattccggcagtaatgatatttgggccgttaatattcttcccaagcgcaaaaaagacaggtcgtttaccttctagttttgataatgccaaatcacataaagtatgtgtttttccagtgccccagccgccttctataaaacaaatattgttttccaaaagttgccttgacgaactaccaagataatcaacaactttatcgacacaggaatggagcttgcgtatttcttgatcagcatatttcaagctttgctttttcttgtctaagtgacttgcaagctcgtcctctccagtactgttagttctgatttggttgatttcatcccaaatgtttgcagacgccttactcagagtccgtttacattggcttgctacaatttcggtattcttcaatgttttggatacttggtccaaagatgtaactgttaattcttccaacaatccaaccagaaccgaaggggtgcgaaccctcttcgcaaatagcctagagacttgcctactctgatttttgacttcttttgaaagttcttccttgattatagttatttcttttcgaaaaccgttatcaaatgacaaagaagctaaaggtttcagcaagttctcaatttgaatatttggtgcaccttgttcaacttgaggtgtatatcgcggtccggcgctcttcacttggtccttgacagctgtaataatcttatctgctttaatcataccaattccctgtctaatcggcagaatggtaacattaggtataatttatgcaatcatataaatatctaaccagcgaaaatgataggtcatatctcgtagaaggacacacatattaatgtttcctgccacatgatatttccaaatatgtttgtcccccgttgtttgtaacacggggggctcaaaatacatgggggtattttgggcgtagtattcgtctggataaattttccaattcttgaaccctctagtacaaaatggcctgcgcaattgctgtgccagtacctatctcagagcagtgcccggctttacatttccgtatgtgtagagacctgcaaattcctctcaaaaaaatctgaactttcctacgtatacgttacgtagggaatctggcttcctacgtaatgtatgttctgcctgcggaccacatacataacgaaaggtatctatatgaagtctacgcaggggatagaggcccattttgatccactcctattgtcgggaatcgacagcctttatatgagctattatatcaacctccctcagattgattgggaggaactgcatttccaaaaagaacggttgaaggcagaccgtcagagtaactatgcaccggttcagataggcggcaggacattcgcactgcttccggctggtaccagacaatatactttccagttacagcatgcggactaccgtatccttctgtctgagaacaacatacccaacatacaggttcagtatgccagcaagggattatggctacgaggccttgatgctgtaaccgcagaggtggaaagctggatcaagagccttgaagggtatcccttgcgtcctgcatccattactaggattgactttgcctatgatttccatgtgccagaggttgatttcagtattgatcattttgtcagccgagcgagcaaggacagtgtatggcgcaacaggggctcggttgagactttctcctttggtaaaggcgatattgttgtccgggtgtatgataaagttgccgagatagaacaacaaagccaaaaatactggctttatgacctatggggcaaacgagagaatgtctggcgcgtagaatttcaggtcaggactgagcgactgaagaaagccggaattataacactgcaagacctgaaggaattcggcgcggatttactgagagaactctcgaccagtcatacaagcctgagagtacccaacacagacagcaacaggtcaagatggccgcttcatcctatctggcagtccctgacagaacatatagatgcgcagccgcaaacaggcctgatcgcagcctaccggccagagaatggcattgattataagatctataaacagatgcagtctgtatacggaacctttaaggggctggcagttacatttgcgctcgcagagggtaggtcagagcctttcagtctggaggagacgatggacaaggctttcgtttctatggacgctttccatcagcctcatctgtgggatcaggatatagcaaagcgcatggcagcaaagggtttcggattatgagacagactgcacgcaaagaagcatatacttccaaagccttgaaagccgcaaatgacaacagccgttcagattcggttcatgtcgactatgatgtaaagaatctgaagcgggtaatcattggtgaacctgaactcctgcagaagtatttaggggttttaattcagcaagtcgccaacgacaatgggggagtataatctatgaaacgggttgcactatatgcacgggtgtcaacaaagcgacaggcggatggagatatctctatccctgaccaattgtctcagatggagcgctatgctgctagcaaggggtgggaagtaatagcttcctatacagatcgcggtgtaagcgggcgcactgacaaccggcccgagttccagcgtatggtccgtgatgcaatatcccctgaacagccgtttgactgtattctggtacatagcctttcccgctacagccgcgaccttgcggattctttaagctatgagaagaagcttgaggcagcaggggtagagcttatctctattacccaggaattcagcaatgacggttccgggaatctgatgcgaaaggtgacatcgctctttgacgaacataacagccttgagacggcaaaacatgttagccgctcgatggttgagaatgcccgtcagggtttctggaacggctcacagcctccgtttggctatagaaccttcactgccgaagtccgtggtgccaaacacaagaagaaactggagattgaacccaaggaagccgagatcgtcaaacttatctttcgtctctatcttcatggtgatggcacgtccggccccatggggattaaaaagattgcagataccataaactccaagtcctaccgcaacagaaacggcaataaattctatacgagtgttttggagaaaattctcaaacgggaaacatacagcggcacccattactttaacaagaagtgcagtaagactggcaagcagcgtcctcgggaagaatggatcgcggtggaagctcctgttatcattgatccagagacttttcaggcggtacagatgagactgtcagcaaacagcccgaagaaacgcaatcctagacaggtctccaataaactcctcctgtctggcaagggggtatgcagtgggtgcggtcaaggtttgatgttgatgacaggtaaaaacaatcagtaccgctactacacctgcgccagcaagaagctgaagggaaaaagtgcctgtaatgcgcctgtcagtttgccagaggccactcttgatcagcttgtgcttgatgctatctcagaacaaatttttgacccggagagactgcgtgcgctgatcaaggaaacgctggatctgagcggcagtcgtcaggatcaggcgcgccaagacctcaagcgtctcaagcgagagctgcggacagttgataaggagattgataacctgatcagttttattgccgaagggcgtcagcatagttcggttgagaaggctctgaaggacagggaactatccaaggaaaatatactgcgtctcattggtattaaagagcgtgagctgtcactgcctgttcacaggcttacaaacggccagttggacaagatatgcgcagctattcaagaaacgctaaagaacggccctacagccttcagaaaggcctatctggacctgcttgtggacaggattgaagttagcgcttcagaggtcaggatacgcggctctaagcaagcgctagctgcaaccgtatttgatgaaaaagaagggaagaagggatcggtacttatttctgaccgtaagtggcgcacccaagaggattcgaacctctggcctctgccttcggagggcagcgctctactgttattacctatccaacatctcaaaatgtcacaataaaatcaatctgttacaagtgtgcttgtattaattctgattgttgttgtcaacaagtcgatacactttgcattacacattgtgacacgactgtgacagggggcggggtataggtgcccgccgatggtccctctattgttgttagctagtaggtcaaaaatatttagcaaaattcgaaacgcttggttattttgtccacagcgcactcagctgctcggcctgtgcgatgactgttttgactgcctcatcctgcaagtcaggggggtagccgtatttcttgagtatcttcttcaccatcaggcggatacgggcccgggcgttctcgctcttgtgccaatccacgctcacgctgcgtttaacgcgctccagaagctcatgagcgacgaccagcagcttctggtcgcccatcatgtccttggcgctctcgttggctgccagagcgtcataaaaggcgatctcgtcctcgctcagcccctgctcctcaccccgggccttggcagcgcggacctccttggcgatcctgatcagttcctcgatcatctcaaccgccgtgatggcattggcgtgatagcggttcatggcttcctgcaaacgctcggagaaggcccgggcctgcacgatgttgcgccgggactggttgcgaatttcgccgttc

SEQ ID NO: 3338 - DNA, 10756 bp, synthetic construct
  misc_feature 1..10756: note = Synthetic
  source 1..10756: mol_type = other DNA
gatcaggcagtcacgatctgcgggccgcggcagcgaggacgccgttcacgagggcgccgctgcgatcggtggcaccgaggcggtgcgccagctcgacggcttcattgatgaccacggcggcgggagcagaccctcgctcaagctcgaagagtccctgcagcaggatcagccgatcgcagatgccgaggcgctcgggcgtccatccctcagccagcagcccggccaaccgctcgacgagggcgtcacgctgggaggcgacgctggaggccagcaggagtgcaaacggatcgaggtcgctgacttgttcggcaagcacagacgccagctcgcacgacttcatctcggcctcgtacagcaattccaccgagcgttggcgagcctcccttcgtcgagtcggctcgtcgggggcggcaaacgggtcggcgggacggttcatggcagcgggcctcggtcccgatcgacgacccgcggcgtcagccgcgggcccgctcgatgtagtcgccgctgcgggtgtcgaccctcagtcgctcgccggtctcgatgaacagcggcacctgcaccaccagcccggtggacatcgtggccggcttgcgggcgcctgacacccggtcgccctgcacgccggggtcggtgtcagccacctccagcaccaccgatgccccgaactccacgccgagcacctcgtcgccgtagcgcaccacggtggccatctcgccttccacgaggaagttcgtggcgctgcgggcggccgcccggctcaccgggagctgctcgtagctgtcggtgtccatgaacaccaaggagtcgccgtcggcgtacagatactgcatgtcgcgctggtcgatgacggcgcgttccatgcgctcgcccgcccggaacgtgcgctccaaggtggcaccggtgcgaacgttcttgagcgtggtccgcacgaaagcgccgcccttgccgggcttgacgtgctggaactcggtgagctggaacagcccgtcggcgagatcgagcgtcatgccgttgcggaagtcggcagtggaaatggccatgtcaacgcctcggagtcagccgggataggtcacaggttcgcagcgggacggtacaagcacagttcgccgtcacgacggcctgccacacgatcaccgttcgccagaatcgccagtatcggctgcgtcgccggtgtcgggcggtgtggtcggggcctcggcagccgccgcctcaatggccagcgcgaccgcctgggggtagccggcgccgccttggcccgccacccgggcagtcgccagcggctcgaccaccgagtgatgtcgccacggctcgcgctcgcggggctcggacaggtgcagctccacgatcggcccctcgaaggcggcgagcgcgtcatgcagcgaccagccgtagtgggtgagggcgccggggttcaccacaatcgcctcgacccgaccgatgcccgagtgcacggcatcgacgaggtcgccttcgtggttgctctggcggtgctcgaggtcccagccgcgctcggtggctgcccggcgcgcatccccgacgtggtcgagcagcgtgtcggtgccgtagatctcgggctggcgggtgcccagcaggttcaggttcgggcccgacaacagcagcacgacgtggcgaggcatggctgcgctcacatccgctcgagcgcgctgcgcagcacgccggggtcgacgccgggcaccacttcgaggccccggggaccgtcgagcacgaaggtgatgccgtcggctgccttcttgtcgcggccgaacagctcgatgatctcgtcgtggtcgatgcccgcaggcagggccccgtcgagcccgtaggcctcgagcacccgctcgtgggcggccacccgatcgtcgtcaatgcgtccgagcaggcgggccaccactgctgcataccgcagcccgatggcgacggcctcgccatggcgcagatcgaaccgaccggcgatctcgagcgcgtgccccagggtgtgcccgtagttcagcaacgcccgccgaccgctctcggtctcgtcagatgcgactacttcggccttgatgtccacgcacgccgcgacccgctcgtcgatgccgagcgcgcctagatctccgctgtcggtcatggcgagccagcgctcagcagccgggctgtcgatgaagtggtacttcgcgagctcgcccagcccggcgcgcagctcgcgggggggcagcgtgtcgagcacactggtgtcgcacagcaccgcggcgggctgccagaacgcccccacgaggttcttgccctcggcgaggttcacacccgtcttgccgccgacggcagcgtcgatctggcccagcagcgtggtggcgacgtgtacgaccgcgattccccggtgatagacggccgctgcgaagccggctacatcggtgaccacccctcccccgacacccaccacgacatcgcgacgcgtcaggccgcagcgggcgaagccgctgcacagctcgcccacggtggccagctccttggcctgctcgccgtcgggaatggtgaacgtctcgaacccgatgcccgggtcgacgtcgacgccgattcccggctgtgtgaccaccgcagcacggcgcgctccggccgtcagcggtgtttcagccagaaccgacccaagttggtggcgcgcacctgcaccgaccagcacggggtacgagcggtcgcccagcggaacgtcgacgcggatgatgtcccccatcacgggcgagggtaccgacgcggcgccgagcgactgcctgcggggccgcccgggcgtcgcaccggcttgcggccaggcagcgagcggagagcagcgctgctggtggctcacgcagtgagggccggcggcatgaaccaccacgcggtggcgagcgcaccggcgaccagcgacggtccgagggcgaaccggtaatcggcgccgcggcgcagcacgaccaccccgactgcgccgacgagcgcagcgatggcgaatccggcgagcaggccccacagcaccagggcaaatccgcccagacccaggtgcatgcccaagtacccggccagccgcacgtcgccgtagcccaggccgcccttggaggcaagccagacgagatggagcatcgcccatccggcacaccccccaagagccgcggcggcgcacgcgtgcgccatgccggccagcccgccttcgatcgccgccgcggcgcacaccagcggaacagcgacggcggcagccgcacgcagcagccgtgtagggatcaggtgggtgcgcaggtcgacgccggagatgaccacacctgcccatccgaacacgagcagcggtgcgaggtacgcgctgtcgtggaaacgcagcgccagcaaggccgccacgacgacgcacgatgcaattgcaagtgtctggtgcaggccgacgccgaagccatgtcgtgcccagcgcatgatcacggcgcctgctgcaatcccgccgactccggctgtcgcaaccgcgacgacatgatccgccatcatcgggccgatgtcacagcggacgtgtcgctgcccggacacgagccgacccggcggcggatccgtcgttcacatcgatcagtggtctcgatgctcatgctgatggctccccggtctcccgcggctacaggggccgcttgtggtccggggtgctacccggcaatgcgcaggccgacagccgctgccatctcgtcgacgggagcgtcgcggccggtccacatactgaactgctcggcggcttgaaacaagagcattccggtgccattgagcgtggtggcgcctgcctgggcggctgcttcgagcagtggtgtccgcgcaggccggtagatgagatcgaccacggtctggccgccgctcagcaacgctggatcgaccggcagcggatcgcccgcgttcatgccgagcggcgtggcgttcaccacgacatcggcgtcgcgcaccgcttcggcggggccgaccaccgccgagcctgacggcccgccggacgccccgattgttgcgccgcccgctgccgcacccagtgccgcagcccgtgccgccgcatcgggcgaacggttcacgaccgtcacctgcgccccttcggctgccagggcaacgatcaccgcccgcgccgcgccgccggcccccagcacgaccgtgcgcagctcggcgggctcaaccgcgacctcggtgcacagcgagcgcaggaaaccggcgccgtccgtgttctcgccgatcagcctgtcgccgtcccggcgcacacagttcacggcgccgagcagcgctgccgcgggcgacagctcgtcaaccgccgcggccacggtgtccttgtgcggcatggtcaccgagaggccctcgatgccgagcacccgcatcgcggcaacggcaccggcaccttggccatcaggcacctcgaacgccacgtacgtccaatccagacccagcgcagcgaacgcggcgttgtgcagcgccggactcagcgagtgccgcacaggatcgccgatcacaccagccaccttggtgtcgccagtcggtgcgggccgcatcgacacagtgtgcactccagcaatggtcggctgccaaaccgatttcggccccgcatctcgcccggcggcggaaccgggcggcagggcagctggcatcaacaccacatatgacatggggaaaaccgccgtctgtttgcccgaacacatcaaggacggcgtagcgcgtgaggcgcgtctgcgctcctgctcaagagccgaggtgatccgtcaagccgtagccgacgccgtgtcgcggcctgcgccgcgcgcggagatcattccgggcgacagcgcatgggctgagcagaccgacgagctgcagcaaggattcggcgaacggtgatcgtcgccgacatcgtcccctgatcccccttgacagcgagtcaggagctcagcatgacgcggtagcggactggctcgcccttcacgacgagatcatggtggtgtctccgtatggggtggccgaacccgacaacctcgtagccactcggagcggcatcgacgccgagttggcagtggtgtacgaactcgccgacatggcccggccgatatcgcgcccgccgcgggcgtaatcgagcaataccgagatcttggcctcggcatcaccgacgcctccttggtggtgctcgccgagcgccaacgaacgagagcgattctgaccctcgaccggcagcacttcggtgctgttcgaaccctcacaggcgagccgttcgacatcgtcccctgactgttcgatggcgcgcatacatctcatgccgacgcatcgagccccacggtggccgccgtccaaagcagatgccgacgggacgaggcgggccggagcccgcctcgcaacgtggtgcatattgtcccgtgttcgggactctgcttgttgttggcacccgtaggtaccgccaaccattccctgcgtcgcagattactctgattggcccgctcgctgacgggaactccgacagacggtgacgccagtgctacgactcggacttgatctcggcaccaacagcatcggatgggtgctgtatcggctgagcgatgcagtcccgcccgagccggtcgagatcgtggatggcggcgtgtcgattcacagcgacggccgcaaccccaagaatcgggcatcgaacgcagccgagcgccgagcgaaacgcggaccacggagaaatcgtgaccgcacgctccgccggcgccgacgggcggcagcgcaactgcgcgactgcggcttgctgccggaccccgcagaagatcgctcgtcttggcgtcatctcgatccgctgctcctgcgatccgaagcgttgaaccgaccactcgcaccgttcgaactcggccgcatcctgctgtcgttcgcggaccggcgcggcttcaagagcaaccgtcgagttgaaggcggcgaagacggcaccatccgcaaggagaacgccgaattgcaacgccgcatcgagcagtcaggcacccgaactctcggcgaatacctctggcgtcgccgcgaacgcagcgcgactgtacgcgcacggctcgggaatggtctctacccggagcggtcgatgatcgaacgtgaactcgccatgatccgctcggtccaagaacagcaccacccggatgtctctgcaagcgactgggatactgtcgtagccacactgctgcaccagcggccactccgcccagtcgagcgcggccgatgcacgctgctgccagacgaaggccgcattctcaaggccgagccgttgttccaactcttccgcatcctgcaagaagtgaacaacgtggaggtcacgctgccaaggcaagccgcgcggccgctggcgggcgacgaacgcaagcgagtcgttgagaagctgcgccgcagcagcaagcgaagcttcgatcaactggcggccgacgctgccctgcctgagggcacgcgctgcaacttgcgctcgacggagcgagatgcgttggacggggacctgactgccaggacactgcgcgcgaagaagtgcttcggcagcaagtggaatggatacagcatcgaggatcagcagatgatcgtcgagcgactgctctcagacacagacacggactatctcgtcgattggttgacggaagaattcggactcgacgagtcggcagccgaggctgtctcagcggcaaggctgccactcggcacaggcagcttgtccaaggccgcaattgagcgattgctgccgtacatgcagagaggaatgcgctatcacgaagctgtccaagcggcgggattggggcaccactcgaacttgcgcggcgatgcgcaccaagatcgtctgccgtactacggatcggtgctcgcacggcacgtcgtcggcgccaagcctgacgctgcctccgatgtcgatcgtcatggccgcgtagcgaacccgacagtgcacatcgcacttggccaagtgcggcgcctcttcaatgctgtcgccgatgcgcacggcaagccagaccaagtagtggtggagttgtcccgcgacctgaagcgaaccgacgagcagcgacgcgaggccgagcggcagcagcgcaataaccgggagcgcaacgatcatctgcgcgaactggcggcgggcgccggtctcgccacgccgtcggccgacgacatacgcaagttgcgcttgtggaacgagcagggcaagccgaaccagcgggtctgccccttcaccggtacgccgctgtcgatcgagcgggtcttatccgcggaaactgagattgagcacttgctgccatatagccgcacgctcgacaacagcatgaacaattccgtggtcgcgatgcgtcacgcaaaccgggagaaggccaatcggacgccctacgaggcatggggcggcgatcaaggccgttaccgcgccatcttggctcgtgcagaacgcctgccggccgccaagcgttggcgtttcgctgccgatgcgatgaagaggttcgaggcacgttccgattttctggagcgccagctcaatgagaaccgctacctgtcacgtctggtccgcgagtatcttgagtgcgcggtcgaacacagaagcatctgggtgaccccgggtcggatgactgcgctgctgcgtaaagcgtgggggttggacagcatcttggcggggccggacggcggcaagaagaaccgcgaggatcaccgccaccacctgatcgatgccgccgtcgtcggtctcacgtcgcgatcgctcctgcaacgaattgtccacgaatccagtcgcggcacagacgtcgaacgaatcgctgccgacgttccaacgccatggcctggattccgcaacgacatcgaatcgctcgcaaccggatgcgtggtccgtcatcggcccgatcacttcacggtgctgcgcgacaagcgcgagcgccgcgatgcagggcgagacgtcacgagcggcagcctccacaacgacactgcctacgggatcatcgatggacccgacgagaagggcatgatgacgctcgtcgaaagaaagcgcctcgatgccatcaagcccggcgatctcacacgggtgcgcgatgttgcgctccggaatctcctctgttcgatttggggacaggtacaggccgccaatgccgacaaaagcgagaccgagcagcggcagtgcttcgccaaagaagctgaagaacaactgggaatccgtcgcgtccggttgctgaccaaaatgagcaaggacagcttggcgttcatcagggatgccaccgggggcatctacaaggcctacaagaccgacggcaatgcatacatggatatctggcttctacccgacggtaagacgaggggtgaaaccgtgagccaattccacgcacaccgtcagatcagccattcgcaggtcaaagagagccatccaacagcgcgcaagctcatgcggatccacatcaacgacatgatggccataggtgaaggcgaaaaccgccagattcttcgtgtcaagggactttcgggccaacgcatagaacttgctgaccacgcgcgggcaggaaaaggaaagcagatgccttccttcagcaggagagcaacacggatacagcacgaaggcctgcgcaagattagtgttgacattcttgggtgcgtgttcgacggtggaccgctcaaggctgcagcccgacggcaatcgaaggattgaactcatggagcgccgggtcctcgacattgcgaccggacggcgctacctgtcgaagaagcggggttgcctgtcagtcacctgcggctccgacaccaccgaaacctccgaacgactcgtacccttcgatgagatcgagtcggtgatcgtgcacacgccgcaagcgtcgtactccaacggcgccatcgttgaactcgcccggcgcggcatcccggtcgtgtgctgcgacgcataccacacccccactgcttggctttggccgatccaggcaaactacgagcagagcagaagaatggcggcgcaggcgaacatgcccgacagccttcgagccgagctctgggccattctcgttcgagcaaaactagaagcacaggcctcggtgctgcacaacgaaggtcacgatcccgagcccttgtgtgaatttgcctctcgcgtgctgccagataactgcacatcgttggaagcacaaggtgcgcgcatgtactggacccgccttttcggtgacgagtttcgtcgccgtcgcgacggcccgtcaccgaatggtctactcaactacggctacgcggtactgcgggccaccgtcgcccgttcggtgtgtgcgtctggactgcacccttcgctcggcctccaacaccacaaccgcttcaatgcattctgccttgctgacgacctgatggagccatttcgccctgccgtggacagcggtgtgctcgcgctctggcacaatgagcatcgagacgttgatgctcatgcaaagtcggctcttaccgcagtgctggcgcgtagcgtgaatacccaaagaggtgtcacgccttttagtcgttgcatcgaatgggcagcgcaatcgcttaccaccgcggtgcttgaaggtcagtcgctcatcaacctcccagccgcccaatcgatagcgggatgacagaattcagcggatacagattcatgtggacaattgtcatgttcgacttgcccgtagctaccaagccacaacgtcgacgtgccacgaaatttcggaacgaattgttggacctcggattcgagatggcacagttctcggtgtacatgaagttctgcggaagccgttcagccgtcgacgcactcacatatcgcgtccaatcacgaataccctctgagggcaacgtcagcatattggtgttcactgacaagcaatacgggcaaatgcgagtattcggcggcggcgcgcgtcaactccatgacaccacgagaggccaacttctactgttttgatgcgctactgattgccgatattttgatctcatctgagaacttgccggaaacttgcttacaggctaaggaacggtcgactgccaaagcgcgggcgacactatctcgatctcgggcgacactttagccggacagggaatggtcggctgccaaaacgcggatgtcgagcggcagcacgatgtcgatactttagccggacagggaatggtcggctgccaaaaccgaagacgacgaggtgaccatcgtgcagggactttagccggacagggaatggtcggctgccaaaacggagacatccacgaacacgatcacgctcgaactttagccggacagggaatggtcggctgccaaaacttcaagcacttcatcgaccatgcacccgacactttagccggacagggaatggtcggctgccaaaacgtcgggtgggcgcagacatcgccgcagcggactttagccggacagggaatggtcggctgccaaaacgtcgggtgggcgcagacatcgccgcagcggactttagccggacagggaatggtcggctgccaaaacttcgtcgtcgcggcatgcgtggcggtcgtgactttagccggacagggaatggtcggctgccaaaacctcggatgtccgcgagtgtcgatttctcgtactttagccggacagggaatggtcggctgccaaaactggggcgaccgtcgcatctcggcagcgccgactttagccggacagggaatggtcggctgccaaaaccgacctcagccgcagagccccagctcttggcagaccgccttgtcgcgctggaattcctcatcggtctccgagaacgacagggttccgtccggcgatgtgagcacgaagaacatccacggcccgtcctgcggattcagcgccgcctcgagcgacgcccgacccggtgcggcaatcggcgtcggcggcagcccgacgagc

SEQ ID NO: 3339 - DNA, 9894 bp, synthetic construct
  misc_feature 1..9894: note = Synthetic
  source 1..9894: mol_type = other DNA
cactcacatccgctcgagcgcgctgcgcagcacgccgggatcgatgccgggcactacttcgaggccggcgggaccgtcgagcacgaacgtgatgccgtcggcggccttcttgtcgcgcctgaacagctcgatgatctcgtcatgatcgacgtccggcggcagcttccagctcaggccgtaggcatccagaacgcgctcgtgctcggccacccgatcgtcgccgatgcgcccgagcaggcgagccacctccgccgcgtagcgcagcccgatggccaccgcctcgccgtggcgcaggtcgaagtgtccggcgatctcgagtgcgtgccccagcgtgtgcccgtagttcagcaacgcccggcgaccgctctcggtttcgtcggaagccaccacttcggccttgatggccacgcacgccgcgacccgctcgtcgatgggcagctcggcgaggtcgccgccgccggtcttggcgagccagcgctgcgcagcgggactgccgatgaagtggtacttggccagctcgccgaggcccgcccgcagctcgcgttctggcagcgtgtcgagtacctcggtgtcgcacagcactgctgcgggctgccagaaagccccgacgaggttcttgccctcggcgaggttcaccccggtcttgccgcccacagcggcgtcgatctggccgagcagcgtggtggcgacatggactaccgcaacgccgcggtggtacaccgcagcggcgaagccagccacgtcggtcaccacgcccccgccgacacctacgacgacatcgcgccgcgtgagaccgaaacgggtgaacccgctgcacagttcgccgatggaggccagctccttggcctgctcgccgtcgggaatctcgaagatctcgaacggtatgcccgggtcaacgtcgataccgatgcccggctgtgtgatcaccacggcgcgctgcgccccggcggtcagcttggactcgcgcaggatcggcgcgagttcgtgacgcgcgccggcaccgaccagcacggggtacgagcggtcgcccagcggaacgtcgacgcggatggtgcccgacatcacgggcgagggtaccgatgctcttacacgctgagccctgccggcaccgaccaccagatcaccgccagcgcgccggccaccaacgagggaccgagcgcgaagcggtggtcggtgctgcgacccgccacgacgatgccgatcgcgcccacgacggccgcaagggcgaaaccggccagtagccccgtgagcaccgtcatgagcccgccgaggcccagatgcaagcccaggtatccgccgaggcgcacatcgccgtagcccaggctgccacgcgatgccagccagatcacccgcatcaggccccagccggccagtcccccgatcgttgcagccacggcggtgtcgccgagccccgggagaccgccctcgatggctgccgccgcacacagcagaacgacggccccgaccgaggtcgcccgcagcagccgggtagggatcaggtgggtgcgcaggtcgatgcccgagatcatgacgccggcccagccgaacgccagcagaggggccgcataggcgctcgagccgacccgcagcaccagcaccgccccgaccgcagcacacactgcgatcgccgccgcaggatggaggctcacgccgaagcagcgccaggcgcagcgaacagctgcgacaccggcagcagagccacccaatgcgacgactgtgacggcgacgagagttgtgcccaactcggcgatcacaacggtctcgccgctgacggccacatcgacgcgccgggacgaaccgtccttgcgcaatgggtttcacacgcggccatgccctgcctccggtcgtcgtcagccgcccaaggctgcactcaggccggggtgctacccggcgatgtcaaggccgacggccgcggccatcacgtcgacgggggcgtctcggccagtccacatcttgaactgttcggcggcttggaacaacagcattccgacgccgttcagcgtcgtcgcacctgcttgggctgcggcgtcgagcagcggcgtccgcgcaggtcggtagatgagatcaacgacgatctggttgcctcgcagcagcgtcgggtcgatcggcatcggatcgccgtcagccatgcccagcggtgtggcgttcaccacgacatccgcctcgctcgccgattcggggccgccgacggcggctgtgcccctcggacggtcctccgctgccccacccgacttctcaactgtcgtcgagccacgacgcgcaccagaagcagcggccgcaatgcggccggccgacacgcccagcgtcgcagcccgctccgcggcgtcgggcgagcgattcaccacagtcaccgatgctccctctgcggccaaggcgacgatcaccgcccgcgcggcaccgcctgcgcccagcaccgtgacgcgctgtccggcgagctcggcgtccacttgctggcgcagcgagttgacgaagcccgcgccgtcggtgttctcgccgaccaagaggccacggcggtgccgcacgcagttgactgcgccgagcaggcctgcgataggcgacagctcgtcgcacgcctcagccacctccgccttgagcggcatggtcaccgacagtccgtcgatgcccagagcgcgcatcgcagccacggcatccgcaccgccgccggccggcacctcgaacgccacgtacgtccagtccaagccgagatgcgcgaagccagcgttgtgcagcgccgggctcagggagtgccgtacggggtcgccgatcacgcctgcgactctcgtgtcaccggacggtgcagtccgcatagacacagtgtgcacgccagcgaagctcttcgggtgggccagtgccacgagtcgcggcaagcccgccaagatggccattcggcacttgcgaaaggtcgctgttcgtgtgactggggctcgctactgtcaacggtgtggtgggcgatgacacttcgaacggggctccggctgccccctgtgatcccgaagctgcgttggcgcgactcgtcgaggacggtgtcgtgtggggcgacgcggttgactggctcgtgtgcctgccagccggttctgtggatctcttcttcacctcgcctccgtatgcggacgcgcggcgttattcggcaatccatccggatcgctacgtggagtggttcctgccgtttgccaaagcgatgctgcaggccacgagggaatccggttcatttgtgctgaacatcaagaaccgcgtcgcagcagccggccacctcaggggacagcggcatccctacgtgtacgagttggtgctggagttgcagcgcatggggtggcgctggctcgagacctatatctggtccaagcccaatgcgattccgggtcggttcgggccgcgtacgaaagacagcttcgagtacgtgtaccacttcgccaagggcgttcggccgttctttgatctcgatgcggtccgggtgccgtatcggtcgagcgagcaggaaatcgcacggcggcagcgtgatcggaatggtcgacggaacactgaggccgggttcggccgtgaccgaagcgcgacctatgacaagggtggtgccgatccgggcaacgtcatcgaggtccctcaggcgtacaaccagcactggggtcccgcgggtcagcacacggcggtgatgcccgaaggtctggccgagttcttcgttcgggctgcctgtccctgtgacggattggttgtggatcctttcgccggctcggggacgacggtggtcgttgcgcgccgccacggccgtcgtgcgggcgggatagagctgcaccgcgagtacgtcgaggtatgcacgcagcggatacagagtgaccaatgcgaacccgagccgggtgagctgcggcttgcggtttgagcatggcgctctcggagtctgaggaacggatactccgcgcagccgggtcggacccgagtccggtggcgcgtcagcaagcggtcggcgtaacgctcgcgaagcatggcgacgaagccgaggcctcgcgtgcgctcttgacccagagctacctcacccacctcagtccgtcgtttcatctcgttccgcgaggcaactcgatgttcgacgaggacgctttcaccgaggcgtactcggcgctggtgacgggcacggagaacttcactcgtgtcgatgcagcatccttggcggcggtgctgctcgaatgcccggctgcgctggcaccgctgcgcatgattctcgggctgacgcataacgaactggcagttgccatccgtcttcacgaccccgactcgaacctggccggaggttcgctcaagaacctcgaacgcagcaccgcacaggaacaccggacggcagctcgccagcgaatcgtcgggtcgattgccggtgctgtgctggcgatgatgaatcgtgacctgctgaccgtgccgcctcgcgtcacgacccatttccattccaagctcgacaagggcgacacgctcgacgggtggcgaagcgtgcgcgagcacaccaacggggtgccctactcgacgctgctcttccagcggtacgtcggcggagcctggcgacaagtgcaggacgcctactccgaagtcaagggagacgccgtcctggaaatcccgctccaggacctgctggaggcacacggcgtgccctaccaccggacgaagcgcggagcgaccggtgccgcggagaccgcagcccggttcgggctcaagccggggcccgacttcatcattcccgacgaatcacccacccttgtcgtcgaatccaaggtcgcagaagacggcgggaccgcgcgcgacaaggccgcacgcatccggaccttggtgacggcggcgaacgaacgcggactgcgagcatgcgcactgattgacggcaagggatggaccgaacggccgaatgccctctgcgacgtcatcctggccacacaaggccgtacctacaccttggcgacgatcgaccagatcctggagctgcccgagatccgggccctcattgccgaagcttgagtcacgcccggtcgcagctcgcgcccaagggttcgccggtccacgctgagatcgtccgcgggcaccctcagtcgagagggagccggtcgctgcccgtggcgagtacagacgggacgaggcgggccggagcccgcctcgcaacgtggtgcatattgtcccgcttcggggacgatgcttgttgttggcacccgtaggtaccgccaaccattccctgcgccgcagactactctgattcgcccgctcgccgaccggagcttcagcagacggtgacccagtgttgcgactcggactcgatctaggcaccaacagcatcggatgggtgctgtatcgcctgaatgatgccgactcgcccgagccaatcgaaatcgtggacggcggagtctcgattcacagcgacggccgcaaccccaagaaccgcgcatcgaatgccgccgaccgtcgcatgaagcgcggacctcgcagaaaccgcgaccgcacgctgcggcgacgccgacgagtggcggcacagctgcgcatatgcggcttgctgcctgaccccgccgaagatcgcgccccgtggcgtcagctcgacccgctgaagctgcgggccgaggcgctggaccggccgctcagccggttcgagctcgggcgtgtcctgctgtcgttcgcagagcgacgcggcttcaagagcaaccggcaggccgacggcggcgaggaaggcgccattcgcgcttcgacagctgaactgcagcgtcgtatcgaccagtcaggcgcccggacgctcggcgagtacctgtggggtcgccgccagcggggctcgacggtgcgggcacggcccggcggcggcccctatctcggcggcggcctctacccggaacggtcgatgatcgagcgtgagctcgaagcgatccgagatgcccaagcaccgcaccatccagaagtcaccgcggacgcttggaacgatctcgtcggcagcctcttgtatcagcgaccgctgcggcccgtcgaacgtggccgctgcacgctgctgcctgacgaaaaccgcgtcctcaaggccgagccgctgttccagttcttccgcatcttgcaggaagtgaacaacgtggaggtcgcgccgcccggtcaagccgctcgcccgctcacggacgaagagcgcgaacgcgtggtcgcgaagctgcgacgcagcaggacgcgacgtttcgatcagctggttgccgacgcggggctgccggagggcacgcgctgcaatctgcgcactgtcgcgcgagaggaactggacggtgaccgtgccgccgtaccgctgcgtgcgaagaagtgcttcggcagaaaatgggacaggcacagcctcgaggagcaacagcagatcgtcgaacgcctataggccgacacgaatgctgatgatctcgttgactggctgatggacgaattcgggctcgacgaagcagcagccaaggctgtctcagaggccaagctcccacccggcaccggcaacctgtccagagccgccattgggcgaatgctgccgttcatgcaaaacggcatgcggtatcacgatgcagtcacagcggcgggcctgggccgccattcggaccggcacggtgatgccagtcacgagcgccttccctactacggctcggtgctggctcggtatgcgaccggcgtcaagcctgatgccgcctcggaggtcgaacgcttcggccgcgtcgcaaacccgaccgtgcacatcgcactcggccaagtacgcaggctcttcaacgccatcgtcgatgcctacggcaagccgaacgaagtggtggtggaactgtcccgcgatctgaagcagaccgaggagcagaggcgcgaggatgagcgacggcagcgcacgaaccgcgaacgcaacgaccgtctacgcgagctggcggaagaagcaggtgtccctgagccgtcggctcaggacatgcgcaagctgcgactgtgggacgagcagggaccgccgaaccagcgggtctgcccgttcaccggaaccccgctgtcgatagggcgggtcttgtccgacgagaccgaggtcgaacacctgctgccgtacagccgcacgctcgacaacagcatgaacaactccgtcgttgcgatgcgtcatgcgaatcgggagaaggccaatcggacgcctttcgaggcatggggcgcggactcagaccgctatggcgagatcttggctcgtgcagagtcgctgccgaccaagcggtggcgtttcaacgctgatgcgatgaaacggttcagtgagcgttccgacttcttggatcgccaactcaacgagaaccgctacctgtcgcgcttggtccgggagtacctcgaatgcgtcgtcgagcacagcagcatctgggtgacgcctggccggatgacggcgctgctgcgtcgggcttggggcttggagagcatcctcgctgcgctcgacagtgatcggaagaaccgtgaggatcatcgccatcacatgatcgatgccgccgtggtgggcatgacatcacgatcgctcttgcagcgggtcgcccaagccgctgggcgcggcaccgatgtagaccggatcgcggccgacatcccgccgccatggcccggattccgaagggacatggaagcacttgcgagaaactgcatcgtccgacaccggcctgatcacttcaccgtgctgggagacaagcgcgagcgtcgccgcgccggacgcgacgtcacgagcggcagcctccacaacgacaccgcctacggggtcattgacggcccagacgagaagggcatgatgacgctcgtcgagagaaagcacctcactgccatcatgcccaaagacctcgaacgcgttcgagatctcgctctcaaggctcgcctgcaatccctttggaagcaggtccaagcggagaacgccgagagcagcgaatccgaacagtggcagcgattcgcgccagaggcccgccggcagatcgggatccgtcgcgtccgcttgctcacgatgatgggcgaaggcagtttggcgttcgtcggagacgccaccggcggcttctacaaggcatacaagaccgacggcaatgcctacatggacatctggctcttgcccgatggcaagactcggggcgagaccgtcagccgtttcgacgcgcatagtcagcggggccactcgcaaatcaaggcgaagcacccagctgcccgcaagctgatgcgtcttcacatcgacgacatggtggcgatgggtgagggcgagaaccggcagattctccgtgtccagcagctcagcgatcagcgggtagtcctcgttgaccacgctcaagcaggcaagagcaaagagatgccctcgttcagcaagagcgcgacccgcgtgctggtcgagggcatgcgcaaggtcagcgtcgacatcttgggccgtgtacacgacggcgggccgttcaaggccgaggccaggcagcgatcgagggaatgaacccatggagcgccgagtcctcgacatcgcaaccggtcggcgctacctgtccaagaagcgcggttcgctgtctgtctcgtgcgacacggaagggtctggggcctccgggcatctcgtgcccttcgacgagatcgagtcgatcatcgtccacacgccgcaagcctcctattccaacggagcgattgtcgaactcgcccggcgaggcatacctctggtttgctgcgacgcctatcacacacccgctgcatgggtgtggccgatccaagccaactacgagcagagcagacgtatggcggcccaagcgaagatgcctgacgaacttcgcgccgcactttgggcggtcctcatccgcgcgaagctggaagcgcaagccgcagtgctgcacagcgaaggccacgatgccgcagccttggaggactttgcctgtcgcgtgacgcctgataactgcacgtcgttggaagcgcacggagcccggctgtactggacctgtctcttcggtgacgacttccgtcgccgtcgcgacggtctaccaccgaatggcttgctcaattacgggtacgccgtgttgcgagctaccgttgcgcgcaacgtttgtgcatcggggctgcatccttcgctcggtctccagcaccacaatcgcttcaatgcgttctgcctcgccgacgatctgatggagccgtttcggcccgctgtcgaccgcagtgtcctcgaactccagcgcgaaggacatcaagccgtcgatgtccatacaaagtcagctctcgccgctgtactggcccgcggcgtaacgacatcgagaggtgtcacgcctctcagtcgctgtgtcgagtgggcagcgcagtcactgaccaaggcagtgctggagggcgaacctcgaatccaccttccagatagccggtcaattgcgggatgagcgaattcagtggatacagattcatgtggaccgttgtcatgttcgatctgccggtggtcactaaaccgcaacgtcgacgcgccacaaaattccgaaacgagctgttgaacctcggattcgaaatggcgcaattctctgtatacatgaaattttctggaagccgttccgcagtcgacaccctcgcatatcgcattcggtcgcgaatacctcctgaaggaaatgtcaacatcctggcgctcactgacaagcaatatggtcaaatgcaggtcttcaatggaggggcacgacaagagcgtgacacttcgcgaggtcagctcctgttgttctgatccgctttggttgcctaagttcaggtccgcgctacgtgaacatccggtcagaagcctcggccggttagggaatggtcggctgccaaaaccgagtggaacgcggcgacctgccgcccagtactttagccggttagggaatggtcggctgccaaaacctcgggcgggattgcttccccgagccgttcactttagccggttagggtccgtcataagttaactcgcgttgtgtagtgtctgtggcgtggagttgt

SEQ ID NO: 3340 - DNA, 9442 bp, synthetic construct
  source 1..9442: mol_type = other DNA
  misc_feature 1..9442: note = Synthetic
tccagtacgaccagtacgcggccgtcgcgctgcaggaggcgatcgagggcaacctcgacgagctgcgcccgcagcgctaccccgtctacaacgccccggcgacggcggacggcgaggtgctcttcgccacccgcacggtcgaccccgtggccgcggccgaggagtcgcggcgctccgggctctgggtcagcacgacggtcacggacgcgctctggccatccgaggactcccgcacgcggccgctgatgccgctgcggcgcgggcacctggcgatgctggtggcggctggcttcctcgacaacctccagctcgagggcgacggcgggcgcatcctcgtcaagggccgcacctcgaaagagatgctgctggtcgagacgacccgcgagaaggaggtctaccgcgagcggctgcgcacgaccgtcgtcgcgctcgacctcgatcgcggcgagatcaccgacatcgccgcatagacggctcgcctgagccgcaacacgaggcccgccgttcccccaccggagcggcggggccccccccgttgaagcacacccaccccccgaaggaggaacagcaaagccacaaagccgcgtgcccccccgccgcgccccagcggggggggcgggcctcgcctcgttgaagcacaccaaccccaggaaggagaaccagagatgcaacagagcctgatgcccgagcgctgcgcccgctgcggacgggccgtccgcccggacgagcccgtgatgcggaccgcctcggtggacctcgacggcggcggacacgccgtcgcctccccggtgcgcaccgtccacctcgccggcggctgccgcgaggacgatcgcactcccgaagccgcctgaccgctcaccccgagcggcatccacgaggccctgcggtcatgcggccgcggggcctcgccacgtcaccacggcaagcaagaaaggaacggaaccatggacctggctgagttcatcgacacctaccgcgacgccatcgcccaacgggtggtggagtcctacccgccccgctaccggccctccgagcagggccggccactcccccgcctgctgcgcgcgcccctcggcgcgcaggccgacgcgatccgcggcgcggcgctctcgctcgaggcgcagcgcggcacgaccgtcgtcggcgagatgggcacgggcaagaccttcatcgccgcctcggcggcgtacatggcgggcttccgccgcgtgctcgtgctctgcccgccgcacctgacgcgcaagtggaagcgcgaggtcgaggagacggtgcccggcgcccgcgccgtcatcgtcgcctcgatcaccgacctcgagcggctgcggaccgtgaccggcgacggcccgctcttcgcggtgatgagccgcgaacgggcgaagctctcctaccgctggcagcccgccgtggtggagcgctgggcgaccaccggaggacggctcgtgcgcgacgaggagacgggggagccgttccgggtgccgtgctgcccggactgccacgagcaggtcgtcgacaaggacggggtgcctctgctcgctcgcgacctcgcccgccgcaagcgctggtgcccggagtgcggcgcgccgctctggcaggccgacaactcaggcccgaagcgctacccgctcagcgactacgtgaagcaccgcctgcgcggcttcttcgacctgctgatcggcgacgaggttcatgagttcaaggcgcgcggctccgcccagggcatcgccgccggcgtgctcgccgacgcctgcggcaagtcgctcagcctgagcggcacgctcatgggcggctactcctcgacgctcttccacctgctctaccggttcagcccggagatccggggggagttcgggcgctccgaggagagccgctggatcgagcgctacggcttcgtcgagcacaccatcgggcgcgacgaccccgactccttcgaggacgggcgcaccagccgccgcaagcgctaccgcaaggtcgtgcgcgagcgtccggggctcgcccccgccgcgctcttccacctcatcgggaactcggtgttcctgcggctctccgacgtggctgccgggctcccgccctacgaggagcgcgtgctgctctcctcgatggacgcggagccggacgcgaacggcttctcgcagcggagcggctacgacgagctctacgggacgttgcgggccgcgctcgccgacgcgctctcgaagggctcacggcggctgctcgccacctacctgcagacgctgctcgcctaccccgacggctgcacgcagggcgagacggtcttcgacccggagagcgaggagctgctcgtgcaggtgccgcccctccccgaggaccggctctacccgaaggagcgggcgctcgtggacctcgtcgccgccgagcggctggcgggacgccgggtgctggtctacgcgacccacactgggacgcgcgacatcaccgggcggatggaggacttcctctcccgccacggcttcaaggtcgcggtgatgaaggccgacgcggtgccgcccgagcgccgcgaggcgtgggtcgcgaagcgcgtcgaggagggcgtggacgtgctcgtctgccacccccggctcgtgcagacgggcctcgacctcgtggagttcgcgacgatctgctggtacgagacggaggtctcggttttctaatccacaccaaaagatgcgctactcgtgggccgtgaacctaccgggtagccgctgacgcctggcatcgcccaccttcgcccgattgtccaagcggctgtagcgggacgttggcatgtccgatcggctcctcggcgtcgccaacaagcgcctagagttcagctcatgccccacaacaaagggaacggggcgggccggagcccaccccgcaacgtggtgcatatcgccttgcggctcagcttgttgttggtgcccgtaggcaccgccaaccattcccgacggcgaggctatactgggccgccccgcacgtcaaagtgctgatcggcaaagggtgggcggatgctgcgacttgggctcgacctgggcacgaacagcattggctgggcgctttatcgcctcgccgaggacggcgagcccgaagcgctcgtcgacggcggcgtgctgatccaccccgacgggcgcaacccgcggaaccgcgcgtcgaaggctgccgagcgccgcatcaagcgcggcccgcggcgcaaccgcgaccggatgttgcgccgccgccgccgcgtcgctcagctactgcatgggctcgggttgctgcatagcggcgaggaggcgcgcaaggcgtcgcggagtctcgacccgctgcaactccgtgccgaggcgctcgaccgcccgctcacgccgcacgaactgggccgtgtgctgttgtcgttcgccggtcgccgaggcttcaagagcaaccgcaagactgacggccgcgaggagggtgccatccgcaaggagacgggtgaactccggcgtcgcatggagcaggccgagcgtgacgcccagcgcgaagggcaacacgcggcccgcacgcttggcgagttcctgtggcgccggcgcaatcgcggcgagactatccgggcccgcccgacagggaacagggagcgcccctacgccggcctctacccggatcgcgcgatgatcgaagacgaactcgacgccatccgtggcgcacaggcggagcatcatccgcggatcgcggacgaggactgggacgagatcatcggcgtgttgctccaccagcgcaggttgcggcctgtcgagcgcggcaagtgcacgctgttgccggatgagccgcgcgccttccgcgcgtacccgctgttccagcgtttccgcatccggcaggaggtgcggaacctggaggtcgagacgcccggcgacccctcccgcccgctcgctgacgaggagcgcgagcggctagttgccaagctgctcgacagcagggagttcaagctcgatcacgtcgcggcgttcctcggcctcccggatggcacgcgggtcaacctgcgctccaccgcgcgcgacaagatcgatggcgatctgaccgcagctgtgctgcgcgcgaagaagtgcttcgggcggaccagctgggccaggctcagcctcgaccggcaacaagagctcgttgagcgcctgatcaaggacgaggaccacgagcggctcgtggactggctgcgggacgagcacgggctgagcgaggacgccgccgaggcggcctcctcgacgcgcctgccgcaaggcacgggcaacctctcgaaggccgcgatcgagcgactgcttccacacatgagcgcgggtcagcgctacgacgaggcagtggaggcggccgggctcggccaccactcggacatgcgcggcgacgggaaggcagcgcgtctgccctactacggcgaggtgttgcagcgcgccgtggtcggcggcgggaagacggatggcgacgacacggagcgctggggccgtattgccaatccgaccgtgcacatcgcactcggccaagtgcggcagctcttcaacgccatcgccaaggagcacggcaagccgggcgaggtcgtcgtcgagctggcgcgcgaactgaagcagaacgaagagcagcgcctcgacgaccagcagcggcagcgcgacaaccgggagcgcaatgaacgcctgcgtgagttggccgagcaagcggggcacgaagatccctcgccgctggacatgcgcaagctgcgcctttgggaggagcaagggccgccaaatgcccgcctctgcccgttcaccggagagccgctctcggtagagcgcgtgctttccgccgccacggagatcgagcacctcctgccctacagccgcagcctcgacaacagtatgaacaacacggtcgtggcgatgcgcgctgcgaaccgcgaaaaaggcaaccgcacgccgttcgaggcctggggccacgaccgaggtcgtttcgacgacatcctcgatcgggcgcgcctcttgccgttcgggaagcagtggcgcttcgacgaggacgcgatggaacgctggcagtcgaaccgcgacttcctcgatcgccaactgaacgagaacagctatctgtctcggctcgtccgcgagtatcttgaggcggccgtcgcgcccaaccgtatctgggtaacgccggggcggatgaccgcgatgctgcggcgcggctggggcctcaacagcatcctctccggccccggcagcgattggaagaaccgcgacgatcaccgccatcacctagtcgacgctgcggtggtcgggatgacctcgcgttcactgctgcagaaggtcgcccgcgcaagcggacgcgacgaagacagggagagcgtgatcgccgtcgcagagcagccgtgggagggcttccgccacgatgtgggcaactttgtcgagcgatgcatcgtgcgtcaccgcccggaccacttcacagtgctccacgacaagcaagcacggcgccgcgcgggcagggacgtgtcgagcggcagcctgcacaacgacacggcgtacgggatcgtcgatggtcccgacgagaacgggtacatgacacttgtggaaacgaagccgttggacgcgctcaacccgaagaagctcgccacggtccgcgacctcgcgctacgcagccgcctttgcgagttgtgggagcgcgtcgctgcggagggaagcggcgagagcgccacggtagcctggcggcggttcaccgaccgcgcctcggaggaactgcgcgtgcgacgtgtgcgggtgctcgtgcgcctaggcgagaacggtctcgccttcatccgagacaggaatgggcgtgtctacaaggcctacaagaccgacggcaacgcatacatggatatctggctgctgcccaagggtaggaagaccacaggcgaaaccgtctcccgcttcaacgcccaccagccggacttccgatccccgatcaaggccgaacacccgacggcgaggaagctcatgcggctccagatcaacgatatgatcgcggtcggcgagggggacgagcggcggcttctccgagtgcagttcctatcaggacagaagatcaccgcagtcgaccacaacgaaggcggggacctccgtgcccgtgtgcgggcgtccgacgatgccgagagctacgtcccgctccgagtcagcgcgagccgtgtgatccaagcaggtctgcgcaaggtatccgtcgatgtgcttgggcgcgtccaggacggcgggccgttcggcccggacggacgtggcagaatcggcaggagttgacccgatggagcgacgcgtgctcgacatcgcggaaggacggcgctacctctacaagaagcgtggctcgctcgcggtcgtccaagacccgggcgagcccgaggagtccgagatgctcgtgccgttcgacgagatcgagtcggtgattgtgcatgctccacaggcgtcgtactcgaacgccgccctcgttgagttgtcgcgtcgcggtattccgctcgtgtgctgcgacgagacgcacacacccgtcgcttggctttggccagccgaagcgaacttcgagcagagccggcgcatggccgcgcaggcagcgatgccggacgggctgagggacgctctatgggcacgtatcgtgcgcgccaagctcacagagcaggccgacgtggtgcgcgacgaagggctctccgacgagggcctgcttgagttcgcccgcgccgtaagtcccggcgatcggggcaacgtcgaggcgcaggcggcgcggctctactggaagctcctgttcgacgacttcttccgccgtcaccgccacgggccgccgccgaacggcctgctcaactacggctacgcgatcctgcgggcgacggtcgcgcggcacctctgcgcggcggggctccacccctcgctcgggatccaccaccacaaccgcttcaacgccttctgccttgccgatgacctcatggagccctttcgcccggcggtcgaccgcgccgtcctcgcgctgtggcgcgagggccaggacgaggtgacagcggagacgaagtcgtcaatggtggcggtgatgtcgcatagcgtgcgcaccgagcgcggcgttacgccgctcagccgttgcgttgagcgggccgcgcagtcgctcgcccagtccgtcaccgagggtgaggaccggctctggttgccgggggtggtccccgcagtcgcgtgagcgagttcagcgggtaccggttcatgtggatgctggtcatgttcgaccttccggtcctgaccaagcgccagcgcaggcgggcgaccacgttccgcaacgaactgctggacctcggcttcgagatggcgcagttctcggtctacatgaagttctgcgggggacgcgcagctgcggatgcgctgtccacgcgggtcggacgccgcgtgccggcgcagggacgcgtaagcatcttggtgttcacggacaagcaatacggccgcatgcacgtgttcagcggcggaagccgcgaggctaggacagccgagcggagtcaactcctgctgttgtagcaacaagcagggcgagcctagctaggctcgccctgactccccgccctgaggcggtcttttggccgtccggcttatctaggttagccggtaggggaatggtcggccaccaaaacgagtgcgcggtagaagctccccgccttcaaaggttagccggtaggggaatggtcggccaccaaaacaaggaaacgaatgtcgtcgcggacgatgctaggttagccggtaggggaatggtcggccaccaaaaccacccgcgtccagatgacctgctcgacttaggttagccggtaggggaatggtcggccaccaaaaccttgatggggtcggtgatctgctcgccgataggttagccggtaggggaatggtcggccaccaaaacacccgggcatcgttgaccgcatccgtcgccaggttagccggtaggggaatggtcggccaccaaaacgcagttgagccaggcctcgaagccctggataggttagccggtaggggaatggtcggccaccaaaactcaactaccgcgtgacgctcgacaagttccaggttagccggtaggggaatggtcggccaccaaaacgccctcgctcgtgacgatgcggtcggggaaggttagccggtaggggaatggtcggccaccaaaacctggtcgacatcgtcgaggcgggtgtcgagaggttagccggtaggggaatggtcggccaccaaaacgcgggcgggaatgtcgacgctggactggcgaggttagccggtaggggaatggtcggccaccaaaacgaagcgagcgcgcaggctatcgccgcggcaggttagccggtaggggaatggtcggccaccaaaacatgggcgcgccgcctcggctcgaccaggcgaggttagccggtaggggaatggtcggccaccaaaacgccagggggctggggcctgtggctggccggaggttagccggtaggggaatggtcggccaccaaaaccgcatccgcctcgcgctccacgtcctcctaggttagccggtaggggaatggtcggccaccaaaacccggtgtacacctgcacgccgtcaaactgaggttagccggtaggggaatggtcggccaccaaaacccggtgtacacctgcacgccgtcaaactgaggttagccggtaggggaatggtcggccaccaaaacccgatcgtctggcacgcgttcccgaccgaaggttagccggtaggggaatggtcggccaccaaaactttccccgtcgacgcccgcgagccacctggaggttagccggtaggggaatggtcggccaccaaaactcatagaccgggaacgtccagcccatcgcaaggttagccggtaggggaatggtcggccaccaaaacgccgcggccgtgctcgccggcggcgccctaggttagccggtaggggaatggtcggccaccaaaacgtcgggcagcttcggcacctcgtggctgggaggttagccggtaggggaatggtcggccaccaaaacagggtctacaacgaccaacacgccgaccgcaggttagccggtaggggaatggtcggccaccaaaaccaggatgcgagcgcccgcgatgccgaccaaggttagccggtaggggaatggtcggccaccaaaaccgggtgcgcgagggggaattcgtcccaggtaggttagccggtaggggaatggtcggccaacactcgccccatccatgtagttcaccgatgacagtaacggagtgttcccgtggctcacacttgtttccactccgcatgaacggtgcaagcgtcgattcgtatgcgtctcacagtgatctttgcatcggatcggtccagcgccgccaccgccacgacctccccattcacgcgacatgggatggacggggcatcagatctcggttttctaatccacaccaaacgctgcgttactcgtgggcagcgaagctgccggcctcctaactacccgcagctatgagcaggcgcagcgcgcgtcgcccgattgttcggctctgccgt

SEQ ID NO: 3341 - DNA, 8822 bp, synthetic construct
  source 1..8822: mol_type = other DNA
  misc_feature 1..8822: note = Synthetic
tccatccattggacgtggacgttcggggggtcagtaggcccccccttcattgaagcagctatttataagggccgcagtcgcgaccttaaggttgtttcgaaactttctctgctgatggtttctgcggcttgtagtcgtgtgttggagtcttccagagtgagaatttcccagtgggctcggacgagttgcagcgccccattgccggttcgttcaaggcagacgactatccagatgatgtctccttcattcagatcgtggctaggttggctgctagatccgccaatcgcatcaaagaatggttggtccacaaccacggcaagcttggctccccatcggcggactgttggggctttgatttggagttgcggcataagtcgtttagcgctggaggatcgccagtcgggacgacggttagctgaagggaacggagggggctcctgaaggtcgtctcgtagtgcttcaaattcgctggtcatcccctgacctgagaaatagacggcttggatttctaggccatgccatttgagatcgtctccctgctgatgggcgacgatcatatctatcttgccagcaggtttgtttgtctcggtgcttcgcatgaaggggacttcattggccaccttggtttcttggagggggaaatttgcggcttgtgctacccacttatagacgagaccttcagcttgaaagcgacgtggacacatgatgacgggctcacctaccgattcgccgagacgaccgttatagtctttcgtgtaacgttgcattgaacagactccacccttttttgaacagggtggctggtctggctggaatgggcaaactgggtgtttagtttcagatttgcccagcgcgtgctcggcgtaggcttttctttgctctgcactaagtgatgtgaactcttgtccgtaccactcggcaatgccgtatcgtgttttggcgttgtcggacatcttgttggctatgtgaagacaactcgtcgggtgatgatgagttcggagatgtgagcgtgatgggtattcttcataacaacttcgacggcgtgaaatccgtattctgtaatgagttcagcgatctccggtgagcggtcgtaggtcattaaaaaatcgactggggtttgcgccaggatcttgaaaagtcgtcggtggtctatcttgttgtggctgtagagacgtttgccagcttgttttccgccagcagtgtagggagggtctatgaaggcgactgtaccgggaatctcggcaatgatctctaggaggtcaagcccatcagtttcacagaagttgatttgttgagcgtgggcctcgatgttttgtaatcggtggataatggtgtcgggataccaacgagacacaagccccttgttgttttctccagactttgttagggcagctccgggcgcgaggatgccgccacgccgggttcggttaagaaccaaagtgcggaacccatgctcaagtaggctctggggggcttggtcagctagggcagaaactgattcgcgtgttggcttgaactcagagatgaggtgacataattcgtcgttatggtggagcgccgcgtgccagaaggcagctacatcgtggtctagttcggccatgaagcactgttcggccaagccttcaaatacagcggttagagccactatgcctccaccgcaaaatggctcaacgagtgtccttgacctgggctgtatgggcgcgagccaggcccgcacatggggaataagccaggttttgcctcccggataccgcagcggtgagcgctgaggaaccgaggcaacgttggctgctgggatgggagagacagggaagtccggaccgtagtcagtcaaggacgatttattcccaacggcctcgcttggcgacatcatggcgttagtggccttgagcgagtcgctgtttgcttttgcattgttaattagcatggcatgacagcaatcatcattagcggaacttatggccatagtgaatgcactgccatgctgaattggcggcatcgctgggatttgcatctgcccaattctcgcctttttgtgcataaccaaagaataagaatggatatgacagtttcaagtgtgcagcaaactatcggagctataggcaggcaggttgcttgatctagaactctgcaaagtggagtctaaaatcgctgtaaagtggagtgtgagggtattctcactataggagaagacatgcccgaaactcgtaatccaaactatttgagccgtgtggtagatcacgaggtggttgaggctttggcctcgtcgcccgctgtgcttattgaggggccgcggggatgtggcaagacgtggaccggtcagaggttcgctaacagcgaggtatttctagacggttctgaagttttgcgcatagcagcggaagtggatccgaattcgattttggagggagctgaacctcgactgcttgatgagtggcagcttacgcgaggcatatggaatccgatgcgacatgcctgtgaccggcgaggtgggtttgggcatttccttctcaccgggtcgcagaatccacccgacgacatcaccgagcattctggtgcaggccgagtcgctcgggtgcgtatgcgtctgatgtcgttgtgggagtcgggggactcaagcggggaagtatctttggcctcgctgttggcaggcgaacgttgtttagcaaaagacgctgaacaaacctataacagcatcgcttccctgatttgtcggggagggtggccacgcatgattcagatggtgccgaacattgctcaagcccgcctgcgtgactacttggataatatcacccgtaccgacctctcccgggtgtccggcatcaaacgtaatcctcaactaatagcgcgtttgctggcttctttggctcgtaacgaagccacgaccgcttcttgtgccaccttgattgaggacatagctagcgaagatggaagctcgctagcacgatccacgattcgagcttacttggatgagttaacccgtctgttcgtgttagagccgcttccggcttgggccacccatctaaggtcttcggcccgcttgagaaagtcgtcaaagcgattctttgttgatcctgcactggccgttgctgctttagcggcatcggtggatactgttgctcaagacagagaggcgatgggtctgctgtttgaatcgatggccattcgtgatctccgcgtgtatgcccagtcgttgtgtgcccacctttactattacggcgattcgaatggccttgaggctgatgccgtgatcgagggattggatggccagtgggctgtcgtggaaatcaagcttggtggtggggaaggtattggcaaagcaatcaaatcacttcgtgctgttcgctctcagatcgacactacccgacgcggagagccatcccgtctcattgtgctcaccgcttttggccacggttatcaaactgacgacggaatcgccatcgtacctcttactgcgctcaagccttgatccactggtgctggatcactcgtgtcattgactagccaacttttcatctagcgtgatgttagtgagtggttcagctacggtgtcttggggtcagtttgagctacaagttcctgacttagccgagcagatcagaactcggtttgagagtcatatccacgcggtattgggtacgctgcgtagtgatggatctccccggttgtcggggatagaggtgccgatccgcgatggacatttgtggttggcgatgatgtcaggttcgctcaaggcgacagatttgcatcaagatccgaggttttcgctgcacagttcgttagatacagaagagttgttgttcggagatgcccgcattgacgggcaggcagtaggcgctaccccagaggaagttgaggtttttgtggctggccacagaatgcccattgatgatccagacgcaatggtgctgttcatcgcctgtatttctcgtgccgtcctcacccgagtggagggtcaagaactggtgattgatacatggactccgtctgatggtttccgagagattcgccgaatctgagacggcttacacttgatttgttgttaatatcgatctacgcattgaccgagcgagacgggcgtgaactcacgtataatagcggacgtagttcatagggatttgaggttattctcagaggtctagctgtcgcacagaaccgttaaaggggacaaggcaggccgaagcctgccttgcaacgtggtgcatattgccattatggctcagcttgttgttggtgcccgtaggcaccgccaatcatttccttagtagtagaggctacgtgtagatctccttagtgtcaaagaggccggggggatttttgggctaacggaaggcacatgactacgcttagtaatcctgatcgttaaaacacttgtttaatcttggagggttaatgctgcgtcttggtcttgatctcggcactaatagcatcggatgggtgctgtatcgcctggttgatggtgagcctgtagaactggttgatggtggtgttcttattcattctgatgggcgtaatccgaaaaatcgtgcgtcgaatgctgcagatcgccgtagtaagcgaggtccgcggcgcaatcgtgatcgtatgttgtgtcgtcagcatcgcgttgctggattacttcatgatctcgggttgctgcctcaggacgaagaagctcgtgctgtgctgagaaaccttgatccccttcagcttcgagcagaggctttggaccggccactcaacccgtatgagcttggtcgggtgttgttatctttcgctgatcgtcgtggatttaagagcaatcggaagactgacggcggtgaagacggagcaattcgaaaagatgtcagcgaacttcgtcggcgtatagagcagtcgggtgcccgaacgctaggcgagtatctctggaggcggcacagggatggtaagaccattagagcgcgtcttggaaatgggctgtacccagatagggcaatggtcgaagacgaactcgaagccattcacaaagctcagatttggcatcattcggaactaaaaccggatgactgggattcggttattaaaacgcttctctttcagcgacggcttcgtcccgttgaacgaggacattgcacactcatgccggaggagaagagggcatataaggcgtatccattctttcagctatttcgcatcttgcaggaggtgatgaatattgaagttgcgccttcaggggatggttttcgtcctctcggtgtcgaggaacgcgaacgagttgttgacaagcttctgtcctcgaaaagtcggacgttcgagcagattgtggttgatgccaagcttccagaaggcacgcgtgtcaacctccgttctatagctcgcgaaaagcttgatggcgatcttaccgcgagtgcgttgagttcagggaagtgctttggcaagaagtggcagcaactcagccttgagcgacagcaagaggtagttgagcgtctaattgaagtcgaggactcttgggaacttgaggattggcttcaagatgagtttgaccttagcgaggaggcagccgaggctgttgcagcagctcgattgccgcagggcacggggaacctgtcattggcagcaattgagaaattgctgccccatatgcagcaaggccagcgctatcatgacgcagtcatcgatgcagggttgggtcatcactcggacttgcgcggtgatggcggcatggctcgactcccttattacgggaaagtgttggcgcgccatgttcttgggggacgaccagatggacgtagtgatcaggagcgatatggccgcatagcaaacccgacagtacacattgccctcggccaagtacggcacctcttcaatgcaattgtcgggcgttacggtaagccagatgaggtggtcattgagttgtctcgtgaattgaagcagagcgatgcacagcgaagtgattatgaacgacgacaggccaaggatcgtgagcgtaatgatcgtttacgtgagctggccgaaacggctggccatccggagccttcgggtcaggacatgcgcaaattgcgcctttgggaggaacagggaccggttaacggtcgcgtgtgccctttcacgggacgcaccatctcagtggaaatggtgctttccgatgccaccgagatagaacaccttctgccttatagccgtagtttagatgacagcatgaacaacaaggttgtagcgatgcgagatgccaatcgtgaaaagggcaactgcactccgtttgaagcttggggccacgattctgagcgttatgaagccctccttgctcgagtacgtctcttacctaaagagaagcaatggcgttttaacgatgatgctattgataactgggaaaaggaaggccgttttcttgatcgacagctaaatgagaacagctatttgtcgcgggttgcacgcgagtacttggaggctgtagtgcctccagaatgtatctgggtcacaccggggaggatgacggcaatgctgcgacgacgtttcggcttaaacgggattctctcggatgagagtaatggaagtaagaaccgcgatgatcatcggcatcatctgattgacgctgtggtcatcgggttgacctcgcgttcgcaattgcaacgggtagcccgagctaccggtcgaggagatgacggagacagcatcttagagactcttgagcttccctgggcaggctttcgagctgatctagagtctctcgttcagtgttgcgtggtgcgacatcggcccgatcacttccaaccttcacacggaggtacaactggcagccttcataacgagacagcttatggcattgtcgatggccctgatgagaaggatcggatgacgcttgtggagactaaacctctcgattcacttgccccagagaagcttgatgccgtgcgtgatccggcgcttcgtgaccgtctaaaggcattgtgggagctagttgatatggaatgtgagggtgagagtaggggagttgcatggcagacttttgtggatcgtgcctgggcagaatttcgtgtgcggcgtgttcgtgtgctgacgatattaggtaaggacagtctcgcgtttattcgggatgagacaggtcgtgtttataagacctataagaccgatggaaatgcctatatggatgtgtggctgcttcccagcgggaggaccaaaggtgaaacggtcagccgcttcgatgctcaccaaccggactttcgctcgcaggttaaagatgagcacccaaccgcgaagaaactgatgcgtcttcacatcaacgacatggtcgctgttggagaaggcagcgagcgtcgcatcatgcgagtgaaggaactttcagggcagaggatcgttgctgtagatcacactgcggctggaaaagctaaagaattgaggtctgaaaagatattaaataagtcagctgggcaagtgctacaagcagggcttcggaaagtctctgtcgatgtgctggggcgtgtgcatgatggtggtccgtttagtcgggacctgcaaggcaaggacagaaggcagtagggttatggagcgtcgggtgctcgacgttgccgaaggcaggcgttatctatataagaagcgtggttcgcttgctgtcgtatgcgatcaaggcacacctgaagcatcagaaactctcgtgccgtttgatgagattgagtcggtgattgttcacacgccgcaggcttcatattccaatggcgcgatgcttgaacttgccagacgaggcattcctcttgtgtgttgtgacgaaactcacacgccagcagcttggctgtggccagtacaggggaacttcgaacaaggtcgccgcatgatggcacaggttgctttgcatgatgaattacgggatgacctgtgggcggacattgtgcgagccaaattagaagctcaggctgccgtagtgcggggtgagggtttttcggacgacgtactccttgagtttgcccgtgctgttttacctggcgatagaggcaatgtggaagcacaggcagcgcgactttattggaagttgttgtttgacgagcgctttaggcgccgtcggttcggagacgaacccaacggtttactcaactatggttacgcgattttgagagcgacagtggcacgccagctctgcgcggcagggttacatccttctcttggattgcatcatcacaatcgctttaatcctttttgtttagcggatgatctgatggaaccctttcgtcccgttgtagacagcgctgttatcacactttggcaatcaggatgtgaaggtgtgacagctaaagcaaagtcggtacttgtagcggtgatgtctgagagtgtgtggactgaacgaggaacagcaccgttgagccgttgtattgaatggacagcacagtcgcttgctcagtcagtggttgaaggaaagaacctattgtgtcttcctaaaggcacagtcttggtcggatgagcagctttagtggatatcgctttatgtggatgatggttatgttcgatttgccggttcttactaaacggcagcgtaagcgagcgacgaagttccgcaatgatctgttggaccttggatttgaaatggcacagtattcggtctatatgaagttctgtggcggtagacctgccgcagacgcgcttgctcggcgcgtagagtaccaaatgcctctcgaaggtcatgtcagcatcttgatattcacggataagcagtacgggcgcatgagagtgtttagcggggggacgcgagaggcaaggagagctgagcgtgaccagcttgtgttgttgtaggcagaatcctcctcagttcaaaggatctgaactgaggaggatgtatctagtttagttggttaggaaatgatcggccaccaaaactc

SEQ ID NO: 3342 - DNA, 7696 bp, synthetic construct
  source 1..7696: mol_type = other DNA
  misc_feature 1..7696: note = Synthetic
cgtgcctctcggaagatcttaggcagatgcatccacgagatgcaaatctggcagtggaggccatgatgatctacagaattatgtgaaccctgtggtcagttgtcatatttctatggtattattgaaatatgcaggaaatcagttttgtaatcagtggaacggccaccgaagagaaccgtctaggacctgagcggctaagcgtggtaatcaggttcggcagcgacaaggaaccgtccgacggtttcgcggcactgtgcgagacggttgccgcgtcacttgaagggaaaggactgaagttgaacaaccgtgagggcgcaactaacgtctctggttctatccacgtcgcccttgacgacaagggagcgccgggatcagagtacaaaagcgtggacttcaagtgccgcacggaccacagcgtctatggggctcgcgatatcctcgtcaaggcaatggaagatgccgatctaaggccactcaactaggcagcgcgtcgatactgcgcttttcgctaagacttctgaacccgcaaacctccgctcagattgcaacacggacgcaaactgaaaaacaaatctttgactaggttcgccgtccatcaaaccgagcctcattggggtggctgctcactgtttgctgtctatgttgttgtgggtgtgttcatgcctacgactgctattagcacaagggtgattatggctatcaacactgcgctcaacaacatgccacaggccactccccaaacaatggtgccgaagaattttttgcgtagagttgtcaacatttcgtaaatgctgtttagctctgcttccgttagccggtttcgtgtgtttggctcatgtggtggctcggcgtgcaactccacttctgcttccgctttctgtggccgttttggctgtgttggttggctcgtccccagcggatgttgttgctcgccgtcgagtgctgccatgatgttcttgaatttgctcattgttgtgctccgttagttgtcatagtaaacgctgcctatgtacccagttaggttgtgggctgccgcgtaaggtgcttgccattttgtttcgtgtttgtggatgtccgcgttgtccgccacatctatcgacgcaaccgtaccattggtgagtaggtggatagcgggcttaccccagcgcgtacggggaacaccgtgaggcggcgcgtacagagatgaccgaagcggttttacccccgcgtgtgtggagaacacgtgctgcatatgaacgtaccttcccagcgtagtaacttacggtcgcggataaagggagcgtgtacgccatttcgtctgtgtcatgcaggtgcttgaaccgtgggctcaaggtgtcgatggtgggtaccgcgtgttggtggtagtacatggaatcttgctgcgctgggagcttgcggtagcgttcaccggttggcgtggcaatcttctgagcgcattgcttgctcatcacacaactccgacaagggttcgaacccgaggcacaaactcggggcccagcccgcgttcgttctcggctgcgtcgacgatcaagtcgcctcgtatctcgttgccgtagtaaccgcgttggaggtagtcgttgaacttcgctgaagcgtcgtcgaaggacaactcggcccagtcgttgaagcatcggacagcttcaatgatcgagacttcccaacggttcaggctcagccggctggtgttgaagcgtcgctggaatatcgcaccgaggccggtgcggtcaggcgttcgacccagcatggccacccagagacgcggcgagacctgggtgctccagccgaacatgttgatggcgtaggggcccgtgacgcctgcgcctggcccggcgaaccgccaaggcagttctcgtatcgctttgattggcagccgggcggggtaacgcgccccgacccgtcgtctggtgtagatgccttgacacacgcgaccgataagcggatcttcgccacggcaggcacggctgacagacatcctgatcgcgtcgcgtgagatttcagggagagcgcgctgaacgtcgtcaaagtcaaaaagttcaccgaccggcaactgctgtgcccattcacggatttcgctagacatcgtccccccttccaagagtgttacaaaaccgtatcacgcaacgcgggtattgacacgagaacaaagggacaccgcctgaacactccaacgagaagcacgataggttcgggaaatgtctggagatcgcgcgaccatcgaacctaaaatcgaagtgccggggcagcccgaggaggtgtggagggcggttgcgaccggtgccgggatctcgtcctagtacgtgcgagttgtatctgactcttcctcgagaccgtgacctgctagtacgcggtccacagacgatggtgagtcccacacacgacccaaataggaaccgcggtgcgcgagtttgcgatgcgaccagtcgacatcaccccactcgtcgaagagacgcacgatcttgtcgctttctgagttccacagccaccaccaaccgtccaccgatgcaccgtgaaaaaacccgcgatttgtcgcgaagagtcagatgcaccgcaactccgtggtggcgcaccaccgcacgaaccggtatgacttgtgcattcccgatcagtcgacgcgccaaccgccgtgtcaacctgccgtcgaactcgtcgtgttcttccaagaaccgctcaccacagttaccgcacacgaaccggcaccgtatctacagcaaagtcgttgcccgccccgacacttccaagtcgcgcaccttccgttcgcgggtgtcatgaaccttgcggcatttgaaaccgcaatgcgggcacagcaccagccacctaggtcgactcgacccgcgccctcaacacagtcgaggtgtctaacaacgccttaaaccggtgacgcagatgtaaccgcgcccgtataacatcactagccattgaggccctcctggatattcggattataacaatcaccaattccagcaaggcctcgaaccaaactcaagaaccccaaccaccccgcatcccacatttacgcgcaggctcagttagtttcctgtcgcccacattgcattgcggaaaaggggacgaggcgggccgaagcccgcctcgcaacatggtgcatattgtctttgcagactcagcttgttgttggtgcccgtaggcactgccaaccattccttaagaatgttatgctacactttcttcgtccatgcgccaaccagaaaaattcttcgaggagaaaaaatgttacgtctcggtcttgatttaggcaccaatagcatcggttgggtgttgtatcaattggatcgcaacgacccacctgaaccgtgcggatttgttgacggtggtgtacttattttttctgacgggcgaaatcccaagaaccgccagtcgaatgctgccgaacgacgaaccaagcgaggtccgcgccgtaatcgtgatcggatgctccgtcgtcgtgctagggttgcacggcttctgcacgaagcgaacttgttgccgagcgacgatgtccaagcggcatcacttcgcaatcttgatccgctgcggcttcgagcggaatcattggatagaccattagaaccatatgaacttggaagggtgctcctttctttcgcggacagacgaggatttaagagcaacagaaaaacggacggcggtgaagacggcaagattcgtcaagaagtgagagaactcaggcgccggatcctgcaatctggcgctcgaacgctcggtgagtacttgtggaagcgtcacaaaaaagggaaaacgactagggcgcgtctcggtaatggactttatccagatcgagcgatgatccaagatgaacttgaagcaattcaaaaggcgcaatctagcaatcacccgaacctgaagcgccatgattgggaccagataattgatgctttgatgttccaaagggcactaagacctgtcgatcgggggaactgcacccttcttcccgatgaaaagcgagcacacaaggcttaccccgtattccaacatttccgtatatggcaagatgttctgaatattaaggttgcgtctcctagcgaggatggcacaaggtccctaaatgaaaacgaacgtaatcgaattgtggagaaattgctgacctgcaaagaaaggacgtttgaccagttggtagccgacgctaatctagaagaaggaacgcgcatcaacttggagtcgacagcacgggaaaaactcgaaggagattcaactgccgtcaaattgcggtccttgaagtgtttcggcaaagaatggagtcgccttaccctcgaacgacagcaagtagtgcttgaaagattgcttgaagaggacgactacgttgaacttgaatcctggctccgagacgagttttcgcttagtgagaaggctgccgaagctgttgctggtctaaatttcgttcaaggcacgagccacttgtcaaagaaagcgatcaacaaattgctacctcacatgaaaactggttttcgctacgatgaagcagttgttcgcgctcaactggggcatcattccgaccatcgcggtgacggtcgttcagattcgttgccctactacggatccgtactagaacggcatgtcgttgggcgtcgacaagaaggaaggaacgatgccgaaaaatacgggagagtcgcaaatccaactgtccacattgcgctcggacaagtgcgccgactgtttaacgcgatcacagaacaacatggcaaaccagatcaagtgattgttgaactagcaagagacttaaaacagtctcttgccgagcggagcagttctgagaaacgccagaaactaggacttgaacgcaacgaacggttgcgcgatctcgcaagacaagcgaacgttcccgaaccgtcttcgggtgacttgcggaaactgcgactttgggatgaacaaggcaaggtcaatgcgcgcatttgtccctttacgggtcaatcactctcggtggagttggtactttcagcggccaccgaaatagagcacttgcttccttttagccgcagtttagacgacagcatgaacaataaagtcgtggtgatgcgggatgctaaccgtgagaaaggaaatcgcaccccattcgaagcttggggacatgatcccgttcgatgggagaaaattcgttcgaatgtaaagcatctgccgattgctaagcaatggcggtttgatgaggatgcgatggaaaaatgggagggaaaggtcgattttctcgacaggcaacttacggacaatcgttacctttcgaggatggtgaaggaatatctcgaatatgctgtcaatcccaacaatatttgggttacgccaggccggatgacctcaatggttcgccatcgccttggactcaataacatattaaatgacgaaaacgagggaacgaagaaccgtgccgaccaccgccatcacctgattgacgctgcggtaatcggaattacttcaagatcgcagctgcaaaaagtggctagagcgatgggcaaaggtgaagacggccaacgtatcattgagaagtttgatccaccttgggacggctatcggtcggaccttgaggcgcttgttgaaagatgtgtagtgtggcaccgccctgaccacttcaagtttcgtgccggatacacgactggaagcttgcataatgagactgcctacggaattattgaagggcctgatactaaaggaattatgacattagttgaaactaagaccttggatgcaatcaatctgaaacgtcttgatgatgtgcgtgacctcaatcttagggaaagactaaagggactttacgctgaaataggtgacgcaaattcgggggcgggtaatgtgtggaaggttttcgtttcggaagcggaacgacgattgggagtaaggcgggttcgtgtattggttcgtctcggctctggcagccttgcgtttatcttcgacaaggcggggcaaccgtataaggcgtataaaacggacggcaatgctttcatggatatctggttgttaccgaatggtaaaaccaagggtgaaacgatcagtcggttcgtggcgcataaaccgaacgctcgttcagaagtgaaagcgaattacccaaccgcgcgaaaactgatgcgcctgcacataaacgatatggtcgccataggaaatggcgaggaaaggcggatttatcgggtacagaaactcgccggttcaaccgttgtcgctgttgaccatgtagctgcgggtaaggcttccgaattgcttcctctgcggaagtctgcgggccaaatattgcaaagtggcctgcgtaaggtgtccgtcgatgtcttgggtcgcgtcaaagatggcggcccatttcactaaattggctttgtagagacgctcccggacattgcaatggagcgtcgcgtgcttgatattaccgaaggtaattgttttctgtccaaacagcgcggttcgctagctatcgttcgcaatatgggagaaccgacggaaaagaaactgttggttccgtttgatgaaatagagtcggtggttgtcaactcaccccatgtttcatattcaaatggtgcgctccttgcgttggctaagaatgcaataccgctggtttgttgcaattcgtctcatgtgcctacagcttggctttggccgacagaagcgaattttgaacaggggcggagaataacggcgcaagcagcaacaccgaagtggttaagggatgcactttgggcccgaatcgtgcggacgaagttagaagctcaggctgcggttgtcagagacgagggttttgctaacgagaagctcattgagttctctcgtaacgtccagagcggtgacagtacaaatttagaagctcaaggcgctcggatttattggaagtgcctattcgacgaagggtttcgtcgccgtcgatacgggtccgcaccgaatgggctcctcaactacggatacgcgattttgcgcgccacagtcgcgcggcaaatttgtgcagttggtttgcacccgtccctctctttacatcaccataatcgcttcaatccaatgtgtttggctgacgatttcatggaaccctttcgtccaatcgtggattgcgccgtgttgactctatggaaatcaggctttgagcaggttacgaaggagacgaaacccgtgttggtgtcagtaatgaccgagagcgtccgtacggagcgtggagacgcaccggttagtagatgcattgaatgggctgcgcagtccctcgcaaactcgtttcttgaaggcgaggatcttctgagattacccaagggttctgcgctcgttgaatgagcacatttagcgggtatcggttcatgtggatgatggttatgttcgatttacctgtcctgacaaaacgacagaggaaacgcgccacgaaattccgcaacgatttacttgatctgggttttgaaatggcgcaattttcggtgtacatgaaattttgcggtaatcgaccgtcagcggacgcgctagccaaccgcgttgagcgcgtcgtgcctttcgaaggtcaagtcactctcctagtatttacggacaagcagtacgagagaatgcgcgtcttctcaggtggcacaaagagcaagcgccaagaagagcgcggtcagttggtgcttctctgagggcggcggcctccatcggtggttgcgacaagtcggccataatggtcggtgattagttagcaaccgaaccgatggaggtttctattatggtacagcgtttgtgttttgatgagcggacgcggatcgaggtg

SEQ ID NO: 3343 - DNA, 6109 bp, synthetic construct
  misc_feature 1..6109: note = Synthetic
  source 1..6109: mol_type = other DNA
gtcgtcagctcgtgccgtgaggtgttgggttaagtcccgcaacgagcgcaaccctcgtcgttagttgtatttctctagcgagaccgctgcgtacaacgcagaggaaggtggggacgatgtcaagtcagcgtggcccttacgcccagggcgacacacacgctacaatggccggtacaacgggcagccactgcgcgagcaggagcgaatccctcaaaaccggcctcagttcggatagcaggctgaaactcgcctgcttgaagccggagttgctagtaaccgcaggtcagccatactgcggtgaatacgttctcgggccttgtacacaccgcccgtcacgtcatgggagtgagtaacacttgaagtcggtgcgcgaaccttcgggacgcagccgccgaaagtgggactcgcgactgggacgaagtcgtaacaaggtagccgtagcggaagctgcggctggatcacctcctttctagggagaactccccgcacttcgtgcggggtatgccgaccggcgatcccatcgccggccgagctcccaggtcgatccgccagtccccgatctactcgggggcgcctcaaggccaagacccctaacccgggtggcggccgcgaggtcaacggcgtgtccggctcctcaaatgcattggcttccgctcttcaacggttaaggccgccgcccgccttcccgcgggcgcgcacccgccgatagccatcccgggccattagctcagcaggttagagcgcagtcctgataagactgaggtccctggttcgagtccaggatggcccaccaaactggacaaaatcgagaaccttcgagttgaggttcgagttggacatctagctcgccgggggattctcctcagctcttatcagaatccgttgacttgctcatccgaggagcaaacagccgcagagggacggcaagtctccgctgtaggcattggttctcggtctctccacgcgctccgaagcttggatgcacgttgtcgactggtgggccaccaaacttccggttacagagagtcttcaagcggacgttctccttgagcggtggagaagcactcgccgagaggactcctgaaggctcgccgcacagtttgtgagtgtgattcgtagttgcggcaaagactggtgctcctccgggcgtcgaccgatctcaagtcgaacagggcatagaggacgtggcggggagtgaggcggaggcgcagatctatggcgcgtgcgcggactgcacctggcctgaatgagacctccgactggcggtttaagcgacgagagcgggccggagcccgcctcgcaacgtggtggatattgctcccggcgggagctcaccttgttgttggagtccgtagacaccaccaaccattccctaggacaagggtagccccggagctacgcctgtcaactgcgagcggctagccttcactcccgtgggaaagaggcaaccccgtgctgcgactgggactcgatctgggcacgaacagcatcggctgggtactgtatgggctcgccaatgccggcgaaccggaggcgttgatcgacgggggcgtgctgatccactccaacggccgcaatgcgcaaagtcaggggtcgaatgcggccgagcggcgcgagaagcgcggcccacggcgcaaccgcgatcggatgctgcgccgtcgcaagcgcgtcgcgagattactgcgcgggctgaagctgctgccgacttccaagtctgaacgggctgaacagcgtcggctggatccgctgcggctgcgagccgaggcgctggatcggccgctgaccgctcacgagctcgggcgggttctgctgaccttcgtcgatcggcgaggcttcaggagcaatcgcaaaatcgatggcggcgacgatgggcagatccgccaggaagtcagcaagctgcgccagcggatggtacaggccgagcgggacgcccagcggcacgatcgtcatgctggccggacgttaggcgagtacctctggcgtcgccgccggaagggcaagacgattcgcgcgcgactgggcaacggcctatatcccgaccgcgcgatgatcgagcaggaactcagcgccatccagtccgcgcaggcgccgcatcacccagcgatcacgagcgcgcagtgggaccagatcatcaatcaggcgatcctgttccagcgcgagctcaagccggtcgaacgcggctggtgcacgctgatcgagggcgagcaacgcatctacaaggcggagccgctcttccagcggtatcgcatctggcaggaggtgctcaacctggagtacgcgccgccgcgcgagggcaggcagcccctggatgagcgccagcgatggttggtcgtcaacaagctgctggaggtgagatctcggaccttcgagcagctcgccacgttagcggggctgccggacggctcgcgcttcaacttcgacacgacagcgcgcgacaagctggacggcgatcagaccgcggccgttctgggcacgggcaagcgatttggcaagcgctgggccaacctgggtcctgagcggcaacaactggtcgtggagcgcctgatcgaggaatcggatcacgagacggtggtgacctggctgcgagacgaactcggattgaccgccgaaaccgccgaggcggtggctgagtcgcccttgccgtcaggcaccggcaatctctctcgagcggcgatcgagtgcctgttgccgttcatggagcaagcggggttgccgtatcacctggcagtcacggctgcggggctcgggcatcactccgatatccatggcgacggcagcgccggccggttgccgtactacggcgcggtgttgacccgggacgtggttggcgggacatccagggtcgatgatccggacgtgaagcgctacggcaagattggcaatccgaccgttcacatcgcgctgggccagttgcggcggttgtttaacgccattgccgacgagtacggcaagccggatgaagtcgtggtcgagctggcgcgagacctgaagcagacgcgagccgatcgcgagcgcgatcagcggcggaacagagagaaccagcagcgcaatgagaaactgcgccagctcgccgccgacgccggtttgccggaaccatcggcgctagacatgcgcaagctgaggctgtgggatgaacagggtcccgtcaatgctcgcctctgcccgttcagcggcgagccgctctcgatccagcgcgtcctctccgatgccaccgaggtcgagcacatcctgccttacagccgcacgctcgacgacggcatgaacaacacggtcgtcgccatgcgcgaggccaaccgcgagaaaggcagtcggacgccgtatgaggcctggggcggcgaaccgctccgttacgagcagatcctggcgcgggctgaactgctgcccccgggcaagcgctggcgcttccaggcggacgcgatgcagcagatcgaggatcggggtgggtttctcgaacgacagctgaacgacacgcgctacctctcgcgagccgtcaagcagtacctggaagcggccgtcgaaccagacaagatctgggtgacgccgggacgcttgacggcgatgctgcgggtcgcgtgggggctcaactcgctgctctcggggaatgatcagaaagagcgcagcgatcatcgccaccacctgatcgacgccgcggtggtcggcatgacctcgcgctcgctgttgcaggaggtcgcccgcgacagcgcgcgaggcgtcgatgaactcggcgaacgggtcgccgagtccgtcggggatcatccgtgggagtgggaggagtatcgccgcgacgtcgagaagctgatcgatcggaccatcatccgccatcgccccgaccacttccagcccaaaccaggcgggacaacgggcagtctgcacaacgagacggcgtatggtccgctgttcacatccgacggcgatttgcggcgcgacgatcgcggcaacgtcctcctggtcgagaccaagcacctggccgaccttgaccggaagaagctcgaaacggtgcgcgaccacgccctgcgcgagcgactgatcgcactctgggatcgggttgaggcagagccgggcgagggcaagctgaacgagcgcttcgccgatcgggcacagcaggagctgggcgcgcgccgggctcgcgtgatcgttcgcctcggcgaagacagcctcgccttcatccgcgaccgagacggccgcatctacaaggcgtacaagaccgatggcaatgccttcatggatatctggctcttgcccaacggcaagacgaccggcgagacggttacacgcttcgacgcgcaccagccgggctttcgctcgcgggtggaaggcggaacatcccaccgcgaaaaagctgatgcgcctgcacagagacgacatgatcgccgtcggcgcaggcgacgagcggcgcatcatgcgggtgaaagaactatctggaccgagcatcgtggccgtcgagcacacagcggcaggcaaagccaaggagatgccgttgtacaacaagtccgccggccaggtgctgcaggtgggcctgcgtaaagtctccgtcaacgttctcggccggatcgcagacggcggtccgttcgaccagagtgggagaggagcaaacggcaggagttagcttcatggaacgccgcgtcgtcgatatcgccgaaggcaagctgcacttgtcgaagcgacgcggctcgctcgtcgccgcgcgagagtcggggacgcccgaggcagccgaaacgctactgcccttcgacgagatcgaatcgatcatcgtccacacccagcgcgccagctattccaacggcgcgctggttgagttggcccgtcgaggcatcccgctggtctgctgcgacgagttccactcgccggccgcctggctctggccggcccagggcaactacgagcaaactcgacggatggccgcccaggtgacgatgtcggacgaactgcgcggaacgctctggcggcggatcgtgcaggccaagataacggcgcaggccgcgctcttgcgcgactcggaggaggaatacgaacccctgctggcaattggggagcgaatcgaaccgggcgatccgcccaacctggaggcgcaggcagcgcgcttctactggaagcgcctgttcgacgacgactttcgccgacgggcgcgcggcggtccgccgaacggactactcaactacggctacgccgtgttgcgcgcgactgtcgcgcggcagctctgcgcggctgggctgcatccgtccatcggcctgcatcacagcaaccgcttcaacgccttctgcctggccgacgatctgatggagccgttccggccggcggtcgatcgcgccgtgctcgagctctggcgcgaggggctggaggaggtcaacgccgaaacgaagccggaactggtggcggtgctggtcgagtcgctgcgcaccgaccgcggcgcgggaccgctcagccgctgcatcgagtgggcggcgcagtcgctggctcagtcggtgctcgacggacgcgagcgtctgcgcttgccgatcagcgagccggcgcaggcggcgtgagcgcgttcagcgggtatcgcttcatgtggatggtggtgatgttcgatttgccggtgcttagcaagcgccaacgcaagcgtgcggcgaagttccgccacgacctgctggacgagggctttcagatggcgcagtactcggtctacatgaagttctgcggtcagcgcgacgccgcggacgcactgaccaggcgggtggagcggctggtaccctccgagggacgggttaacattctcacggtgacggacaagcaatatgggcggatgcaggtgttcttcggcagggcgcaacagccgcaccaggcaaagcggaaccagctggtcctgctctagcgcggtcggggggcaccctcggggtttggcggcttcctgctatctagtttagcaggtctgggaatggttggctgccaaaactggaccgacccgttcggcgactcggacggagtttagcaggtctgggaatggttggctgccaaaacagcagtccgtggatccattcagcggacagcagttcaactcgtcagggagtggtttcatgaaaaaaaatccgagcccacgacccaggcagaaaaagaatttgacctgttctgg

SEQ ID NO: 3344 - DNA, 5581 bp, synthetic construct
  source 1..5581: mol_type = other DNA
  misc_feature 1..5581: note = Synthetic
aaacgccaaatccagcgcccagctatccagcgcttcgccatccctgggcagggtaatgttcagaacaggctgattttcactttgattgacggatccataatcatcactggccaacttctgggccggaacaaacaacaacccggtgcccaacacacacgccagcgcacccgccctggaaaaacccttgaacatcgaacccccttcctcctcccctcacgtcaaaacccaaaaatccttgggcaaaatgacgcgggaattatcggaaacgccgtccgcccgtctagcaacgtcctcatggctccaaccgccatcctgaagaacaccagtgcgcattacggcctcaaaaatcacgtcagctaatctctcttcttctcgggcctcggagtatccgagtgaacgcccatcctgacagccaatttaacgtcatgtgcgttgtagaatagaaatttaccaccacggttcatgtgtaaagcatatactctgcgttgtaaagcatgaatccaccaccctaattcatatgtggtttacaagtctagcaacctaaggtacggagattcggtttttcggcggatgcccatttgccgtcgatttcgacgaggacagcgctgacgaggcgttcaagtgatttttcgttgggaaagacgccccccttttgggtgcaaggccttcggggggggggatccggacagtggcggaggttctgaatcctctcgcttcgaccataaaaacaaaaacaagggtttcgccaaaccggccaagcccttgttttttgtctttcgacgaattttcagtaaaattcccaggccgtaacggggcaggggagaccgaacaggaaagagcgggccggagcccgctcttcaatttggtgcatcttgcctcgaaaggctcagcttgttgttggctgcatttcgcaattccagccattccttcatgtgctatgggagttagaataacattctataattgtgccttcaacatcgaagtgataaaattccgaatggaaacgcagcactggagggggcagcaatgcatcgcctaggactcgacgtcggcaccaacagcctggggtggtttctctatgaactggatggagatcgtcaaccggtccgtgccttggacggaggtgtcctgatcttcccggatggacgcaacccaaaagacggaacttccaacgccagtcaccgccgcgaaaagcgcgggcccagacgtaaccgcgaccgaggcctgcggcggcgacggcggctgtttgcgctgcttttcgaactgggcttgatgccaggggacgaagcaaggcgcaacgccttgtttcggcaggacccgtacgaactgcgggccgccgctctggaccgtccactgtcggccggcgagttggcccgggccctgtggtccttccacaaccgtcgcggcttcaagagcaatcgaaaggccggcaatgccaaggaagacggtgcactgaagaccgccatctcggaattgcgccgacgcatcgaacagtcaggaagccggacgctgggcgaataccttcaccgccgacagcgcaataagggcaaaccaatccgggcccgcgccggcaatggcctctatccggaacgcgccatgctggaagtcgagttcctggcaattaaagaggcccaggccccccatcatccgaatcttacacccgaggattggggggcgatcttcgacacgctgagccatcaacgccccctgaggcccgtagagcggggttggtgcacccttgttccgggtgagaagcgtgcctttaaggccaatccactttttcagcgatatcgaatactggcggatctcaacaacctgaaaacaagcccccacggtgagccctaccgctcattaaacagacaggaatgggataaactgttcctcaaactgctatccgtcaaacaggttgatttccgcaagataccggcactattcgatctgccggagcgtacccgcatcaacctggagaccgaatcccgcagcaagctcgacggggacctcaccgcgaccgtcctttctcacaaggaccgtttcggcaaagagtggcggaccttctcgccggatcgccagcgcgaagtggtggagaaactgatcgacgaagaggacgaagacgccctcctggactggctgatgcgcgaattcgacctaccacgccatcgctccgaagccatcgcgtcttccccccttcccgccggaacctgcgcctttagccgcaccgcactgtccagactggtgccaatattggaggaccagggcccgcgctatgacaaagcggtggtcgaagccggcttcgaccaccattccgacttccgcctcgatggcaatgcagaaaaactaccctattacggcgaagttcttatccgccacgttcttggcgccgatcccggcaacgggcgtaacgaggtcgaacgcttcgggcggatatccaatcctaccgtgcacatagcgctgggccaattgcgccgcctatttaacggcatcacgacaacctggggcaaacccgacgaagtggtagtcgaactggcgcgtgaacttaaacaatccagcgaagccaaggcggaaatacgcaaacggaacgcggccaacgagaaacgcaatcgtgacctggaagcccaaattgatgcacacggcgggattgcgaccccggcttcgatgcgcaagatgcgcctttgggccgaacagggaaaagaaggcgagcgcgtctgccccttcacgggcaccacgctttcggttgatctggtcctgtcggacaagaccgaaatcgaacatattctgcccttctcccgcagtttggacgactccatggccaacaaggtcgttgccatgcgcgaagccaacagggaaaagggaaaccgcaccccctgggaggcctggggcgtcgtcgatcccgagcgctacgacaccatcctcgctcgtgcggcccgtctccccaagaacaagcaatggcgcttcttcccggatgccatagagcggttggaggaaggcaacgacttcatcggccgccagttgaacgaaacgcgctacctttcacgtttggtcagggaatacttgtcggccgccgtccagcccaaccgtatttcggtgacccccggacggctgaccgcgatgttgcgcggcaagtggggatttaacggcatccttggcgacgagaaccgcaagacccgaacggatcaccgccaccacatggtcgacgcagcggtgatcggcgccaccacgcggtccgttctgaaccggatggcacgggccgccgaaggcagccgcaaccgtctaatcgacgatatgcccgttcccttcgatgggttccgagcccaagtggcgggccttgtgcacaatgcaacagtgcacttcaagccaaaccatgcccacccagccccgggcacaaccacgggagccctacacaacgacacggcccatggcatcgtatcgggaccggacgaaaaggggtttttccgcctagtaacccgcaagccgctggtgacgataaaggcgccttatctggaaaacctccgtgatccgacgctacgcgaccgcttgaaggagctgtgggacgaagttcgggcggaaacgggcaaggacggggatttggaatggaaacatttcgccgcccgggcggaacgggaactgaaggttcgcagcgtgcggctttacgacacccttcatgaacggagtctcgccctgatccgggacaagaacggccgtccctacaaggcctacaaaaccgacggcaacgccttcatggatgtctggctgaaacccgacggcaagacggtgggggaaactgtcagccggtatctcgcccatcgccccgatttcgtgtccgaggttaagaccaaacatcccaccgcccgcaagctgatgcggcttcacatcaacgacatggtggcgatgggcgagggcagcggccggtccattttccggatcaaagcactgaccgggcagacgatcgtgctggccgcccacaacgaaggcggcaaggccaaggaaatgccgaccttcagtaagtcggccagccgcgtgatccaggaagggctgcgcaaggtcaaggtggaccgcctgggccgtatcagggacgggggtcccttcggggcctgagcttaagccatcatggaacggcgcatcctggacctgaccggcgaaaggcgtaacctgcgaaaagaccggggttcacttgccgtcaccacggaagagggcgagacccgtgtgcctttcgacgacatcgaggcggtcatcgtcaacgcccgtcaggccacctacaccaacgaagcggtcctggaactgtcccgccgggggatacctctggtcgcctgcgacaaaagccaccggcccgttgcgtggctgtggcctgccgagggcaacttcgaacaaacccggcgcatggccgctcagaagaacgcaaaaacagggctggaaaaccgcctctgggcacggctggtcaaggccaagatcgcgggacaggcagcggtactcgaatggcggggcatccgggcgggcgcgctgaaatcgctggcccgcgcggtgcggcccggcgatcccggcaattgcgaggcccgggccgcggcccgttattggcctttggcttttgggcccggcttcacccgggaccgccaaggcggcgggatcaacggattgctgaactacggctatatcgtcgtgcggtcctgctgcgcacgtaacgtgatggcggcggggctgcatccttcaatcggcctatttcacaagaaccggttcaacgccttctgcctaatcgacgatttgatggaacccttccgccccctggtggaccgggtggtgctggaactggtggaccggggattaaactcggtcgagccggaaagcaaggaggcgctggtggggctcctggcccgcgaggtcgaaagcgaacaggggttccagcctttgtccagggccatggaaacggcgtcgcgatccctcgcgcaagccttcgtcgaagacaagttggcgctcgttctccccaagacagacacgtttttccgatgaatggcttcagcgggtaccgtttcatgtggctgatggtgatgttcgatctgccggtaggcacgaagaaacaaagcaagcgggcgacccgctttcgcaacgaccttctggacctgggatttggaatgagccagttctcggtctacatgcggttctgcggtaaccgtgacgcggcagagaccctagtgcgcaaggtcggcaggaaggttcccccggaaggtacggtcagcgtcctcggtttcaccgaccgccaatatgggaacatgaccatctttcacggcggcacacccgacaccgaggaccgggagcgcaagcaactcctcctgctttaacgctccgagacgtccggaaggcggtacgagggaacggatttccctaagaaaaacagggccctatccaggaccctgttttagcacatgaaggaatggccggtaaccaaaactcaaattcctctaggttctcataaaccgctgttttagcacatgaaggaatggccggtaaccaaaacaaagaccatgggataaaccacaaggccctggttttagcacatgaaggaatggccggtaaccaaaactagacctcatgg

SEQ ID NO: 3345 - DNA, 23798 bp, synthetic construct
  misc_feature 1..23798: note = Synthetic
  source 1..23798: mol_type = other DNA
cgcgacctcgccgacctgcagtcgcgcatccagcaggatccggacaacagcgccgctctcgaagagacgcggctgagactcgaagttctgcgtgcgcaagccgcgctggccctgcaccggctgtcgcagcaggccaccgagactctggaacaggcgcagcgggaggcagcggaggctctggcgaagctcgacgcctggctgcgcgagcagcgccgcgaacggcagccctccccgcccacgccgggggaaaccctcgacatctgacggcgcgaccggcaggggcgccgtcagtgggcggcggcccagctctcgccgacgccgacatccgccaccagcgggacggacaactcgaccacgggggcgcaggcgccctccatgacctgcttcacgattcggccggaagcctcgatttcgccgtccggcacctcgaacagcagttcgtcgtggacctgcagcagcagtttcgcggagaggccggcttccttcagtgccgggccgacccggaccatcgcgcgcttgatgatgtccgccgcggtcccctggatgggggcgtttatcgctgcacgctcgccgaaggcccgccgcgccgggttcttctccagcagagcaggcacgtgcaccttgcggccgaacagcgtggtgacgtgcccctgctcccggccccgctttcgcatgcggtccatgtagtcccgaatgcccggaaagcgcgcgaaataggcctcgatgaaggcccgggcctccgcctggggtatgccgagattattggccaggccgaaagcggagatgccgtagatgatgccgaagttgatcgccttggcgcgccgccgggtctcggggtccatcttgtcgagcggcacgccgaacacttccgaggcggtcatggcgtggatgtccaggccgtcggcgaaggcctgccgcagggcaggcacctcggcgatatgggcggtcaggcgcaactcgatctggctgtagtcgaccgacagcagcttgtggccgggctccgccacgaaggcggcgcggatcttgcggccttcctcggtgcgcaccgggatgttctgcaggttcggatcggtcgacgagaggcggcccgtggatgcgaccgcctgaccgtagcaggtgtggacgcggccggtggcggggtcgatctgctgctgcagggcgtcggtgtaggtcgacttcagcttggcgagctggcgccagtccaacaccttgcgcggcagctcgtggccctgcgcggcgaggctctccaggatgtcggcaccggtcgacagggtccccgacttgcccttccggccgccgccgtcgaggctcatctcggtgaagaggatctcgccgagttgcttggggctgccgatggtgaaggggcggccggccagcctgtagatctcctgctccagcgcctccaggcggccggcgaagtcgttggacaaccgccgcagcacctcccggtcgacccggatcccatgcgcctccatttcggccaggacgggaaccagcggccgctccagggtctcgtagaccgtggtcacccgttccagcggcagccgcggcttgaggaaccgccacaggcggaaggtgacgtcggcatcctccgcggcgtaggcgagggccttgtccaggggcacccggtcgaaggtgacccgcgctttgccggtgcccgtcactgcgtcgtagctgatcggcttgtgtcccaggtgccgctccgacagctcgtccatgccgtggccgtgcttgcccccgtccagggcataggacagcagcatggtgtcgtcgtagggggcgacggtcaggccgtagcgccccagcacccgcatgtcgtacttcaggttctggccgatcttcagcaccgcctcgtcggccagcagcggcttcagcagcgccagcgcccgggccagcggcacctgcttcggcgccgccgcgccctcgaagtcgaggccgtcgccggcctccggcgccttgtgcccgaggggaacgtagcagccctcgccctcggcgtaggagaggctgaagcccaccagttcggcctgctgcgggtccagcgaagtggtctcggtgtcgaccgccacccggcctgcggcgcgcgcggcctcgatgcaggccgccaactccacctcgtcctggaccagccggtagccacccgccgctgccggtgcggcaggcggctccgcggccggcggaggtgcgctcgcggtggctgccgccgcctcacccagcagttccggcaaccggccgagcaggctgcggaactccatgcgttcgaggaactcccgcagggtgtccggctcgggcaggtgcttgacgaaggcgtccaggctctcggcgaggggcacgtcctggctcagcgtcaccagcttgcgtgacaggcgcgcctgctcggcgaactcctgcagacgctcgcgccgcttgggctgcttgatctcgccggcgcggtccagcagcgtctccaggtcgccgaaggtgcggatcagctcggccgcggtctttacgccgatgccgggcacgccgggcacgttgtcgacggaatccccggccagcgcctgcacgtcggcgaccagggccggcggcaccccgaacttctcctccacctcggccgggccgatcggcttctgcttgatgggatcgagcagctcgactccgtttcgcacgagctgcatcaggtccttgtcggaggagacgatggtcacctccacgcccgcctcccgcgcccggcgggcaagagtggcgatgacgtcgtcggcctcccacccgtccagctcgatggtcggcaggccgaaggcccgcgcggcctcgcggatcagcgcgaactgcggcaccaggtcctccggcggctcgggccgctgcgccttgtagccgtcgaagaggtcgttgcggaaggtgtgcgccccggcgtcgaagaccaccgccaggccctcgacctcccgctcgcgcaacagcttcagcagcatgttggtgaagccgtagacggcgccggtgggcacgccgctctttgtggtgatcggcggcagggcgaagtaggcccggaagatgtatccggagccgtcgacgaggtagaggtggcggaagggggcgtctgtcatggcagcggcgacagtgccgcagcggccgcagcccgtccagcctgcgggcggcctcagcccgccgccgcgtactccggcagttcgtcgttcttgcgggccttgaccagcttgcgcagcaccatgttccgcttcagcgcgctgatgtggtcgaggaagaggacgccgtcgagatggtcgatctcgtgctgcaggcaggtcgccagcagaccctcggcctccagcgtgcggatctccccctcgcgatcgaggtggcgcaccgtcaccgcccgcgggcgggcgacctcggcatagtgctccggcaccgacaggcagccctcttcgtagagcgcgtcttcgtccgagaccttgatgatctcgggattgacgatgaacagcggcgtcttcggctcgtcacccttcgacaggtcgatgaccagcgcccgcttgagcaccccgacctgcggcgcggccaggccgatgcccggcgcggcgtacatggtctccagcatgtcgtcgagcagccggcgcaggtcgtcgtcgacacggtcgacaggccgcgccttctgcttcaggcgtgggtcgggggcggtgagaatcggcaggcgggccatcgggtccagcggtcttcgcaactcaataacaatccagaccgtcagctaagcacggccgggggcgcggtcaagccgcgcccccgccatccagggatggtcggctgcggctttcgctggtcgaaggaaagcgagaacctccggccccaccagcccggcgcccccgcaaacaatcctcattgacaggaaattccgatgaaagcctcttgcgggacggcgaggccgcccggcagcggaaccgcccgacagggagatgacgaatgagcgagatccgcaaaggcggcctgggtccctacagcctggaagggcgggtggcggtgatcgtcggaggcagcagcggcatcggcgccgccaccgcccgacgctttgccgaggcgggcgcccatgtcgtcgtcggctacaacagcagccgccgcgaagcggaagagctggcggcaggcctcccgggcgaagatcacctggcgctgcacatccccctgaccgacacccccggcatagaggcagcggccgcggccgtgaaggcgcgcttcggcaaggtcgacgtgctggtcaactccggcgccacgaccaagggcataccgcacgccgacctgcaggcgctcgatgacgagaccttcgaccggatcctcgtcaccaacgtccgcggtcctttcgccaccgtccgcgctttcgaggcactgctccgcagcagcggcgacgcagtggtgctcaacatctcctccctctcggcggtcgacgggctgggcagcagcatcgcctactgcgcctccaaggcggccctggacaccatggccatgtccctcgcgcgcgtcctggctcccaccgtccgggtcatcggcatttcaccggccgcggtgaagaccgacttcgttcccgggcgccggcccgaagatgtcgagaaggcgatcggcgcctcccagctcaagatcatgaccgagccggacgacattgccgtggccgccgtctcggctgtcaccggcctgcggctgatgacgggcagcaccgtgctggtggacggcggccgtcacctctgagcccgctccggcggcagaggccggggtacccttcgcgacgaatttcgggcttccgacaaacccactccgacgaggacgcgatgcagggcgagcgacaggacggcaccgtggtgctgatcacgaccggcggcaccatcggctcgggctacgacccggccgccggcgacgtgcgggtgaccacggcgggcagcaccctgctggacgccgtgcgggcgcgcctgccggaggcgcggctggaggtcgtcgacctcatggcgatcggcagcttcgccctcgacctcgacacggccttccgcctcgtctgcgagatccggcaggtcctggagcgggacgaggtctgcggcgtggtggtgacccacggcaccgacaccatggaggagaccgcctacctcgccgacctgacgatcgcctccgacaagccggtggtgctgaccggcgcccagcggcagcacgacgaccctgacggcgacgggccgcgcaatctggcgggggccgtgcaggtggcgatgagcgccgaggcgcgcggcctcgggaccatgatcgtcttcgccgacgaggcccacgccgcccgcgacgtcaccaagacccacacctcccggctggagaccttccagtccggcgagctcggcaagctgggcgacctcgacaggggccgcttcatcctgcggcgccgccccgccggccgccgcaccttcgcctgcgcggcgatcgagacgcgggtggacctgatcaagctcgccatgggcagcgacgaccgcttcatcgaggcctcgctgcagagtggcgtgcgcgggctggtcatcgaggccttcggccgcggcaacgtcaccccggctgtcctgggcggggtggagcgggcgatcggccgtggcgtgccggtgctgatcacctcgcgctgccgcgatggccacgtggccccgatctacggcaagagcggcggggccggcctggcggcggccggcgccatcttcgccggcgacctgcgcggggtgaaggcgcggatcctgctctcggtgctgctcggcgcgccgggccccgccgagccgctggcggaggtcgtcgcctccctggtgcggtaagcggggacgcccgcaagaaaatcttcagcctcctgtcgtagctctgtcggcgccggggccgaccgttcgtcctcgggacgacagacaggaggagaggaggttcccatgccctacgtcgacggcttcgtgatccccgtgccgaaggccaggctcgcggactacgaggcactggcccgcaaggccggcgccatctggaaggagtacggcgcgctggccgtcgtcgagtgcgtcggcgacgacgtgccctacggcgagctcacctccttcccgcggtcggtgcaggtcagggaggacgaggtcgtgatcttcgcctggatcctgcacgcctctcgggaggcgcgcgacgcgacgaacgccaaggtcatggccgacccgcgcctgcagcaggacatgaaggacgtgcccttcgacggcaagcgcatgatcttcggcggcttccgcaccctggtggagctgtgagcgccatgggcgcagtcgacagcgacgacccgcgcgacctggtgcacacccgcctgatggacgcgccgcgcgccgccatctggcgcgcctggaccgagccggccctgctggagcagtggttcgcgccgaagccctggacggtgcattccgccgagctcgacgtgcgggccggcggcggcaaccgcttcgtcatgcgctcgccggagggccaggacatgcccatgtccggcgtctatctggaggtggtgccgggcgagcggatcgtcatgaccgacgcctacaccaccggatggatcccctcggagaagcccttcatgacggcgaccgtcaccctggcggacgagggcgggaagacccgctacaccgcgcgtgcccgccactggacggcggaggaccgggagacccacctgaagatgggcttccacgagggctgggggcagtgcgccgaccagctcgaagccctcgccaggaccctgtgaggccgccggcggcgaggcgccctgccgcggctggctgaggggccgcttcgaaggtcccggcagatcctgccggcctccgcccgctcaggggctgatcagcgacaccatgaaggcgagcgacgccgcgaggcaggcgatcgtgcggacgtggttccaggcggtccaggggccgtagtaggcgcgccaggccgccgccgggtcgggctcgtcgccgcggaccgcggcgagccgctggttcagcggcacgttgcgcgccaccgtgacgccgatcccgcccagcaggtacagcagcgtcccgatcagcgctgcaagggcgcagggggcggtcggcgcgttcaggctgaacaggccgagggtgagcgccgtcacgccggtgccgaagaagaccaggaagaagagcgggttcagcacggtcacgttgatcgcctgcatggcggcgacagcctcggccggcgggcgccggtccagcgcccgcatcacgaagctggagaaggcgaagaagagcccgcccagcaggcccgatcccagggcggtggccagcagcaggccggtggtcacatgcgagagcatcgttcggtcgcggcgggacggcttaccaggtcacccgcaccttgtaggtcagctcggcctcgcccttcgccggcacctgcagggtccagaccggctggctggcgctctcgctggtgtggccctggctctccgacagcagctgccagccgcccggcatccgccccaccacctcgaccgccaccggctcggacttggcgttcttcacggtgatgcggcgcgccgtctcgtagctgcgctccgacaggcggtcgtaggccgtctgcttcatgctggcggtgacgtcgaaggcgctgcccagggccagcttcacctcgccccccaccggggtgtggccgatcgagccggccccggcgaagatcgtgtccgcgcccgccaccggctcgtagacccgcaccgtgccggcgggcagcggccgggcgccatcgccctcgttcctcgcctcgacgacgatgtcggccgagaccggcccgagttcgcccggcccgtcggcgatcgccagtccctcgatccggtagtgccgctcggccggcagggtgcgctcgggcagcagggtgatctgcttgcgctcgccggcggccagatcgaccggccggtcgtaggtgtagaggtagcggtcggaggccgcctgctgcaccggggcggactcggcgtcggccgcggccgcccgggcgaacatcggcatcggcggcggcgggggcggcgcccccttggcctgcgccacgtcgccggccagcaggcgcaggtgggcgtgctcgaaggccccgtcggtctggttctgcagggtgacgaagccggtcagcgccagcctgtcgccgtcctcggacagggagcccacatagtcggcgttccagctcagcccgctggtcaggtaggcgagcgtcaggtcggcggtggaggccgacggcgcctccaggaccacgaccagggccggctcggcgcgcaggtcggccggcaggctcttcagcgcgatgcggcccggcgggtagagctcgatccggtcgccgatccgcaccaccgggccgccgagcatggagagcagcgtcgcctcctcgaagctgtcctcaccggtctgcgggtcggtgcgggccaccagcaccgtctcgcccaccgcccggcgcagcagcgcatcgggggtgaggtcggccggcaggtagcgctgctcgcgcaggcgcaggcccgcggcgccggtcagcatcagggtctcgggctggatctggtcgctgacgccgagcaccaccagccggttctcgccctgctgcagcgcgacggagcggcggtcgtgcaccaggccgacgcccgactggtagaccgtcaggcccaggctctcgcggctgtcggcggacagggtctcctcggcggcgcacgcggttgcggccgccgtcgcggcggtcgtcgccagcagggcggtgatcagcagtcggcgcatggtggcgtccccttctccggccgttgggtggggcgcaccttaccgtaagtgcgccaatgaggcagtgaccctcttgtggcggcgccggcttgatcggggtcaatgccgggtcgcgccgatcggggcagcctcccctccgaccccaggttcagcaagggaaggtgctatggcgaagaccatgaaggctgcggtggtgcacgctttcggccagccgctgacgatcgagcaggtgccggtgccggagccgggccccggcgaggtgctggtgcgggtgctggccagcggcgtctgccacaccgacctgcacgccgccgacggcgactggccggtgaagccgaagctgcccttcatccccggtcacgagggggtgggcgtcattgccgcccttggggccggggtgaaaggcctgaaggagggcgatccggtcggcgtgccctggctgcacgacgcctgcggccactgcgagcactgcgtcggcggctgggagaccctgtgcgagagccagcacaacacgggctacggcgtcgacggcggctatgccgagtacgtgctcgccccggccgcctatgtcgggcgcctgcccgaccaccccgacttcgtcggcctggcgccgatcctctgcgccggggtgaccacctacaagggcctgaaggaaaccgacaccaagccgggcgactgggtcgccatctcgggcgtcggcggcctcggccacgtggcggtgcagtacgccaaggccatgggccggcacgtggtcgccctcgacgtgggcgcggacaagctggccctggcgcgggagctgggggccgacctcgcggtggacgcccgcgaggaaggggcggtcgcctcggtgctgaaggagaccggcggcggcgcccacggggtgctggtgacggcggtctcgcccggcgccttcgcgcaggcgctgcagctcgcccggcgcggcggcacggtcagcctctgcggcctgccgccgggcgacttcccgctgccgatcttcgacgtggtgctcaagcgcatcaccgtgcgcggctccatcgtcggcacccgcaacgacttggccgaggccatcgccttcgccgccgagggcaaggtgaagaccacggtcgccacggaaccgctggagaacatcaacgacatcttcgcccgcctcaagcacggccaggtcaccggccgcatcgtgctgacgatctgaagggccaacgagaaaacggcggaccagacggtccgccgttttcttgctctttgccgcagcgccaagcaggtcatctcacgggaaaacccttatcgggttgggtcccgcagcttccaagtcgatacagaggacacgttatagacgcggagttggttgtcaacaccctcgaactgcggttgcatcaaaggcgagatatccgcagacggagagaccgaggatgccgacgcctttcgcccggatcccgggccgctacgatgacacggcccgccgacaggagatcgacaacgccatcggccggaggcggcgttcgaccagggtcgcgaacctgggtgtcttcaccggctatcggatcggtctggatctcggtaacggcaatatcggctggtgcatcctcttcgaacgcgagcgcacccccttcttcatgacggcggaaaccctcgcggctcacaatgccagcctgccgcccggtgccacgcgcacgcagctgcccgaccctcacctctttgttccgctgggaacgcacaagttcgaggcgcgcaacagcgacggcaaggccctctcgaaggtgcgggccgaagcgcgtgccaaacggcgcacgctggatgccagacagaggcgtcgctggaccctgaagcaggttcttcaaaggcacggcctctatccgacggcagcggaagcgacccgcggcctcaccatccctgggcggcaggggccggtgcccgtcaaggctgacgtgctgagggtcaggctcctgcagccgggtacggcgagccatccacacgacctgggccgggcgctctacaacgtcctgaaacgacggggctggatgcaggttcttggccggacgggcgctcaggagaccagcgctttcggccggaaagcaacggcggcctacaaggctgcgctcgacaagttcggctgccgtaccgtcggggaatttctgaaccggtgccagcacgacgccctgatcgccgaccatcgtcgtatccgcaaacggcacaagacgctcgcctggcaagagacccacaaggtcaaacagcggaaaccggaggatctgcagcacagtttccaggtgatggagacgctctctcccacattcgagctgatgtgggaggaggcctgtgcgctgagggtagcgcagaaggatgccgtcccgatctcggacgaggcctggcaggaaatccgtgaggcggcggacttccgccgtcccctgcggccgaaggaaccggggctttgcgagttcctcccgcaaaagcgacgctgcgtccgcgccctgccgagtttccagcagttccgcatcctgcagcaggtcgacaacctccggcaggacgggcgggaactgcccgagcatgttttcgagcagattgtcgatcacctgtgcacgcgggaccgatccacagtccaggcggtcgggcgcgagctcggcctccgccgcctggggctcgccgagaaagaccagtcccgtgcgctcgccggcgccaagacggacgtaggcctcgcagaggtgcttgggcctggctggatggagatcgaggacatcgaacagcgtgaccgctggacgatgcgcttcctccgtcggcaccccatgcccgtggttgacagcccgccacgcgcttggagtcccgacgacgaagagcgcctgaagcgcgacgccgagcgcgccttcggtccaggcgccctggagcgcgtggatgaacgggcgagccagctcttcgatgacaagttcgcaaacatttcgacgctggctgcgcggctgctctcgaaggggatccgccaacgcctgccccatgaggagcggctggcaattctgcagcgcgaaggggggatggaatcgccgcacatcgatctctacgagcggctgccctactacgcccgggtcatgccggacctcgcggtcccggccgccaacttcgcccctctcgaacggacggcggaggaggagcgggagtgcggccgggcagcgaaccccgacctccacgtggtgctcaaccgggtgcgcaaggtcgtgaatgcgatcatcgacatgatgggcggaatcctgcccacccaggtcatcgtcgaggtcgccagggaggcgctgtctgaggaagcggcggagaagcacggcaaggtggttcgagatcggacggcgctccgggaggccgttgtcgccgatatagcgcgggtgctcgacgggcagcggatgcccgtgggcccgagcctggaccgcatcgtcgaccgctggctcgccgccatacggcagggctggcgcgactacgacggcagcgagatcgcgaagagccacctcgtcgacgggacgatctatcagctggaccacgtggtgccggccgccttcgggcagttccagaaggacaatctcttcgtctcgaagacggccctgaatcggcgaaagggcagacggctgccctgggaggccttcccggaactgcgtccggaactgatgaccttcgctctcttcggcaagcgccgtcagctggaaggtctgaaggccgccgagacaaggttgagaagggggtcagtttccaggcgggagttggaccgcatcggagcgcggatcacatccctccaacaggagctcgaggccctctgcgcagcgaaccccgccgccgacgatccccggatccttggtagcctggaaaggacgcgatccacccgactggagagcctgctcgacccggccggcactcctgacgacgccagggggagcggacgtgggcctgtgcggccgggcgaacaagccgcactcttcgccaggctcggtccggacgcggcggttcccgaagagcagcatcaggcccgagacgtggccaacatcggctggtctaccaaggtcaccacgcgctacctgggttgcctcggcccgcgcaccttgacggtcaagccgtgggccgtccacgcgctacggtgcatgttcgacatcaacaaggagcgtaaggacctccgcaaccatgccgtcgacgccttcctgatcgcgcacttcgacgagcatgtgatgcgccccgcctttgcccgcctgcggggcaccagatacgaagacctgtacaccgccaagcctctggaagacgcgctgggcgaggtgtcggacgggccggcggtcttcgacgccttccgggagaacctgcgccgtctcgacgacatcctgccgacaatcgcgaccgcccaccgccccgacaacaagtggaacccgggcgatcgaccgggcggcagcttcggggcgttggggggcgagaacatctacgccttccgccccgacaaggatgccttggcgagactgtcaaagatcgtcaacaacgccaggggaatcgaaaacgggccgacctacacgaaagctcagctgcgagcgctgctggaagcggctgtcgatcagatcaatgatccggccgagcggcaggcctgtctcgctcttcgaaaggcaacgactctcagctacagagggagaaagaaacctgtttcctttgagatatttgtgaaaaataaatcaaacccgggatcatttttaaacataagtggtaaatttggagttacatcaagaaaaaatgtatctgaactggagataatatcaattcatgatttttctaaatctgatatatcgaaaagaaattcttatttttctcctgaattaattttctatagaaatagcgattgcatagtttacaacggctttttatgcacaatttcagctttttccgagaataaccagatcacaatatttcctgttgatgatattcaggtcaaaagcaaccgcattcagcccactgtgaagaaattcccctctaaattactggagaaatttccaagcgatgtcctcggtcgacgacttcataggcgccgaaagaatcctggggatctccagccggtgccatatccgcttctccgacgagaggatcgtggttgagcggcgagcggaccccacaaaggtcgaactcccggtcgccaacgtgctggccatggtgatcgagagcgaggagtcgacggtgacgaccgcggcgctcgccgcctgcggacggctcggggtgcccgtcgtcctctgtcacaggcacctgccggtgtctttggctctgccgatcgacgccagttggaacggcggcgaggtcaggaggcttcaggcacgggccctgcgcggagaagcggcgggacgtcgcctctggcgccggacaatccgcgccaagatcttcgcccaggcgtcggtcctggagtcgatgggagcgaaatcggcgagccggttgaagcgtctcgccggcagcgtcgggctcgatggcggggaaacggtggaagcccaggccgccgccatctactggcgcgtactcttcgaccagttccagcgccgtgacggcgaggacccccgcaacggactgctcaactggggctacgccgtgctgctcgctgccgtgggccgggccctcgtcagtctcgggctcgaccctgctctgggtttcgggcacgctgggcgcaccaacgcctgggcgctggcatgcgacctgatggagcccttccggccgagcgtggacaggatcctcgccgtcgcgcccgccgatgacctttttgcccaacccgcactcgtcaagggtgacatcgttcggctcttcgccaacgatggccctgcgaagcgcgccattctggaggcggtacgaggatacagggaatttctggatgacggaaacgagacgcacgtccgctatccggaccgcccgctcgcggcctgacgaatcgggacgtcctcgcttcatgtggctgctcgtgctctacgaccttccgaccgcggaccctgcggaccgcaagatctacagccggttccacaagtcgatccggaagcgcgggttcgaaatgctgcagttctccgtctatcggaagttcgtcggcaccgccgaccgtgcagaacgggaactgattcggctcgtcgaaatctgccccggccggggagcggtttcggtccttcagatcaccgagaagcagatgggcaggatgaccaccatgtgggacggacggaaacaaaaggagaaaccacgtccggaccagctggtgctgctgtgacctgctcccgtcactccaccagccgagaagagaaaaaagctcaagccagccaaggggttgtggctggcttgaagcctatcgacttggaagctgcagggtcaaccagacgtggcggtgccgccaacgacggcgacaacggaagcctatcgacttggaagctgcagggtcaaccagacaacgaggtggcggccggcaccctgggccaggagcctatcgacttggaagctgcagggtcaaccagacaggacttggcagcggctgccgctgcacgatgagcctatcgacttggaagctgcagggtcaaccagaccaggatgacgacgcactcccccgcgacatggagcctatcgacttggaagctgcagggtcaaccagactggttcccgctgggggcgcccgacctggtcgagcctatcgacttggaagctgcagggtcaaccagaccgcgaggaggccgcagcggccgagcgagcggagcctatcgacttggaagctgcagggtcaaccagacgggcgtctggtactcgctgcgcggcggtgtgagcctatcgacttggaagctgcagggtcaaccagacgcgcttgaagcccggcagcttcttgagcgggagcctatcgacttggaagctgcagggtcaaccagacaggacttggcagcggctgccgctgcacgatgagcctatcgacttggaagctgcagggtcaaccagaccacacgcgcgggccgggcggcattcacccggagcctatcgacttggaagctgcagggtcaaccagacgttgcctatggccgcggatatgccggccaggagcctatcgacttggaagctgcagggtcaaccagactgggggacgcagtatctggcgaacgaggtggagcctatcgacttggaagctgcagggtcaaccagaccccgtcgtgctgaacgtggccaagcagcgtgagcctatcgacttggaagctgcagggtcaaccagacggcccagccgtggagacggctcgctatccggagcctatcgacttggaagctgcagggtcaaccagacgcagcgagttcagggtcaccgactggctctgagcctatcgacttggaagctgcagggtcaaccagacacgcacctcaaggtggtgcagggaaaccctggagcctatcgacttggaagctgcagggtcaaccagacggcatcgatggcaaggacggcgccgatggcgagcctatcgacttggaagctgcagggtcaaccagaccgctccgtgtcggccgccgaatatgaggctgagcctatcgacttggaagctgcagggtcaaccagacctggccagggcgaaggaggttgcggccatcgagcctatcgacttggaagctgcagggtcaaccagacggcagcccgatcaacgtccccgttggcgcggagcctatcgacttggaagctgcagggtcaaccagacgcctgccgccgtctcgccgaggccggcgccgagcctatcgacttggaagctgcagggtcaaccagacgaaccgctgatgctgcagtcactgcagatagagcctatcgacttggaagctgcagggtcaactagaccggtgttgccacaggttcggggggacgcacaccctgacgagaccgcccgcggtggtgcgtctttctgcttgcgacggcgcacgggctggcgaatactgaattccgaattcaggagccggccgtgcaacccctccctctccgccccgccctcgtggaccaggtccaccagcgcctcgccgacgccatcgccgccggcgagctggcgccgggcacgccgctcaagcaggaggagctcgctgagcgcctgggagtctcgcgccagccggtcagccacgcgctcgccctgctgaagcaggaggggctgctggtcgagtacggccggcgcgggctgcaggtggtgccgctcgaaccggggcggctcaaggcgatctatcaggtgcgcgcggcgctcgaccgtctggcagccgggctggccgcggaccgggcgcccttcgccgccaatcacctcgcggatgcgggccgcgcgctggaagccggccggcgggcggtcgccgccgtcgacgcgaccgcgctggtcgcagccgacgtggccttccatcaggcggtcatcgcgctggcgggcaatccggtgctggaagagaccgccgcccggcagtggccgcacgtccgccgggcgatggcggccgtgctgtcggacgccggctcgcgcagccgggtgtgggacgagcacgccgcgatcctcgacgccatcgccgccggccgcgccgacgacgcccgcgagcgggccgaagcccatgccctgcgcgcggcggccgagacggtggaccgtctggagcaggacacgcaggtggcctgacgccgccaagagagcaaggaaaccaggaggaaccgatgaagctgtcagccgcacagatcgaggaattcgaccgcgaaggctacctcttcctgccggggcgcttctccgcggaggagatcggcgttctcaacggggaactgccgagcatctacgcccagcggcgcgacgaggtctggcgcgagaaggacggcgagacggtccggacggctttcgccgcgcatacctacaacgaggccttccggcggctgggtgcccacccccgcctgatcgagccggtggagcagctgctcgacggccgggtctacatgcaccagttcaagatcaacgcgaaggcggccttcgacggcgccgtctggcagtggcaccaggactacggcacctgggccaacgacgatctgatgcccgagccgcgggccatgaacatcgccgtcttcctggacgacgtcaccgagttcaacggcccgctgatgttcatcccgcgcagccacaaggcgggccgcctggaagcgggccacgacctggagacgacctcctatccgctgtggacgctggaccgggcgacggtcacccggctggcgcaggaaggcggcatggtcgccccgcgcgggccggccggctcggtgctgctgttccactgcaatctggtgcacgccagccccagcaacatcagcccctgggatcgcaccatcgtctacctgtcgctctgcgagacctccaaccacatccgccagttcaagcggaaggaatggatcgcgcatcgcgacttcacgccgatcgaggcgctggccgacgattgcctgatggaactcgcccgcggccaggccgccgcggcagagtgagggggcgcggacgatgaatctcttcgccctgctgcagaagcgccgcgaggccggccggcctgtccgggtcgcccagatcggcgccggcaagttcggctccatgttcctggcccaggtcccgaccatccccggcctggagatggcgggcatcgccgacctctcgcccgaccgggcgcgcgcggcctgccgcgccgtcggctgggacgaaggccgcatcgaggccacgaccttcaccgacgacgccggtgcgctgatcgcgcgcgacgacgtagaggtggtggtcgaagcgaccggcaacccggccgccggcctgcgccatgcccgcggggccatcgccgccggcaagcacatcgtgatggtgaacgtcgaggcggacgtgctggccggccccctgctggcccgcgaggccgaggcggccggggtggtctactccctggcctacggcgaccagccggcgctgatctgcgaaatggtggactgggcccgctccatcggcatgaccgtggtcgccgccggcaagggcaccaagtacctgccgtcctaccacgcctccacgccggagaccgtctggggctactacggcctgacgccggagcaggcgaaggcgggcggcatgaacccgcagatgttcaactccttcctcgacggcaccaagtcgggcatcgagatggcggcggtcgccaacgccaccgggctgacgccgccggccggcggcctcgccttcccgccttgcggcgtcgacgacctgcccctcgtgctgcggccgaagagcgagggcggcagcctggagaccagcggccaggtcgaggtgatctccagcctcgagcgggacggacggccggtcttccgcgacctgcgctggggcgtctacgtggtcttcgaggcgccgggcccctacacggcccgctgcttccgcgagtacggcctggtcaccgacccgtccggcacccgctcggccctctacaagccctaccacctgatcggcctggaactgagcgtgtccgtcctctccgccgccctgcgcggcgaggcgacgggcgcacccaccgggttccggggggacgtggtggccaccgccaagcgggacctcgccgcgggcgagatgctggacggcgaaggcggcgcctgcgtctggggccggctgatgccggccgaggcctcgctcgccgcgggcggcctgcccatcgggctggcccacggcgttcccctcacccggccggtcaaggcggggcagccgctcacctgggccgacgtccggatgaacggggaggacgaggcctaccggacccgcaaggcgatggaggcggccttcgcagggcccctccgggctgcggcggagtaggcggatcgacgaacgcggcgggaggctgggaagccagcctcccctactcggccggcgcggcctgctcgatggcctcgggcggtcgcgccgccgcctgccgccgccgatggcctgaggcgcgcgcgccggcctcgggatcgagccgcaggtaggccagcagcgacagggccatcagcgcgccgacgaagagaaaagccacctggaaggcgaccggctgcggcacgcggtcacccacgtagagcgagaagaggtgcaggaaggaggcgcccacggccacgccggcggccatggcgaactgctgcccgacgctggcgaaggcggcagcccggccggcctgctcgttgggaacgtccacgtaggtcagcgtctgggccgaagtgaagtgcagcgagcgtgcgacgccgccgatcagcagcgccagcagcagcagccagccgtagcgatcgggcggcaggaagccgatgaccgccacgcagacgcagccgatactcgacatcgccagcagcgtcgtgcggaaaccgagccgccggagcagtggcggtgcgagcggcttcatcagcatcgccccggccgcccccgacatggtgatcagcccggagagcagcggcgacaggccgtagcccacctgcagcatcagcggcagcaggagcggcatcgctcccatgcccaggcggaaggtgttgctgccgacgatcccggcacggaaggtcggcacggccagcagctcgaggtccagggccggccgctcgatccgccgggcgtgcagcacgaagagcccgagcagacagagccccgccacgaacaggccgagcaccagggagtcgggaatgacgccgcggccgacggtctcgaaggcggacacgcagagcccgagccccagtgccaccatcgcgaagccgagcaggtcgaacggcggctgcgccgagcccggcagcggcggcaccagccgcgccgccaggatgaagccgacgatgccgatcggcacgttgatccagaagatccagggccagtcggcataggtgacgatcagcccgccgagcggcggcccgagcagcggccccatcaggcccggaatggccatgagcgccatggccgcgatcagcttttcgcgcggaatcgagcgcagcacgatggtccgcgccaccggtgtcatcatcgccccgccgaaaccctgcagcacccggctggccaccagttcggtgagtgaaccggaaaggccgcagcagaccgagccgagcaggaagacggcgatcgcccactggaagacccggcgcgggccgaaacggtccgccacccagccgctgagcgggatgaacacggccaggctgagcaggtaggccgtcatggccacgctcagctctgtcggatccacccggaggtcgcgcgcgatcgtcggcagcgcggtggagatgatggtcgcgtcgagcatctccatgccgatggcacaggcgataagcagcggcacgaagcgcgagcggtcgggcatgggaaggataatgggtcctgggaacgaggattcttcttgccttgtgtcccgaacatatgcccttccgagcgggtcagcagaccctttcgcgcagggctgggtcgctgccagcgcgcgtcaggccggtgcggaagagggaagtagcatgacgagggtactcctggtgacgggcggcagccggggcatcggcgccgcggtctgccggttggcggcggctcagggctgggacgtggcggtcaactacgcccgcgacggggcggccgcggaaagggtcgccgaggcggtgcgtgcggccggccggcgcgcggtgacggtgcaggcggacgtcgccgaccccgcggccgtggctcacctgttcgaccgaacgacggccctgctcgggccggtcgacgggctggtgaacagcggcgggatcaccggccgctcggcgaaactggccgacgccgacgtcgccgacatcgagcggacggtccggatcaacaccctgggcacgctgttctgctgccgcgaggcggcgcgccggatgagcaccgaacgcggcggtcgcggcggtgccatcgtcaacctctcctcgggtgccgccaccctgggcagcccgaacgacttcatctggtatgccgcgtccaagggcgccgtcgacaccctgaccatcggcctctccaaggaagtcggcggcgagggcatccgggtcaacgccgtcgcgcccggcctgatcgacaccgagatccacgatgccgccggcatgcccgggcgggtcgagagcctcgccccgcagatcccgatgggccgggcgggcagtgccgaggaagtcgcgcatccgatcctctggctgctgtcggacgaggcctcctacgtcaccggcgccataatgcgggtcggcggcgggcgctgaccgccgccggcagcggcagcccgttcagcggttcatccggttctcgatcagttcgtctaccacgccgggatcggcgagagtcgaggtatcgccgaggctgccgaactcgttctcggcgatcttgcgcaggatccggcgcatgatcttgcccgagcgggtcttcggcaggctgggcgcccactggatcaggtcgggcgaggcgatcggcccgatctcctggcgcacccaggccaccagttccttgcgcagcgcctcgctgggttcgttgccggcggtcagggtcacgtaggcgtagatcccctgccccttgaggtcgtgcgggtagcccaccacggccgcctcggcgaccttggcatgggcgaccagcgccgactccacttcggcggtgcccatgcggtggccggagacgttgatcacgtcgtcgacccggccggtgatccagtagtagccgtcttcgtcgcgccggcagccgtccccggtgaagtagcggcccggataggtcgagaagtaggtctgtacgaagcgctcgtggtcgccgtagaccgtgcgcatctgccccggccaggagtcgagcaggcagaggttgccctcgcaggcgccctccagcggcttgccgtcggcatcgacgatacccggcctgattccgaagaagggcttggtggccgagcccggcttcagggccgtggcgcccggcagcggcgagatgagaatgccgccagtctcggtctgccaccaggtgtcgacgatcgggcagcggccgtcgcccaccacgtcgtgataccacagccaggcttccggattgatcggctcgcccaccgagcccagcagcctgagggacgcgcggctggtcttcttcaccggctccgcaccctcgcgcatcaacgcccggatggcggtgggggccgtgtagaaggtgttgaccttgtgcttgtcgaccacctgccagaagcgcgagccatcgggatggttcggaacgccttcgaacatcagggtggtggcgccgtttgcgagcggcccgtagacgatgtagctgtgacccgtcacccagccgacatcggcggtgcaccagtagacgtcaccatcgtggtagtcgaagacgtactggtgggtcatggaggtgtagacgagatagccgccggtggtgtgcagaacccccttcggcttgccagttgaccccgaggtgtagaggatgaagagcggatcctcggcgttcatctcggccggcgggcagtcggccgagaccttctcggcggcttcgtgccaccagatgtcgcggccatccttccaggccaccttgccgccggtgcggcggacgaccaggaccgtcgcgacgtcggggcacttctccaacgccttgtcggtgttggccttgagcgccaccttgcggccgccgcgcaggccctcgtcggcggtgatcacaaagcgggagtcgcagtccaggatacggccggccagcgagtccggcgagaagccgccgaacaccaccgaatggaccgccccgatgcgggcgcaggccagcatggcgtaggccgcctccgggatcatcggcatgtagatcgtgacccggtcgcccttcttgacgccctggtccagcagcacgttcgccatccggcagaccgcctcgtgcagctcgccgtaggtgatgtgcttgtgctcggcggggtcgtcgccttcccagatgatggcggtctggtctcggcgcttctccagatgccggtcgacgcagttgtaggcggcgttggtggtgccgtcgtggtaccagcggatgtggacgtcacccgggccgtagttcacgtccttgatcttgctgtagggcttgaaccagtcgatccgcttgccatgctcggcccagaagccctcgggatcgtcgatcgactgccggtagagctgctcgtagcgggcctcgtccacccaggcacgcgacg

SEQ ID NO: 3346 - DNA, 9967 bp, synthetic construct
  source 1..9967: mol_type = other DNA
  misc_feature 1..9967: note = Synthetic
aaataccgggatcagggcaaacaatatgaaatcgataaagacggcaatgaaaaacccattaaccagacccatcactttacttttttctttacgaagggattgttagctggctctgacacggctaccgagcttaagaaagtagcagcaataggtattgatattcctaataagccagatcgggatcttggtatccttgctgtagacattggtcgtaaagtcaggacgggtaaaatccattggagggatttaccacgaattatttatgaagaactcaaagaataaaagcgattaagatgactgcattgcccatacagtgaaaacaaaatacgcgaataaaaaaatgctaattaccttagcccgccatctaggatgcattactatggagacaaaagaagctgggcctaataaatacaaacaaatcaaacctatttttaaattgtcaatgaactcttcaaaaactaccaagttaggaaatttataactgctataaataaagaaaatagataagacttcggccaaaaatagggaaacgccaatccaaaaaataatattggcgaactttggaacggactttttttcagatgttcgtttcattcttctactgtactacaagctaacattgcctgtaaaagtctatatgttcggtttttccacttcccaacctcagctccaaaaaatcccccaaatttgacgaccggcttagctcactctatctgagatgcgaaaaggcccccctggggtacctgattcccagagccctaaagagaacatcaaggtggtcgaggtgtcggtttggtgtaatcgtgtctggaaacgataaggtgctttgacctttagcgggacttcgggagacaatggcaaaacatccgaaaaggaatcctggagaaaccctaagggcttaaaacccttgctggccgggtctttgggcaggttctgaaaatccgcgtgtccgcagttcaattctgcgaggtggcaccacttttttgttcaagacttgagtagaaaccagaattaacccgctacctatgtggcgggttttttagtgtccgacttttgtatccgctgcttccgtaacacgcaaggttttacaagaattcctccgagccgccacgatcacttggccacgtcactttttacaggggtgatcaaccggaggaagctcttcatgaaacccacaacgtttgcccaagccaccgaactgtatctgaaaacctggagctggagaacggcaggaaaatcttcaacaagaaaagaaagctggggtagcagattgtcccgtattttggcgatatgtcgctggaggccatcaaccgctttgaaattgcgcgtttcaagcgccctctgctgtctcaccgcatgatggaatcgaccgtcaatcgttacttggccgttatctcgcaactcttccacaaagccgtggaatgggattggctatttaaaataaagaattggacgtttgttttgatcctacccgctaatgtggtactggtcttaactgaaaagagaatagccctatcctctgctttcacgataaggaatcattctgaattataaaaaccgagtatttagcacttttcgtttaactttgcttcctttatgatttcaagtatttaactcaggtgtgggaagcattatggcaaagcaagaaaaagttttcgcgttcgatgtgggtaaggccagtcttggtatttgcgctagagaaggcaatcatatattaggcctccaatcgcttctaataccggcggaatatggtgcaacagcagatttcagaagtcgtcgacgggcctatcgaactcgacaggctcataaaaaacgggaagagtggctttgccggctatggacagaggccggattaacgccactgaataatgatgataaacgacttaaaagcgaatttcccaaacggggcgaagagaaaatttataattcagccctattgaggattgctttattgcaagagaggccccttgaagaatggcaagtttttaaggccctttgggccgctatccagagacgcggatatgataaggattgtgattggaactttcgtaacgaagatgaactcttaagcgaagattcaaaggaaaatctggaatcagttggcaaatatcaggaagcgctttactaccatacgaactcacaaacagagtatttatttccttgttatttagaggcaacctcaatgggtttgtggcattgggagcaacccgacaagctgaatgtcagaatcgacagtaacgcaaccaaagtccggcaaaaaggaatggttgctcctcgtcagcttgtagaaaaagagattcgtcaattgttcgagaaagctcaaagacagctccccgccttgggaaaggtgaatatcaacgagttcttgtatggcccaagcggtaaagcgtatgcctctttatcccctgagttcgctcaataccgcggctcggaatgggatacccaaggggttctctcgcagaaagtaccgcggtttgataaccgaattttgaataaatgccaaatgttgccaaagcgaaatgtttgcaaggccaacgatccgctgagcctacaattcaacctgctcctgaagttgaaaaatattcgttttacggatgaaaacggtgaggttggccgttttctgtcctgcgaggaactgaaaaatgtctatacgctttgccaggaaaatttatccgaaaagaaaacccaagaaattaccttcggcaacttggtgaaattcatcgaaaagactgtagaaacaagggttatggatattaacctggcaaagggggaaaaaatcaaactgaacgcgaccggccgatcccggttttgccgtccagcattgaccattatgaatcaaattctgctggaaggaaccgatccaccagattttgacgtgacgcctttcgttcagcagggaaacaacaatgccattacccaagaggaattggaatcgctgatttctcgtttgggggaaacctggaatgggtttcatgtgggagacaagcggtatatcgatttggaaagtacgccaaaagaaaaggataagaacatcctcaaactcattggctcggttaataatccggtcgtaaggcatcggttaatttttttctggaacgagctgaaaaagatggttcatcagcacggtacgccggataaagtgatcctggaatttgcccggggtggagaaggtctggacgggcaaaaaacggcaaatgactgggaaagggcaattaaagagagtgaaaagcgtaacgatcgaatccgggagcaactggaagaacagggtctaaaatctcacaaatggaatattgaacggtttaaattggcggaagaacaacaatggcattgtccttacacgggtgagcgcttacatgcgggtaatctggagcattaccaggtggatcatatcgtgccggtgtctggtgacattgcaacggatgccttttacaacaaagtgttgtgtaccagccagtccaaccaggacaaagggaatcggactccgtatgaatggctatccgcaacggatgagtggccggactttctagcccgggttaccgataaaaacagcagctacagcaaaaaaaagaaagaattactgattcgcaatgacgcccgagacttggtggacagttataatggattagcagagaccgcttacattgcccgtctggctcagcaaattgtggctttggaattcggttgggggttacagaccaaaggtgacaatagaagaatatttgtcaatgatggcaaaatgaccgctaaaattcggaaaatatattcgttgaatgaattattgttgaccggggaagaaaagtccaaattatcggacgccaaagacgcaggtcaacagcggactgtctggaaaaagaaccgagagaaccataagcatcatgcgctggatgcatattgcatcagctacagccaggatttaaagatcagccgaattgacgagcagggtcgcattcattggcatgtgccgggactcgaagagtcaaaggctcagcttgagcgaaaactgatcgatttatttccaaagccagttcgacggaataccaaagagctttatcccctggaaacgatttatggctatcgaaagcggacagagaatggcaaggaagtccattacttgactgtcaggaaaaacctgatcgagcttctggggaaagaccgtaagaagattagggatatttttgacctggatatcaggcaagatttggagaaacactcggaagagataaaagacaacaaggactggaataactttttagtggcctataggcaccccaagcgtaatggcaaggtagaagccgtgctgatcatcgaatcatgttcagataacccacctcaggtggatagggccggacgtatgatttttggtgaattcaaggatttcggcaatctagatacaaaggaaggacgaaagggcattaccaggcaccagtttaaacattccaaggcaaacaaagggcaacttatttacaactcaggcaaaggctggaaagttcaacaagtctatgtccacgaaaagacaaacaatataaaacaaagcttattaaattctggatataaactttatagagatgggatgctgttttatcctggatgtcaggtatttataccttttgcatttaaagcaggtaaaaaagaactaccgggagggctgtataaatcccgaacaatcaaggctaaaggagctgtcttacttgaaaataatgacggtgaagaatttctaactaatatcaaacacctagtggaagctggagtggaattggcggagtaccatgacaagactgttaaagttttgtcgacctccaatgaatgacctttcatattattacagttttcaataccggtagtcgtctttcttgtgagcggggttttctggtgtgccgctaccccgatggcgatgagaatcgtgttgctctggctgatgtgcggagcattgttattgcgaatcccgcagtcagttttactaatgagtgcctggctcgtctactagcccaggactcggtggttctgcattgtgatcgccaattcaaaccgattggctggaccacaccactggatcgggtgatccgtcgggaggtgtttctaaatcagcttactcaaaatcagaatttcagccggttgttatggaaaagcatcgttttacgcaagatgcggaatcaggcggcgcttctggattatctcaacgtagatcacaatcttcacaatctggttgaaaagcctttggccaatgaagccaatgtgtcccggcagttctggggtagttatttccaggcgttaggaaaacgtcagaaacgcgaacgaaaaggcgctgaaagttttgagaataaatctttgaactatgcttacgccgtgatatctactttgacgcttcgagcaattctgattcatggccttcttccttcattgggaatacatcacgagccccgctatcggagctatcccttggtttatgacctgatggagccttttcgcagttttgtggatttgctgttttacgagtggatgcaggagccaaagccagaagaccaagaagagcagttcaaagactgggttcgctatctcatgaacagtctcagagaatgccgcatcaaacacccggaggacaaacattcctataagttgatggatgcagtggatagtttagtacggagcgtggcaacctgctttgagtcaaaacactttcaaagtgggaacacagatccattgtggctgcctcgcctggaagaacattattggctcaaagccgaaaacggcgagccggatgatgaggatgaggagaataccattgctgtttaaaactatctttcaaagataatgaagagcaaattcagaatgggctggatcctagttatgtttgatctaccagtggtagagaaggaagaacgtcgtcaggcgagtagattccgtactgagctgatggatcttggctatttcatgatgcaagaatccgtctatgcacggaactgtgtcagccaagaaaagtaccgtcaatatctgtccgatgtcagaggtattgcgccgcacagaggactaatcaacgcctttttcattacagacaagcaatggcttacatcagtaagcatgacgcttaccaagccaaaacgtaaaaagcacacaatagaagcgggtaccgaagcaccccaacaaatgactttttggtaaaatgtagagaatgattcctaaccgtgcaagcagagggtttggctattctcttatcagttaagaccagtaccgcattaatgaacttgatattgggtgattataacacagtatatcctattataccaagtccattaatgcggtagggtcaaaacacttttggtttgcgtccacgctttttaggcattataccaagtccattaatgcggtagggtcaaaaccaaaagcattgtctgaattctccaatttatattataccaagtccattaatgcggtagggtcaaaacacaaaaggatgagttgacaagataatagtaattataccaagtccattaatgcggtagggtcaaaacaacctctttatacttgttatccatccattcattataccaagtccattaatgcggtagggtcaaaacgaaagatttcctccactctcaatggaaactattataccaagtccattaatgcggtagggtcaaaacaaaaaactggaactactatacgcaatcaggattataccaagtccattaatgcggtagggtcaaaacggaacacgttgtcattaactgaacacttatattataccaagtccattaatgcggtagggtcaaaacatggcgctaaaggtaatgtcatagaagcccattataccaagtccattaatgcggtagggtcaaaacagactttgtgaagagtgtagaaagcgataaattataccaagtccattaatgcggtagggtcaaaacctggtggcatctaaatcgccagctgcttttattataccaagtccattaatgcggtagggtcaaaacatgtacgagcgcctccgccacccccgccgcattataccaagtccattaatgcggtagggtcaaaacatgccaatccaattagatccaatgtcaattattataccaagtccattaatgcggtagggtcaaaactatgccaaccgccacaaaccttcaatactgattataccaagtccattaatgcggtagggtcaaaacatccagtatcagagatatgatgtttgaagtcattataccaagtccattaatgcggtagggtcaaaaccgttgccgttgccgccattagcgccattagattataccaagtccattaatgcggtagggtcaaaaccatctgaaactgtgtgatggtgcctaccagattataccaagtccattaatgcggtagggtcaaaacatgtggaagtatctcctcttgtggtagaacattataccaagtccattaatgcggtagggtcaaaacatcgtgttgcatgttcgatttactctccttattataccaagtccattaatgcggtagggtcaaaacatggaaccaatgacggatattggctaaaagattataccaagtccattaatgcggtagggtcaaaacgaaagactattgcttgtgcgtttcggccttattataccaagtccattaatgcggtagggtcaaaactttaaccggcttcagtgtcaacgaaccttcattataccaagtccattaatgcggtagggtcaaaacggttttgtaatcagaatatcaaagtcaccaattataccaagtccattaatgcggtagggtcaaaaccaactggaacgccattcattcggtttacgttattataccaagtccattaatgcggtagggtcaaaacacactgaggaaccttggcccgacttaaagaaagataccaagtcggccatgctaaaagcatatacaaatgcaagcgtttgcaaaaattcatcccgaatctgcttacaaaaaacctccgctccgagatgataaatcagttacagccacggaggaatctcgaatgcaccccaccacttctacggaagcagcccagcaatatctggaaaatctggaactggagaacgggcggaatattgcgggtaaaacccagcagattcatcaggaactcatcccttattttggagcaatggtactagcggatatctcccgtttcgacgtagaacggttcaaacggcatatgctaggtaaaggccgctccgaagccaccgtcaaccgatacttggcagtcttgtcccaactctttcacaaagcagtagagtgggactggcttatgaaagtcccctgtaaagtcgtaaaataccgaatatcacataattagtcttgcagtcactcccataacctcaacagtatatcgtttactcttcctaaataccagtaaaattgacggtattattgctgatgattcaggctacagctcatcggccagaagggggtggaggtacgtcaagtctctgtttgaagaatctgcaaatatctttgatatacatacaagcgatcccgctgcttgcccgtagcctcctcaacaatgcccagtatttccaagtgattcagggttgcggtgatggttgggaaggatagccctaactccaaagaggcttgcttggcagagatgatgggatgcttttggagatagtgatagagggttaaagcagaagttttagcacgcttaagcgtttcaattttggcttgatcgacattaaagagggctataatttgttgaatcgtttcactgccctgcagagccgattctatgactcctgttaaaaagaactctaaccaactttcccaggctccatgctctctcacctcttgtagatggcgataatactcaggtcgatttttcttgaaatgcaagcttaaatataggccaggaacgcttagaatcccatcgaccatcagaatgaatgggatgagaagtcgtcctaaccggccatttccatccaagaaggggtgaatcgtttcaaactgaacatgggaaattgcagctttgatcaaggcagagacactctcatcatgcaagaatttctctagattatccaaacaaaccatcatctgttcaggaggcggtggcacaaacaatgcattgccaggtcgagttccgccaatccagttttgagagcgcctgaattcaccgggctgtttttcacttcctctgccggaggacataagaattccatgaatttcccgtagtaggcgtagcgaaagcggaaagccgtctttaatccgctgaatcccataattcatagccgcaacatactgagaaacttcctctacatcatctagtggtactccggggacttccttgctttcatacaaaagcaaatcagaaaaagaggattgggttccttcaatctgagaagagagcactgcttctttacgcacatacatatatagaaacagatttgtgtccggcaaagaaacaagcaggccatccagtcggcctagtgcctgacaagccttttcatagagcgtctctatgccacccaggctcacaggaggattaggcggtaacggtggcgggatgaatgccttaaaaggctccccagctgtaaacactttgatatactgtcccaaacgggtttccataggtttctgcatgttgaacctttaataacgagaaccctttattaaaggttatcacattataccttaatagaaaagtcagttattaaaggttcatgcccataaatttaaagccaaaagacctgagatctgctttgaagccacgcatccaaaaccctcttgtcgtaataaatccgttccccgaccttataaacgctgggcctttcttattgtatcgccacaacgccaaggtctttcgagtccgttccagatattgagccgcctcgaccgatgtcattcggttatataaacttgctctgtcaaattgataagccttgcttcccttgctgcgccagtgtttcaaaaaatcgtaaatttccttcgctatggttttaaacagtcattgtctatattgggg

SEQ ID NO: 3347 - DNA, 22532 bp, synthetic construct
  source 1..22532: mol_type = other DNA
  misc_feature 1..22532: note = Synthetic
taattatgtgacacattagatgaataaaagtcacataattaaacaaagataagaattttatttaatgttaaagaactgttaaagggttttatagcttattgaaatacaaacttttaatgattccatcggacaagcctattttaggaacaaatatttttcgagcaccactccatttcattgctgaaaggtaaattttagttgcaggaacaataacatcggctctatcggggtttaaacttagttcagaaattcgttctttataagtcatttgttttaaaaactgatattgtgcattcaaatagatataagaaataggttttcctaaatctctacccgacattttaaatattttattaatatttccacccgaacctataagagaaatacgcccgtagtttttggtattttcttcaacccactcttgaacttctttgaaaataatattattttctgtttttttattattgattaatcgaacggtacctattttaaacgattttgattttacaattctaccttttgaaaacaaggtgaattcggtactaccaccaccaacatctacataaagataggtagattctgatttaattaaatgatgtaaatcggtagaaaatataattgctgcttcttttttaccatcaattacatcaatttctatatcagcttcttttaatatggtattaacaacttgagttccattttgagcttctctcattgctgaggtagcacatgctttgtatttttcaacaccatgaactttcataatcaatttaaaagctgccatagcatccaccattcgagcagtattttcttcggatattatacctgtaacaaaagcatcagtacctaaacgaataggaactctaactaaagaagcttttttaaatagcggttccttacctttttcttcaataatatttgatatcaagagtcttacagcatttgaaccgatatctatagcgccatattttttaattttcaaaataatataattttatctatgatttttagggaaatcgactaaaatagtacgtcccttttttaagtttttccagtgtttgtctttaaattcaatgcctataattccgcaagtaggcacgtgatttattggtttatcaccaaaattattcacaaaactattaataccatgatcgtggctaaatataatagcactactaaaattatcgtctaaagcatttactgtttttactaaataaccatcactaaaattatataactgacgttttatttgtaggttagaaagtgggtatttaaaattttcacaaaaaataatagccgtatgcagcgccctatttgcactactggaaacaaatacatctggctttgttatttcttgcgataaaaacttagaaaaaagatgtgaatctttaataccacgctcttttaaaggcctatcaatatctttaataccttggtatagccaagaagattttgcgtgacgaacaatataaagtgttttcatttaaattattaaaatgtatgtaaatataaaattatggcgctaaacgtgctaatttccaagaaaaatctttttctaaggtatatcgtattctatcgtgcattctatttggacgaccttgccaaaattcaatagaaacgggttttaccataaaacctccccaatgtggtgggcgtgtaatttctttattttgaaacttttcggttgttttttcaagttgctcatcgagcagttcacgagtggcaacaatttcactttgatttgatgcccaagcgcctaatttacttccgtcaggtcttgattcaaaataaccatcagataaattttcggctagtttttcagcctttcctttgatgatgatttgctgttctaagccagcccaaaaaaaagaaagacatacattgttgttgtgtaaaattgcttttcctttttctgaattataattagtataaaaaataaaaccttcccaagtatatttttttaacaatacaattctatttttaggaaaaccatccaatcctattgatgaaacgttcatggcattactttcaataaccatttctgacgcatcggcagcaaaaaaccagtctctaaataattccatcggattttcaggacaattttttttaagtagctcttttttctcgtatgattttctataatcgcttaaatcgtgtgacattattattttttatgctatgtaaaaatacattttttatcaattattttagcgtattttgttaaaaaatagcaagaatgaaaaataagatatttagactatcacttaaagacttaattataaaataaaaaaatatgccgaaaattattttaacagcattctttattttaacaggaattttaaattcaataagtcaagaaaaacatacaattacagtatattttgaaggaatgaaatctgataaaggtaatttgtatgtagcaatttataataataaaaaagcttttttaaaagagtctataaaaggaagaataataaaaatttcagataaaaaagcgagcctagtatttgagaatatgatatcaggaacttatgcaatttcggcgtttcatgatgtgaatgataacaagaaaatggacactaattttataggagtccctaaagagccaataggtatttctaatgatgctaaaggttttatgggacctcctaaatataaagatgcaaaatttgatgtaattcagtcgataaaaatgactattcgtataaaataaatttcacaaaataattcatgcaaagtgatgcttaataatagcaatcagtaaggtacaattgattatttttgtagcacaacacaaactaaatactatggctttaaaagcagttttattcgatatggacggggtaattgttgacaccgaaccgttacacaaacaagcatattttttaatgtttgataaagtaaatattcaggtttcacaagaactttacaattcctacacagggcaatcaactttagaaatttgtaaagatttagtagccaaatttaatttaactattcaggctagcgaattggtaaattataaacgtgctttttttaaagaactctttttttctgatgataatgacttagaattattaacaggagtgttagatttaattaaaaattattatcaaaacggtgttactttagttttggcatcgtcggcatcgatggttactattgacaatgtttttaacaaattcgatttaaataaatattttaaagggaaaattagtggtgccgatttaaaagcatcaaaaccacatcctgaaatatttttaaaagcagccgatattgctggttttgataaaaaagaatgtttagtaattgaagattctaccaacggaattagagccgcttacgatggcggaatttattgtgttgcttataaaagtgaacattctaaagagcaagattattcgttagcgcaaaaagtaattgcaaattataatgacataaaatatgatttggtaaaagatgttgtttaattaagttataagcacaaatacctagccccgattgaagcatttgtttgagctctttttttgatttttcttcaaaaaaaagcgagtgcggaaagcgggaaatagcttcaaataatagctttaaataattaaaagcaaaaactcgttaacatactatttctagtataataacgagtttttatatatttaaaaagaattattgttcttaaaatatttttagaacatctctcttcctgaaaagtgaaaagcaccttcgatagcagcgttttcatcagaatcagaaccgtgaacagcgttttcaccgatagaggtagcaaacattttacggattgttccttcagcagcatcagcaggatttgtagcaccgattaaagttctaaaatcttcaacagcgttgtctttttctaagatagcagccacaataggaccacgagtcataaattcaactaattcaccgaaaaaaggacgttcgttatgcacagcgtaaaaagcttcagcatccgctttagtcatttgagtttttttcaacgctacgattctaaaacctgcagcattaattttgtctaaaattgcgccagtgtgtccgttttcaacaccatctggtttaatcattgtaaaagttctatttgttgccattgtaattgagtttctaattaaagtaaataaaatgtaagtgcgaacttcgcacaaatcggcgcaaaaatacactttttaatcttattaaaaaattaaggatatacttgattgatttcttgtaatataaccttgtttttacctcgtatttgaaaggttactttgtttgaaataaaatcaaaaaacaatacgccataacttaatttacttgtaacattaccaattcgatacttgtttttttctgatgaaaaagaactgtaagcatgggttaaaccgcttgatgtaaaatcaataataggatacgcaatagtatttaggcttgcttttgaaaattctgaaatatgcctgtcaccagaaagaataattacattttttgcttttgaggtttcaattaatttaaaaaatgtagtcatttcatttggaaaattactccacttttcaaaaccatgttcgctcgatagtacttgaatactacttacaataaccgtgaaatttgccgtagaatttgttaattcttttgtgagccatttccattgatcacttcctaaaatactgccttctttttggtttgattgatacctttttttacctgtgccttttgttaattcagttctaaaataacgggtatctaaggttattatttttacactattatttttaattttaaaagtttttgaatgataaattcccgcttgttttcttctaggagaatttttaggaacgtttaaaaaatctaaaaataattgttgactttcttctttttttcgataatgagttccgccatcattttgaccataatcatggtcatcccaagtcgctaaaataggcgtatttttcagtagcttttgatacgaactatctcttttttgttgctgataaaatttttccattttagccatattataggtgtcggcataaatattgtcgcctccccaaacccaaacatcgggttttaaagaaataatatcttcccaaaaaggattttcttttctctgattatcgcaagaaccaaaggctagggtaaatttattttggctataacaattggcaattgaagtgtttataaaagtaattaaaagcaagaaaaaagcaataggatatttagtgtaaaccatgaaaataattttgagcaaaacaacaaaaataaaagcataaaaagattaataaatcattaatttgtatatttgcgagatatgattttaaaacactttacacagcttcaagaatttttatcaatccctagaaatattgttattataggacatagaaatcctgatggagatgccgttggttcaaccttaggtttgaagcattatttagctaaaaaaggacacaccgctcaggtggtaatgcctaatgaatatcctgattttttacactggattcctggttctgaaacggtatatcgttttgaccgtcaaaacaagcaaagccatcgtgctttagctgcttcggaattaattttcctattagattttaacgcattgcaccgagttggtggcgacatgcaaaatacgctagaaaagtacgaaaataattttgcgttaatagaccatcatcagcaacctgatgattttgaatatatgtattctgatgtttcgatgtcgtcaacttgtcaaatggtgtataattttatcgaaatgatgggcgatgttgctttaattgataaaaatattgcgacctgtttatataccggaattatgaccgatactggttcgtttcgttttagatcaacgacaagtacaacgcatagaattattgccgatttaattgataaaggagccgaaaatgataaaattcatagcaatgtgcttgatgcaaattcatacagtcgcttacttttattagggcaggcattgagtaatatgaaattattgcctgaatataaaacagcttttattactttatccgaagaagaaaagaaaaaatttaattacgaaaaaggcgataccgaaggcgttgtaaattacgcgctttcgttaaaaggaattgtatttgccgctatttttattgaagataaagaacaaggtattattaaaatgtcgcttcgtagtaaaggagatttttcagtaaatcagtttgctagaaatcattttaatggtggtgggcacgataatgctgctggtggaaaaagtgatttttcgatgcaagatactattgccacttttacagcgttattgcctgagtataaaacagctttagaaaggtcttatgaagtataattttatttttttcatcctgattattttaacagtggtttcttgcaaagagccacaagccagatatcctaaaaaacaaggaactgttaatttttataaagaagtagtcaagaaaaataaaaaattaaatgctttagagaaaaaacgtttaaaaaattggatatctaaagattctacgcatacttataaagcttctaaaaatggtttttggtaccgatatgtagttaaagatactgtaagtacagtgctagcaaaagctacaaacacggtgttgttatcgtatgatatttccgatataaacggtcatataatatatcaaaagcaagagcgaacttataaggtagatcaagaagattttattcctgcattacaagacggaataaagttgatgaaaaagggagaaattattacatttgtaattccatcatatagggcttttggcgttatcggcgatggaaaaaaaataatggtcaatcaacctatacaaagtaccgtaacattaattgaaattaaataacaaatagataaaaatgaaattaattaaaattttagcagcaacagctgtaacactttcagttgtatcatgtggaaatagtgggtttaaaaccaaaagttcattggctacagaggtagattctgtaagctatagtttagggttagacatggcaaacaaaataaaagtgaattttgaagatttagatcaagatttatttgttcaaggatttaaaaatggagtagattctaccaatttattagtagattctaaagagattaacaatattttaagatcattttttcagaaaaaacaagaagagaaaatgaaagagcaacaagcggctcaggctaaaaaagcaataactgaatttggagactacaaaaaagaaggtgaaaagtttttagctgaaaataaaacaaaagaaggtgtaaaaacaactgctacaggtttacaatacgttgttttaaaaccaggtaaaggtgatgctccaaaagtaagctcacgtgtaaaagttcattatcacggaacattaaccgatggaactgtttttgatagctctgttgatagaggagaaccaacagaatttggcgtagggcaggttattaaaggttggacagaaggtttacagctaatgaaaccaggagcaaagtataagttctttatcccacaagatttagcctacggagcacagcaaagaggtgaaaaaattaagcctttttcagcattaatttttgaagtagaattacttgaagtaaagtaattacaatgtataaataactagaaatcaattaggttagtactcgttactaacctaattgattgtttataagcatatctaaaataataaaaaatgaaaatttataaaattttaatagcagtagtagtgttgttttcggcttgtaaatcagttaaataccctgatttagaaaacggcttgtatgccgatatacaaaccaatcgtggtgatattttaataaaactacacgcaaaagaagtgccaatgacggtggctaattttgtgtcgttagcagaaggagacaaccctaaaatagccgattctctaaaaggaaaaccgtattataacacgactaaatttcatagagtaattaaagattttatggtgcaaggaggtgatattacaggcacaggtcgtggaaatgcagggtataagtttgcagatgaatttccgatggatgaaaaaggaaaattactttataagcacgatgctcctggagttttatcaatggcaaattcagggaaagccaccaattctagtcaattttttatcacccataaagcaacgccttggttagatggtaaacattcaatttttggtaaggttattataggacagcatatcgtagatactattaagcaaaatgatgttattaatcatttagaaattatcagaataggtaaagatgctaaaaaatttaaagcagccactgtttttgaatatgaattaaccaatgttgtaaaaaaagctgctgaacgtaaaaaagctgtagccgaattaaaacgtaaatttcaagaagaaaaaggaattagcaaggctgttaaaacaaattcaggcttaaaaatagcaaccataaaaaaaggaacaggtaaaaaagtaaacccagcgatttcaacaacggttcattacacgttatttttaaccgatggaacaaaaatagattcaagtgtagataaaaacaagccttttacctttacacttaacgatgcaaacatgcctttaatagcaggttggaaagaaggggtgcaaaccatgcaagaaggtgataaatcagtgttttttattccttattatttaggatatggcgaaaattctttaggaccaatccctgcaaaatctgatttaatttttgaaattgaagtattaaaagtagggaaataattagcaaaattacttatggaagatatcatacaaaaagaccaggcgtttttaatctatttaaataatttaggaagcgaacaatgggattggctttggctagcgattaccaatcaatttaattggattcctttatttgcgtttttaatatttttaatttttaaacacctaggctggaaaaaagctgcatttaccttggtgtttattgctgttttaattactttttcagaccaatttacaaacttaattagacgtacttttgaaagattgcgcccaaataatgatccagcaatacaagattctttaagaaggttgataaacccacagagttatagttttacctctggtcatgcaaccacttcaacggttgttactgtttttttaatcatgcttttaagaaaatatgtgccagcgattaaatatttagcggtatttccattgatttttgcatacagtaggttgtacttaggcgtacattttccgattgatatactttgtggttttataaacgggatgattatcggctttgtgtcggcaaaattatatcagtttttatcaaataaaatatttaaggaattataaggttacgtacaatattgtagcgacgcgattaatggcgtttttactatgctggtaagaaatatcagaaaataaaaagactatccatttttaagtaaatgtggtagtttttttttgaagctatttcccgctttccgcactcgctttttttatttttttgaagaaaaaaaacaaaaaagagctcaaacaattgcttcaatcggggctaggaatttgtactatattttaagctatgagattgtttaagttttagtcaataaaattttattacaaaaattcactaataatctgtcagttcgactgatttttttccttcaaaaaaattgtatcgagaactttttagcatcaaaatcaatcaaaataaaattctcgatacaattttaattccttctagtcattaaaatcactcgaattgacaaaatggtggaaaatcaagaggagaaactgacataaaaatccctttgacggattctatttttaagttataaaacgtttttaaatgaaatttaaacaggttctaataaataatctaaaaaattaaaataaaaaaagtcctacacgaagcaggactcaagattttcatctacggcatatagccttattgtgataagattaaaagattagagtaattttttcacatctcaaatatagtaaaattttgctgattatcagaataatatcttaatttagagcaaataataattgctatattatgtcaaaaatacttggattagatttaggaacaaactctattggttgggcgttggttcaaaataatatcattttaggaatgggaagtagaattttccccgaaggtgttgtaaacttaggcgaaggagaaggaagagaggcttcaaaaaatgctagtagaacagaagcgagaggagttagaaggcaaatttttagaagaagattgcgaaaacgatatttattaaaagaattggcaaaacataatttctgtccaatttctgccgatttaattaaagattggaacggtacagaaatttttaaaaatcaagaattacaagattggtttaaattaaatccgtatgaattaagagcaaaagcaattcatcaagaaatatctttagtagaaattggacgtattttttatcatataattcaacgtagaggatttttaagtaacagcagaagtgccggtgcagatgtaaaagaaacaagtacgctttttacaggagatgccaaaattggtaaaataggaattagtagtacgctcgaaaacatcaaaaatattgggaatagtgaagaaaataaaacgctaggttcttacttaaattcaatacaacccaaagaaaatgaaccttattccgaatgtttagaacgcataagaaatagatatacaacccgacaaatgtatattgatgaatttgaattaatttgggaatttcaaaaaatatatcattcagaattaacagaaaatttaaaatcgttatttggcggaagaaaaaaagatggctataaagatgacggtgttttatttcatcaaagacctttacgctctcaaaaacatttagtgggttattgctcatttgaaccaaaaaaaacaaaatgtaaaattagtgcgattccttttgaattgtttagaatttatcaatgggtaaacacgctttcttatgattttaacggcgaaaaacaagaaattacatccgaagaaaaagaaaaaattatacaacttttattatccaaagaaaaagttgcctttaaagcaataagaaaagttattgacaaatcagaaagtaattatcaatttaattataaggataaagataacattgtaggaacgcatacgataagccaattatccaataaaaagttttttggtaaacaatggtttcatttttcagaagaagaacaagaaaatatttggcacgttttatctttttttgatgatagcgataaactaaaagaatatgccttaaaaaattggaatttcgatgataaaaaagcaacagaaatttctaaatttaatttaaaagaaggttattcaaatttaagtagaaaagcaatcaatactattttgccttttttaaaacaaggctttatgtttgatattgccgtaggattggcaggcgtaaaaaatgtgttatcaaaagaaaataattgggcagaaaatgaacaatttgtattagataatgttcctgaaatagtgcgttcaaacataaaaggcggctatattgaaccgcttaaaaatatgctaaaaaatgagtttaattgtaccgataaacaattagaaaaattatatcatcatagtagtgctattgaaacgcaaataattttagacaaacttcctgtaaatataaatgccgatagagaaattcaaaaaattaaaaatcctgtagtaattaccgctttgtttgaaatacgaaagctcgtaaatcaaattataactacttacggaaaaccaacggaaataaaagtagaattagcacgagatttaaaagcgtcaaaaaccaaccgacaagaaaccagaagaagacaacaaattttagagcgtgaaaacgacagggtaaaagtggagttagaaggattagaccaaagaacaaatcatgcgaatattttaaaatataaactttgggaagaatgtaataaaacgtgtccgtttacaggaaaagtaattacgttaagtaaactttttacaggagaagttcaaatagaacatatttttccgtggagcaggtcgttaaacgatagtttcaataataaaacactctgttttgctgatgaaaacagggcaaaaggaaataaaacgccgtatgaattttacacttcgcaaggtttagaaaaatgggaagccataaaattacaggcgttaagttgttttaaaacaaaggctcattatccgaattgttataataaatttaagcattttgtaaagcaaaaacacgatgaagattttataagccgtcaattaaacgatactagatatatcagtaaagaagctaaaaattatctatctaaaatatgtgcaaatgtaatggttgctcctgggcaaatgaccgccgtattaaggcataattggggtttaaatacggttttaaataaagaacaagatgcaaaaacgagagatgaccacaggcatcatgcagtagatgcgttggttatggcgtgtgcgaaaagaagtcatttacaagaattaagtaaaagaaatagataccataaaaatcatgaattaaaagattttccgatgccttggcaatcttttagaatggacgcagaaacggcagttgaacaaattttagtatcacacaaaaagcaaaagaatttagtaactattagaactcataaaactaaaaaaaatggggttgaatataaaaatttaggggtttctgctagaggacaattgcataaagagtcggtttatggaaaaagaacagcaccagatagtagccaagcatttcatatacgaaaaccgttagaaagtttaaccacagaaaagcatttagataaaattgtagatgcaactgttcgattacttattctaaaacgagttaaagaattaggcggttttgtaaaaggtaaaatcccagcagatactttttttaaaattgatgaaaacggcataaaacaagcacaaatatttttaccaaatagaaacggtagcaaagtaccaataaaaaaaatacgtattaaagaaaatataggcggagcagaaaagttaaaggaagatataaatcaatatgtgaatcctagaaataatcatcatgtacttatttataaagatgaagatgataatttaaaagaagatgtagtaactttttggacagccgtagagcgtaaaagacaaaagcaagatgtttttcaacttcctgaagatgggaaaaaaattgtaactactttacaaattaatgatatgtttttattaggtttacaaaatgaacaggttgattgggataatatagatgcaaatcttttaaaagaccatttgtatagagttcagaaatttacatcaaaagattattattttagaaaagataaagaaagtaatttagatggtaaactagggattgcttttcattatataaaaggttttggaacaggaaaaacaggctggaaaacatttaatccaattaaggttggaattaatagtataggtgttttaaaaaagctttaattttttgtgaggaatgaaagttcattgacatttttttttagagaaaacgatattctgacctcagagttatgaatcctgcgttctgttgtggtttgattaaagattagagaaaacgatatttttaacaagcgcacaaatagcgtcagcaaagttgtggtttgattaaagattagagaaaacgatatttaaatcaaattattgtacaggagatactggttgtggtttgattaaagattagagaaaacgatattagaattttaaaaagtatttacaagaagatgttgtggtttgattaaagattagagaaaacgatatttataaagagcatgaaacgtttgaagaagtagttgtggtttgattaaagattagagaaaacgatatttagttgctgttactttcattaactttgtgtgttgtggtttgattaaagattagagaaaacgatattaaaacaaacaaagtaaaaaagtatctgggtgttgtggtttgattaaagattagagaaaacgatattttgtcgctgcgagatatggacaaggcgcaggttgtggtttgattaaagattagagaaaacgatattggtatatctgaaatgcaggtttatcgaattgttgtggtttgattaaagattagagaaaacgatattgatacgttagaaaaaagagaacaaaaagccgttgtggtttgattaaagattagagaaaacgatattgcaggcagctacaaggtcaccagtacattagttgtggtttgattaaagattagagaaaacgatatttttgaaacgtaccaattgaaccgtggtccagttgtggtttgattaaagattagagaaaacgatattaaacttgcaaaagaagcggttattcagaaagttgtggtttgattaaagattagagaaaacgatatttcaattgctaaaattgcagcaacctgatagttgtggtttgattaaagattagagaaaacgatattagtaagctatgtaaccgttgctaatactcgttttagtaagtaaatatcgtataaaaaaatgcttcttataaagacataatcgctttgtttgaagcattttttcattcctattagaataattctaattgagaagggcttggttcttttggtttttgaaccttgccccaaaaattcataatattaccaaattgtttatcggtaatccttaaaatacttacttttccaaaagcaggaagtaaattttttatcctcttttgatgcgcatcagcactttcgctactagcacaatgccgcatgtaaacagaaaattgcatcatcgtaaaaccatcttttaaaagatttttacgaaactgttgggcatttcttctgtctttttttgtttgagtaggtaaatcaaaaaacacaaataaccacataattctataagcatttaaatccataatttgggatagattaattttctggtttttccagaaaaacattgttgtaaagagtttgttgttgaggttaaagcaaccattaaagggctttttttatcttcaaaatagaccgtttgtgttaatgtttttaaaagttcggctttaataggagtaattaaatcgtgctcatcatattgttttataatttctaaaacttttaggtcgattctatgcaaaccttatacagacaactaaaacccctagccccgattgaagcaattgtttgagctccttttttttgtttaaaaaaaagagcgagtgcgtaaagcgggaaatagcttcaaattattttagtgattatcttaaaattagataaaaaaaatagtagtgatacccctgaaaaattagtaattttgtaggtctgaaaaaaaccgagttataagcgtgtgtcagttgtgtaatctgacagcacaagcgaggttattgtagcaaaaaatttaatatatggaaatgataacagcacatgactttgaactaaatattgaattgaaaggtgttaaaaatccatcaaaagtatttgatcatttgtctggtttttatgataaattattagttttagataggcatattgtttataatatttctgtagaagctaaagttgaatatgatttagtcgatattcaatttgaggctattagtacaaaaattaagcaaattttagtcaatactccaggcgattacttaaaaaatggtataaaaccaaccgcttggttaggcgatttattggttcacataaagtacaaaactttaaaagcaattgagctacagcaaatatcctctaaaaaaggattagataaattaaccaatgaaataaacaggaaaataaaaaaggaaacgcccagccatttattgtttttttcggtaaataattactacattttaaacactgttaaagaaattagcgtacaaacaagtaagttaaaaagaggtgaatatttttgttttaaaagcggaaaaaataaagcaaaattaaccaataaaagctttgtagatgttcctaaaattttgagtgaactaggcgatgcaagcatagcgcaagaaagggtagaggttttaaagataaaaacaatggatttattgtcggataattcttattggaaactacaaagagaaggcgctcctatcgatgttaaaattacagatgaagcttggctagaggaatatcataatcgaaaatttgtaattcagccgaatgattatttaaagtttaatttaaagataattcataccaattcatcaaataaaccacgagttagttatcaggcaacaaaaataatttcggtaattccgccaagtcatatcgaaaatcatgggcaattagaaattccatattaataaaaaacgctaacaaacttaaagtttactagcgttttttatcaaaaatattaaaataatatgtgagattagccctatttttttcggtaccaatacgccgttctaccaaaaacagcaaaaccaatatagcctctaatctttaatttatcggcattttcaagctcgatatagcatttatattcttttccgtttttaggatcaacaatagttccaccgctccattcattgccatctttttttaagcctgttaaaatattcatgcctaaaataggagtgtttttacgatttccgctacatttatcgcaaacggctttttgcttgtctttattggtgatttcaataattttagcaaatgcttttccgtctttttcatagactttaattacagaatctacggtattggttttttcattgcggttttcccattcgccaaaaatagactgtgcattaattgttgttgctactagcagtaataagatgcttaaaaataattttctcatgtttgttggggtgtattaataattaattaaaaataacttcaaaaattgctccaataataatagtactgctacaataacgaaggttaatcgtactgagcatcaaaattttcagcccattttccttgcactcttaacacttgttctaaaacatcgcgggcacaaccttcgccaccatttttatcagaaatatatttagatacttgctgaatttctctaacagcatcatttgggcaacaaggcatacctactaatttcatcaccggataatcaggaatatcatcacccatatataacacattttcagggtttaaattgtacttgctgataatttcattaaactgcttaattttatcgtgagcacctaaataaatatcctcaattcctaaattcgccaaacgagtacgcacgccttcattttttccaccagaaataatacacactctaaaacctgcttttactgcggctttcaaggcatatccatctttaatattcatttgacgcactaattcaccattcggaaaaacggttacaattccgttggttagtacaccgtctacatcaaaaataaacgtatttatttgtggcaatatttctttataacttttttccatttcgttggatttatgttgttttttggattgattttgtaataagttgatagatatcttgttgttctttatcgagtagttctaaatgattttgaatggtttttttatcgtttctttttgcagggcctgtttgtgcttctgtaggcgataattcttgaatttttttagccgtttcttcaattaaaggatgtaaaatttcaaaaggaacacggtgttctttacaaatatcatcgccaattttatacaaatgattggtgaaattatttacaaaaacagcggctacgtgcaaggtttttcgctgtttagagctaatcggatatattttttttccaatcgattttgctacactttctaagagcttaaaatcatcgttattttgcgcctctaagcaaaagggtatttcatcaaaattaatttctttatccttagaaaaactttgcaataaataaaaaactccttttctcccgttattttgtaacgaatgtaaagaaacacttcctgaggtatgtaccaccaagctattttgcttatttatttttgatgaaactcctgaaatagcatcatcagaaaccgctataatataaaggtcagcagctgctaataaatttaagttatcagtaatagcaacctgtttttttaaatggctaatttgctgaatatttctagcatacatttgcaccaaagaaatttccttggttttgcaaaaagcactggctaaatgcagggcaacatttccacctccgataatgacaattctaatcatgggcacgaagatattgaatttatatgatagtgatttggctattttaaaaaagcgaattataaaataacgacaatctacaactcattactgccgattttgtaaattagcctatcaaaataaacattaaaataaagaagatgaaattagatatattagcttttggagcacatccagatgatgtagagttaggttgtggggctactattgccaaagaaatcgcttcgggtaaaaaagtaggtattatagatttaactaggggagagctaggaacacgtggttctgcggagttacgagatatagaagccaaaaatgccgctgctattttgggggtttcagtacgtgaaaatttaggttttgccgatgggttttttaaaaatgataaagaacatcaattagcggttataaaaatgcttcgaaaataccaacccgatattgttttgtgcaatgctattgatgaccgtcatattgatcatccaaaaggaagcgatttagtatcgaatgcttgttttttaagtggattattaaagattgaaacaatattaaatggcgaggttcaagaaaagtggcgacctaagttagtctatcattatatacagtggaaaaatattgccccagatgttgttgttgatgtaacaggttttatggataaaaaggaaaaatcggtcttagcatacgcttctcaattttttgatccgaacagtaaggagcctgaaacacctattactagtaaaaattttaccgatagtataaattatagagcaaaagatttaggaaggttaattaatgttgattttgcagaaggctttacctcagagcgttacgtagcagtgaaaaaaataagtgaattaatttaaaaaaaacttgaaaaaagtttggtggaacagtaaaagagttatatatttgcactcgcaattaaatggtggttgtagctcagttggttagagtatcggtttgtggtaccgagggtcgcgggttcgaatcccgtcttccacccaaaaattaaatccttcttttttaagaaggatttttttgtgcgtaaaatttaggtataaaaaaacaaggctttttaaaccttgtctttatattatattaaaaatcacttatttctttttaatttctagccattcatcatatttatctttatgcttaaagcgtttgtgcgaccataaataaaaatcgggctgtgctttgatatttttttctgtcaatgctaaaaatttatcggtaatctgataattttcaaaatcagtaggcgtatcggtaattaattcgaaagatgtttcaaaataccctcttttaattttagtaacattcatattaataactactaaattatattttttagccagtgtttccgctccggtatgtacagggattttttcatttaaaaaagtagcccaatacctagctcttgctaattgaggagattgatcacttaataaaatgtataaactttgaataccttttgcctgtctttcattaatttttttattaaataaccgtgttggcacaccatcaaaaccatatttggttcttgagcttttaattaccttttcaaaataagggttttgtagtttggtatatgcgccataacaactaatatttaagtattgtggcaatgcaaaagcccattcccaatttgcctgatgcgcacctgttaaaacaatacttcgcccttgtttggcatatttgtttattaaatcggcatttacgtatttatagcgtttgtttatttcttttttgctaatagaaaacgacttaatactttcaaaaataatatcaacaaaatgactgataaatttttttgttaattgggtgatttctgcttcatttttatcggggaaagcagttttaatattggtttcaactattttttttctatatcctataatataatataatatcacgaaaaagaaatcagaaaaaacatacaaaatacgcattggtaatcttgaaaatatccagataaaaggatatacaagcgcgaaacttaaaaacttcatagattaaattttaaaaatgcaaatatcgtatttaattatcaatcatttacttttgattattagctttttcaaaagctgttattttaaaaatttattatctttacgtttaaaatttaaattttatgaaaaagtatttactcttgttttttgttttatttttaatgtattcatgtactgatgaaggggtgtgtacttgtacatatgaatcacaaggatggaatggtggacaaatagtgaatcaaaatagctctataaattatccctgtaatatgaaacctccttgtgaataattaagtgctactaattaaatgtattatttgatctgttttttactctggtatgtattttaggataaaaacaacgatttgctaaaatcatgtgtaattaattttagttgtaagattactcgcagattttcgattacattttttaccaattttagtgtttaaaacaagcaattaatcatacgtaaatacaatactatgagtcaaattatcttattattaatagcagcaaacgtgttagtttcctacaaaggatttaacgatattactttttttaatcgctataaatttcaaattcaacaaattgtaaatggagataaaatcagaatgttgacctcgggttttttacatgccgattggatgcacttagggtttaatatgtacgctttatatctttttggaaaaacagttttgggtaatttttcaacaccttatttcttgcttatttattttgggagtttgtttgcgggaagcttatattcgttgtatcagcataaaaacgactattattatagcgctgttggagcatctgctgcggtgtcgggaattgttttttcggcaattatcttgtatcctgatatgaccctaataatgttccctattccacttcctttacctggctatgttttcggaattgggtatttattgtattcaatttacggtatgaaaaaccaggcagataatgttggtcattcggcgcatttaggcggtgctattggtggttatttacttactttattgttaaaaccgagtgttatttcaaataaccccttaatgattggagttatcggcgcaattattgttggcttgttcttatttggcgataaactgaaagttaaataattttattacagatttttaaattctttttttgaagcaatttcccgctttccgcactcgcttttttttgaagaaaaatcaaaaaaagagctcaaacaattgcttcaatcggggctaggcatttgtgctaaaaagtaaaaatagaacttcaaacaacatttagaacctcttgcctaaaaactaaaatagaaaataaaaccacgctgtcagttcgagtgattttttccttcaaaaaattgcattgataattgttttaacctaataatctgttttttaaaaataaacaaacatcatactgaatttagttcagcaccccatcaaaaagagaactacggaaaaataaaaaaaactcaaaattgcacaaaattacaactgtcagttcgagtgattttttcctttaaaaaattgtatcgagaactttttagtcattaaaatcactaaaattgacaagaatcatcaaaaaaaattagaaactaaactaaaacacttttgacggattcgatttttcataaaacttcactgtaaaaaaacatgctgaagattggctgttgtttggtaaatagtaaccgacagatttcacgtgcaaaagcttgcttctcaggcggtacaggaggttcgaattcgtttaagatgggagattatcgatatagaaaatcaggcaatttcaacattaaaaaacacaagtactatttacaaacctgaaattcttgaaaatggtgaaaccaagcgtcagctactagatagtagcaggtttacactttttaaatcacaagaaaagtggacagataatcaaaaagaaagggctgttattttatttaatttatatcctgagataaaaaaagcatacgatttatcgcaaggtttaaaatctgtgtttgaaacgaaaacaggaaaagatgtggccagaacaaaattagcgctttggtataataaagtggaagatgaaaatttaaaatcgtttaataccatcaaaaaaacgatacaacatcattacaaacctattttaaattacttcaataacagaaatacaaatgcttccgcagaatcttttaatgccaaaataaaagcttttcgagcacagtttcgaggtgtcagagatgttacttttttcctatatcgcctcactaaaatttatgcttaatttatgtagctccccaagtattatacttgatccagaaagattgcaaaaataaaagcataaaaaaagccgaaacatttgtttcggcttttgagcgaaagaccaggttcgaactggcgacattcagcttggaaggctgacgctctaccaactgagctactttcgcattggtaaataaagattttta

SEQ ID NO: 3348 - DNA, 21866 bp, synthetic construct
  source 1..21866: mol_type = other DNA
  misc_feature 1..21866: note = Synthetic
gatttcgttggccaaggatcaaggggttatttagtttgcccctgcagagctgtttacagatttaccgcccagctttttgttggatttcttcttaattgattttttttttaaaatgctattactgtagtgatttattacgttttcttcttgcttctttcttttttataaccttggagtttgattgattttttttggcaaatgcggaaatccgtaaaatggagttgatataaatttataaaattacagcagttttgttacgagtattaaataactaaattttaaaaaaaattataatttggtgaattgtaattgtatttcaaaaaatatgacagtaataattattatttttcgattttttaaaattctttttaggctaaataaaaggcttgaggaatcagaattacactacttcaataagcacctttttgaacaaagttttgtaattattaactattcttttaaaaatgccttgtattattcgtttaatggcaagatagaattaacctctggaataaaaatctttaatatttcaaatgttacaaatccaatacggtttaaagtgcaaggattttttcaatcaaaagagtatgaaattcaattacaaatttctaatcgtttgaattctgtgaaattcaagacagaattagataattttcaattccaattgaatgaacgtaaagttgttacttctaattatccattaacgggtattaatttaaaacaaatattttttggttcaccaaaagtttttattgaaccaattcatctagaaattattcaaactgaatataaccaaactgattttttatgataagagattattaccaattgccgaagtcaagtcctttaatgcgctaactatggaaatgtgcaggtggagatagatatcttcttgagcgagctacttattcagaccaaataaaatacatgtgccttggtggaatcgtatttgcaacaggtgcaatggcaggattggcaggcggatatgctttttataccatttttgaaaatcgaggttcagcgatagataacccggttgacataaatacagttttctttgcattaatttttggtgtgatttgggggttaatgatttttaatattgacagatttatagttactagtactggaaaaggagatggaactgaagctataacatctggagaattgaaaagcgcattaccgagaataatgatgggaatgataatagcgctcactatttccaaaccagttgagattaggatgtttaagacagagatagatattaagttacatgaaaagcaaattgaacaaaaacagatttatataaataaaattgactcaacttacaggaacgaaataaatttaaagaaaaacgaaataaaaaaatttgaaacaagaataattcaattacaaaaaatttctgacactttaaaaacaaggattgattttcaaactgctaatggtggttgtaaagataagtgtgaagaatataaaagtcaactaaaaaacaacaatattgaaatttcaagacttgaagataatgtagattacaaaagagtcaatagtgaaattctcgttttagaaaaagaaagagagaaaagaataaaagagggagaaaaagttgcaaatggattagatggtttgttagagcgaatcaaaatagctcatgaagtagcgggtttttggatctctcttttcataacattattatttatggcaattgagttaacccctatttttttcaaattaatgcttaccaaaactacttatgattatctcgctgaaaacagagatgaattacttaaagcagagtatggaattgaagtgcaatatgataaatacaaagacaaagagggagtagaaagacatttaaccataaatcacgaagccgaacgcatcatctttgaaaagaagatggtcactaatatccaaaaagagttgaccaaatatgctgtgactaagtacaaagaacgtgagatgaaaaaaatagatgataatcttgatgattatatcaaaggtattaatgagtaatgaataaaaaacttagtgacatacgactcttccttttcacttgttcaggcgaagacaactacatcttaaaaagatgcaattggggcatacagaaacggtttgcacttattggtttttttgtattgttaatttttattggttgtttttttagtgctacattattctgtatttcactatttcaacgggcatctcttctaagtgtatttatcgggatattttggggagctatggtggtgaatatgtatttacttctacttcataccatttcacctgctattataccgtctgaatcaaaaaagaaaagaaataaaaaagcggtagttgagaacactgatatacaaaaccgatttttaactttttctatgtttttacgcattagttttatgatgctcttggccattatcattgcacaacccctaaattatgatctattgggttcaagtgtaaaaacagagattgatcaacataaaattgaagaaagcattaaactttatatagtaaccaataaacatttaattgaatctgaattagaaaatcaaaaggttttaaatcaaaagattactaataagctcaatgctgatgatatttccttgatttctgttaatttacaattaattaagaataaaattaatcgtgattcagtatttgtaatagatgccactaaaaaactaaatcagttaaagaaaatagacaatcgcttgattttgtcaagttcggagaaactaaaaaaaaatttcatcattaatgatttagaaaggcaattaaatggtgagatagctactgatattagttttgtagctacattaaattctatttcaatatctggatattttaataatgatttcaaaaacttcaaatctaaaatgatatcattaatgtatgagaaaataagtaattataataaattaaacgaactactcaataaaagtaatttctatgtgaaaaccatacaaattttattagttgaaaatccattgtcatggtttattactagtatagtttgtttagtttttttattacctatctactttaaatacaaagctcgggatatttcaacgaaaatattccaattagaaaatcataaaccggagattattaaattaagaaatgaactcatcaacacgacagatttcaattggctggaaaataaaattatatcaatcaatataaatcaaattaaaacctctgactattacttcatgaggatgctgattgaacacaaaacaattcttattgaatataaccaaacaaaagataaattctccaaaatactcactgacaatgttaaacaatataataagtcagttagggataaattagatccactattgaacaaattaaaaagtataaacctaaagcgctatcttgtatatcaggaattggttaatacagaattaaaagatgaaatcattgtcaaatatgaacattggcttgatatgccttttagaactataagagaaaaaaaactacccataatcaatacagaggttggtctactagattttgtatacaataatcataaagaaggaacagaagaaatctagatgaatgaaaaaattgtaaatataatcaatgaggaacctttcgttggagaggatggttttgactatataaaagttacgaaagagattttaacgcctcgtaaaacgtatttaaaaggaacattatcaggtaagtatagaggtaataaaattcctgatgatagtgataaatccagtttatttgattttgaaatctatgaagcagaagttaattgtaattcagttgaagattttagtaaaaataaaccattttctttccctcatgattttaaaaatattaccaatgctaagaaaataaaagttagtgttttccctaaggaaaaattacctcaaattttacctgttattatctcagccaataacaaaacatttggtataaatgttttagaacctcaactgtatgagtttactattaatcgtaaagagcatcaaatagacggaaatgaagtatttggaacctttaatgcatatattacgggttatgtttttgattatgaaagagatgaagttgaagaaataaataaggttgtacttatagatgtaatagatgttgatgacaatgaagatgatgaagaagatggtagaattaaaaaaccatgcaaatctaatggtataaaaactggtgaatttgaagaaaaggagtgttataaacgctatgaatatttttgcaagcatcatccagacactgtttgggggccatgggaaaaaataccatgtggtacatcaacagaaaaaggatgcttgtctatttttggttatttgttttctatagtattaatagtgttttttatttattatgcttttcctgtaataggtattataattctaatttactgtataacttatttaattaaccgattttctagtgtctttaggtggatgtttgggatattaggaataatattctggttgttttttattgtttcaatttttaaaacatgttctttggttcatattccaaatattattccaaagccaaagatagaagatagtcgtgaaaatgtagtatatgaacctatcgacaacgattcgacaactataagtattggtaatgactcattggtaaaaaggtttagaaaatggcaagattatgaaggtaatatttatcaaggatattatactttgaaattatttgaaattaagcaatcatcaaggtttaaaaatagtattaacttgacttcctcaactccaagaaattatgatcaaatggtgtatatgttaaaagggaatgatgagtctaaattggatggtttgtatcgaatgtttgatagtattagaaaaaagaacaaattaaatgacattaaattttcagaaatgattgtaagttgtattcaagatataccttatactttgattcttgaaaatgaatgtaatgcgcaattatacaacgataagtttattagagattatctcatgcaaggtaataaatgttcaggatatcaaaagtttggaattaattcacccttagaatttgtttatactctagaaggagattgtgacacaagagcattattattatttactattttaagtcattacaagtatgatgttgctctaatgagtagtgaattttatggtcattctatgatagctataaatttgccattttcaggtataaattatagcaatcaaaataaaaaatatgtaatgtgggagaccacagcgcctgatatcccagcgggtaggattgggaaaagctacatgaatttaaattattggagaatttcacttaaatcaaattaatatggataaacagagtatctttttctcaatcttggcagtaattattgctacgattattttatttgtaggtctttcctattatacaagatctagaaaaatgcaaatagtagatgaaatgcaattaaataaaagttatttgatttggttgttaggaataattttacctttttttgtttattgtggtgcatcggttcaagccagtgaaacaacaattgagacaatcatacatgctaaagaaataaatgatactttcttccaaattttatatcgtttagttatctactttggtttagcaatagttttagcagtatcaagtaattatctaatttttaaattatttggaatcattattggagggaggtctttgatagtggagttagaaaattcaaatacaagtttgtttttagttctaatgctaattaatttgtttttttcgttttctattattaacccatttaaggacttgttgaattggtatttacctcaaatagcgacaaactttatttattaaatgaaaaaatctatttcacttttatttttgtttttatcttcattgttaatgagccaaactaaagatacattaagtgtgggtatatatgtagataatatttatgatgttgattatattaaatcatcatttgagtctatattttatgtttggataaaatccgaggaagaactgataaaagaggatttagtttatgatgtctcaaatttcttggatgttgacagaatgattgatttcaagcttttactccaggaacataatcgattaggttctaaacatcattatttattaaagattcaagctaaaattttgaccaaaatggatgtttcaaaatttccttttgacaaacaatgtttggattattatatcgaattaaatacacattacaaaggtgataagatcattcaattagatacaaagaattcattgataagacctaattttattgataaatgggaggttggtattccccaaatttctgtaaagtctaaagaatggaattctgattttggtattataaattctgataaaaaaaacgttttagatgcaataaacattcaagtccctttggaaagagattgttggaatatttattggaaaatgttcattgttctatttatttctttttttctcacagtcatgagtgtctttttacctaataaattgagtgaagaaaagcttgcattgattgtaggttctttatttacagcaatcggaaacaaatatattactgaatcttacctgccaatttctgattcatttaatttatctgataaaatacatttagtgacattcatttttattgctctattttcagtttatgcaatatcagaacaacgatttaaacttaaagattctttgaaaattgattttattgtatttttaatttctactctaatctattttggaattgttgtatcaattacgatttcatatttgaattaaaattttaactaagaattaaaaaataataaatttaattcattgaatgagcaacatattttacataaattataaaaaaattgaaaatgaaaaatctaacaattaaagttttaaaatttattttagaaatatcatatgtttttacattgtcaacgattctcaaagaaattataaattcatatggtttaagtgaaaaagtagaattttctttaatcatcttattatggatacctttattgtttgaatggttgagaaaattaaaggttggagataatcgaccaaaattcgaaccatatatttatcttccaataatttttatcttttttttgatagcaacatatattgtaactatcatttagatgtcaaaatttgtttaatattcaattgggatataaaaaaatatcattttacgtaaatccgtaaaattattctcacagggcttcctaagtttggttaaccttaaaaaccaacactatggaattacaagtacagttacgccaattagccgagaagattcagcaactcaaggatcgaattgaaacggaggaatctaccaagcatgcttttgtattgccttttattaatgcgttgggctatgatacgttcaatcctttggaggtggtacccgagtatgtagccgatttgggcatcaaaaaaggggagaaggtggattatgccattatgcaggaaggagatcccatcctgattatcgaatgcaaacattggaacgagaagctttcggtgcatgggtcgcagttgtttcggtattttcatgtttcaaaaacccgttttgcgttgctcaccaatgggattcactatcagtttttcaccgacttggacgaaaaaaataaaatggatgaacgtccttttttggagtttgacatcacccatctgcgggattcattgatccatgagattgggaagtttcataagtccagttttgatgtgaattcaattttggacaatgccagttcattgaagtatattaaagaaatccgtaagcaaattgaggccgaagtggaaagtccaagtccagagtttgtgcgactttttgcctctcgcattcacaccggtcgaatgacggaaaaggtaatggaggagtttaaagagttggttcaaaaggcctttggtcaaatgattggtgagcgtataaatgagcgattgcagtcggcgttgaaccaggaagtaattttacaggaaaaggaccaattggacgaacccgaagtctccaaagtggcaaccaccgatgaggagttggaaggctatcgaattgttgtagccattttacgaagaaagctgcctatttctagaatagttcatcgcgatacccaatcgtattttgggattttattggacgacaataaccgaaaaccaatatgtcgtttgcattttaacgggggtaaaaaatacatcggactctttgataccgatcgcaatgaacaacggcatttgattcaatctgtagaggatatttatcagtttgaagagttgttgttggagacgattaaactgtatgaataattcaaataacaattaaagcccggccatcgccgggtttttgtataaaaaaagtcccaccgaagcaggactaaagattttcatctacggcatatagccttattgtgataagattaaagattggaaattttaatctgatacaaacttagaaaaaagatttttaattggtttacggaaatctgtaaaaaggcaagaaattttctttttatctttaaaatttaattgattgtatatggcacgtatattaggtttagatttaggaacgaatagtattgggtgggcattaatagatgatgttcaagagaaaatagtcggaatgggaagtcgaatattcccaatgggtgttgagaatttaggtgatggagaaggtgagctgtctaaaaatgcctcaagaactggggctcgtggtattcgacgtcagtttttcagacgccgattacgtaaaaaagtacttttgaaagcgctttccgaacatagcatgtgtccgttgaaagctcaagattttgaaacgtggaagcaaacgaaaacatttcccgaagccaaattagcagcatggtttgcacttaatccctatgaacttagaaatcgagcggttaatgaacccattgctttagaggagttagggcgattgctttatcatatcattcaaagacgtggttttttaagtaacagtcggaaaggcggcacagatgatggagctatatttaaaggaaatttgaaggaaggaaagattggtattactgcaactcaagaaaaattgcaagagaccactttgggttcttacctttattccatctatcctaaggaaaatcaaccctttcaacaggggttggagcgcattcgaaaccgctatacaacacggaaaatgtatgttgatgagtttgagttgatttgggataaacaagctcaatatcataaagcacttaatcaagaattaaaaactctttttggtggtagaaaattggatggctatcaagaggatgggattttatttcaccagcgtcctttgcgttcccaaaaacatttagttgggaactgttcatttgaacctactaaaaccaaatgtcctttgagtgctattccttttgaagagttccgtgtatggcaatgggtcaacacagtagaatataatggaaaaaagatcacgttagaggaaaaagagaaattggccatgtttctatttaccaatgaaaaacctgattttaaaagattgcgaaaggttattggtaaagaaagtgctgagtacaagttcaattataaagatgatgacaaaattgtcggggcttacaccatatcccatttgtccaataaaaagttttttggttcaacgtggttctcctttaccgataaacaaaaagaagacatctggcatgttttatatttttttgatagtaaatcgaatttgaaagaatatgccctaaagaactgggccttttctgaagcgcaggcagaagatattgcaaaattcaatctcaaagacggctattcaagtttgagtagaaaggccattacgaatattctcccctttttaaaaatgggctttacgtatgatgttgctgttgtaatgggtggaataaggaatgtatttggagaacaatagggaacactaacagcggagaaacgagattatttaattgataacgttgaaggaattgttcgatcaaaaacgaaaggcggttttattgaaataatcaagagtattcttcgggatgactatggtatatcagatcatcaaatgcgaaagttgtatcatcactccgctaccattgaagtttcagaggtgttggatcgattaccagttaacaaagaggccgacaaagaattacaagctttacgaaaccctattgttacaacggcactttttgaactacggaaactcgtaaatgaattattggatttgtatggaagtattgacgagataaaagttgaaatggcaagggacttaaaagtgtccaaaatgcaacgcaacaagattcgacgggaacaaaaacgtttggagaaggaaaatgatcgggttaaagctcgcttgatagaagaggggcagcgagtgactcatgattctattttattatataagttgtgggaggaatgtaaacatacgtgtccctatactggtaaaacaatttcgatacagcaattgttttcaggagaagttcagattgagcatatacacccatggagtcgttctttgaatgatagttttgccaataaaacactttgttatgccgatgaaaatagacgtaaaggcgataagacaccatatgaattttacggttccgatgaagccaattggtcagctattaaagagcgagccttaaagttgttttcggacacaaaggagtatccaaacgcgtatcaaaagtttaaacgatttgtgcaacaaaagtttgatgatgatttttcaactagacaattgaacgatacccgatttatcagtaaagaagccaagaactatttattgaaaatatgtaaaaatgtccaagtttcaccgggtcaagcgacttctaatctacgtcaaaagtggggcatgaataatatattaaatgatgccaatgagaaaacacgtgaagatcatcggcaccatgctattgacgctcttgtgatggcttgtacaaaagtgtcgtatgtgcaagaattgtcacgatggaatcggtataatcgcaatacagaattgaaacaatttccattaccatgggaatcatttcgtagagatgcagaagttgccgtagagcgcatacttgtttcccacaagcgtgtagctaatgacataacagttcgcacaaaaacagttgagaaaaacggaaagaaatatacaaatttaggagttgccgctcgaggtcaattgcataaggaaacggtttatggaaaacgaactgttcatggtgaagaagcattccatgttcgtaaatccatagattcaattgagacagaaaagcaattagaaaaagttgtggatgaagccattaaaaatggtattcgtaagcgtgtaatggaattaggtggatttgttaagggaaatcttcctgcgaatacattttttatagttgacgaaaatggaattaaacagccacaattgtttttacccaataaaaatggagagccagtacctattttgaaggtaaggatgcgcgaaaacattggaggagccgaacaattaaaggacaatgtgaatcaatgggtgaatcctagaaataaccatcatgtattaatctacaaaaatgaaaaagggaatatgaaagaagacgttgttaccttttggactgttgtcgaacgtaaacgtacagggcaaccggtttatcaactacctcctgatggtaaagaaatagtgactacactgcatatcaatgatatgtttttgttgggattggataaaaatcaagttgattggcaaagtcttgattatgatattcttaaagagcatctctacagggttcaaaagttgacatctggagattatttttttagaaaacatttgtcttcaacagtgactgataatcaattctatcagatcagaggatttggagatgggaaaacaggttggtttacatttaagccattaaaggtaaaaatttcagtatctgggcaaattcaaaagttgtaactcaatacgaattggtgtatatttacaccactaaatacaaaggttatggcacgacaaactatcactttagccaatcaaaacgatgaatggttaaaacagcaagtggctaaagaagaatttactagtaaaagtgaagcggtaaattttttaattcaacaggccagaaagcaagaagaataccatgaatttgtgcgtatgaaaattgaattgggtgaaaacagtggtattgctaaaaagcaaaccaaagatgatatgctcgctgaatttaaaaagcgtttgaatgtataactatgatttgagcgagcttgcgaaacaggatttgttacgcatttatgagtatggtatcaatcagtttggtgtggatcaagcggataagtatttcgaattgatgcatgactgcttcagtaagattgccaaaaatccttatatgtttcctattgtcccaacaataaaatccaattatcataaatgtgtttgtggtgtagaagctatttattttaaagttaagacggatggagtgctcatcgttacgattattggaaggcaagattttgaaatgcagcatttagttcattgacataaaatttccaaagtttttaacagctcaaaccacaacggacttttttacatagctaagtccgttgtggtttacaaacacccagtgtttattttttagcggagtgtttgtgaattcatttacaaacaccaagtgttaatttttagcggagtgtttgtgaattcattagattaaagattggaaacaacgatattgaacatctaaacaatgctaaaacaattatagttgtggtttacaaacacccagtgttaattttttagcggagtgtttgtgaatatatttgattaaccccgaagcttcgggagtaaacaacgatattcgtaaaaaagtgaaatacattttcatgtctgttgtggtttacaaacacccagtgttaattttttagcggagtgtttgtgaattcatttgattaaagattggaaacaacgatatttttttccgttaaataaggaattatgaggacgttgtggtttacaaacacccagtgttaatttttatcggagtgtttgtgaattcattagattaaagattggaaacaacgatattggcgatgtaaaagaattgcttggggaaaaggttgtggtttacaaacacccagtgttaattttttagcggagtgtttgtgaattcatttgattaaagattggaaacaacgatattcacgggggatattgcacgcttaggtagggagttgtggtttgattaaagattggaaacaacgatattttttcccgttaaataaggaattaagaggacgttgtggtttacaaacacccagtgttaattttttagcggagtgtttgtgaattcatttacaaacaccaagtgttaatttttatcggagtgtttgtgaattcattagattaaagattggaaacaacgatattttttcccgttaaataaggaattaagaggacgttgtggtttacaaacacccagtgttaattttttagcggagtgtttgtgaattcatttgattaaagattggaaacaacgatattctaatgaggattacattaaaactcagttaggttgtggtttgattaaagattggaaacaacgatatttaaaaacaaaaaataacaaattatttgtatgttgtggtttgattaaagattggaaacaacgatatttacctgcctgcgtttataagtacgatattggttgtggtttgattaaagattggaaacaacgatattctgacctttcaatcccatacggcgggtcaagttgtggtttgattaaagattggaaacaacgatatttatgcaccttttgggagggcttaggaaagcgttgtggtttgattaaagattggaaacaacgatattgaaagcagcatgaattattaaccaaaacctgttgtggtttgattaaagattggaaacaacgatattaggattgcgacgcgtaacacaagcttctcggttgtggtttgattaaagattggaaacaacgatattaacgggtaggcattggagcgatgacctaaagttgtggtttgattaaagattggaaacaacgatattactctaaatttaaactatatgccacagaaggttgtggtttgattaaagattggaaacaacgatatttctatccgaaaagcggatggtgacattccgttgtggtttgattaaagattggaaacaacgatatttgaataagaagtttttgctttataccctctgttgtggtttgattaaagattggaaacaacgatattaatcaatgatagaacgtgtaaaagaaactagttgtggtttgattaaagattggaaacaacgatattcggttgaaatattgaaatgggaaaacccgcgttgtggtttgattaaagattggaaacaacgatattttgaaaaaaaatattagggtaaatataatcgttgtggtttgattaaagattggaaacaacgatattaccgccgcgcttagcggttgtatgtcaggaaattagtagtgaatatcgttttaaaaaaatgcttctttacggacgtgataaacccgtattggagcattttttcatttagaatagttccaactgcgttggttgcggtgctttggggacttccgctttgccccaaaagttaaggatgtttccaaactgcttgtccgtgattcgtaataaactcacttttcctagtgggggcaacaaaagatgagtccgattttcatgtacatcggcactttcactactcgcacaatgccgcacataaaccgaatactgcatcatggtaaatccatcttttagcaggtttttccgaaaaagcgatgcatttctacgatcttttttcgtctccgttggtaaatcaaaaaaaacaaacagccacatgattcggtaaccattcagttccataacttggggtagtttatctttttccgctctcccgtaaaacattgttgtaaggaactggttgtacgttggagcccgaccatcaatggacttttctcctccccaaaatagacggttcgtgtcaacacttgtaaaagttccgatttgatggttgtcgttagttcttcctcggaaaatcgttgggtaagttcccacactttttcatcaaccaagggacgaaaaggttccatgatgtcatcggccaaggcaaaagcattgtatttacttttgtgatgaattccgagggtgttcaataaaccgctcccagctaatgaacgcgctgtagctgctcgaagtagggcatacccatagtttaaaaagttattgggatacttgccaaaacgttcgcgtttaaattgctgttcaaagaatgatttccaataccaattggccgcaaccccttccatgttggtcgtatcaccgcttaacactttacttgctaaaaaagaaaaggtgtttttatctcccgttactttttcaaggagtattccttgattggtaattttttcaacgatggtttgttgccatagttgttttttcaagggcgcacttgccttaatttggtgtttgaagatttcttgttgaatatgatggctgttgaggttcataaacaagccattgggtaagtgatttttagggtggcaaataataagtgctgcattgtgttccaccaaaaaattcattgccgaaatgctaatatagatttcagggtgatcaatgacgacaaagccaatgtcctctatgggaacagttgcttcacggtgctccgtttttataactaattgctggtgttgcgttgtaatggaagctttgttttcgagtaggagggtacgttttatcattttttagttaaaataaaagagaataatttgtagtattttacggaaatccgtaatggtatacttttgatttccactatttttgaggcgtaaatttgtctccatgccgtatcgttttcttttcatcatcctgtttgcgtttcagggactaattgcccaggttcaggtagttagttggaatattgccaattttggagcttcaaagaccaaagaggagattgcctttttggcccaatacttacgaacttatgatattgtagcgcttcaagaagtagtagctggaccaggaggggctcaacaggtggctgctttggccgatgcgttgaatcgaaaagggagtcaatgggattatgtggtgagtgctcccacggtaagcagcgcctacaagaccgaacggtatgcctatttatggaaaccttcgcgcgtaaaattaatcgggaagccttggttggaggctacttgggcgcaagctattgatcgagagccgtattatgctacctttcaatttgaagtgcacaactttacgttggtgaattttcatgccattacagcaagtaagcagcctgaaagagaaattaagtattttaagtttttaccgacccaatatcctcaactacgtttgttatttttgggggatttcaattgctctgattctaatactgtttttaatcctttacgacaacaggggtatttacccgcatttactgcacaaaaaacctcattgaaaaagagctgcgctgatggagattgtctttcaaagcccttcgataatatttggtatccaaaagattttgttcggatagtcaaccctacggttttacacttttatcggttgttttcagactttagtgcggctcgtgcattaagcgatcatgttccaattcttgttactcttgaatttttataaggtatgatacggtatatttatacaatacttctaattctgagttttttagcctgtaaaagagaggctagtttacctccgcaacctcttttatccaaaccccaagaggagaagatggtcgatacttcggtcacggatattgatactgtttatccagagacaaatgaaaaatttgaatatcgactaacacgaaacgacggcacgtatcaatacgcgtataccgttgagggggaagatgaagcaggaactaaagtttcgggtgcagtgcaagtggcgggtaaatatggcgaagggaagttgacacatcctcaattggggactattggaataaaaacagaatggatagggaaaggagctttattagctactgataccctaggaaatgcgtataaactcagtgtgaagtaaaatgaaggtattattggtacttgtttttgtgttgtttcttccttcctcccaaaagaatgatgtttatgtttgtgttagtaaaacggcgcataagtatcattttacgaaatcctgtcgaggattgcgagcttgtacgcatgaaatagtaaaaaaaagtttgaaagaagctcaaggtttaggctataccttgtgtggatatgaggattaggatacgatgaaattcgtatttgaaagcatagaaagagcaattatttttcaaaaaaaatatgatgtcaaaatttgttacaattcttggtttgattttgttttctgtttcggggtatggtcacgactacgatcgattgttgcctacggctacgttgaccgggggcggtacggtttgtcaaaatagtacaggccctacacttacctttacagggagtgggggtgtagctccttatacatttacatacaccattaatggtggtgccccacaaacgttgacaactaccactggaaacacagcatcattggtagctcctaccacaacctcaggtacatttacctatcaattggtttcggtgagtgatagctcaaatccaacgcaatcggcttcagtttcggggagtgttacggttacgattcttccacagcctgatgccaccatgggcggaacgggtgctggaacaacatttaatggaacacctgtatttagagtttgtacaaatgcgacttctacttttaactttacaaatacatcttcttcagtagctacaaatcaaaactatacaattaattggggtgatggttctcctaattttattgggaattcatggactacgctaactcatgtatattcagttggtctttggaatatgacttatactattgtaggttcaaatggatgtatcgttaacaaaaactatatagtgtttgttggttctaatcctgctgtagccttgggaaatcctggaaatacggatatatgttcttctcaaacattatcttttcctataactggaactagtaataatccagcaggaacactttatacggtaacatttaatgatggatctaatccacaagtatttaatcatcctcctccagctagtgttacccatacatttacaagttcctcatgtaacactacaagttctgatggtagtaattcatttccaaactcatttaaagcaaatattgttgctaccaacccatgtggtacttcctccgtgagtgttgttcctatatatgttagtgcacaacccatagcagattttactgttccaacaaatccatgtattggaaatcaagtttgttttacaaatacctctcaggggaatcaagtcattggtacaacttgctctaatccaaatattatttggtcagtttccccctctaccggttttaatttagtgggaggaagtttactaggtaacgattttggttcaactgatgcaagtttatggttaacaggatccaatcaactttgtttaaactttactgttcccggggtttataccataactttaaaaacgggtaatcgttgcggcattgataccgaagtgaaaacaatctgtgtggggagtccgttgtcgcctcagttttctttgtctactactgagggatgtgctccgctcgctgtcacggctaccaatacgaccaatgtagccaatcaatgttcgacccctacttatttgtggcaagttacccattctcctaacttttgtggctctagtattcccccgatacccaatcaaacttctgccaatgcaacctataactttaccgagtcggggacttatacgatacggctttcggttaccaattcctgtggaactgctgtaacaactcaaaccgttattgtgaaaaagcctccaacggtttctattagtcctatttctaattcttgtggcacagccaatatcactcctgtggggtcggttactaattgcgcaccttcaggcggtacgctaacttatgcgtggagttttcctgggggtacaccttcatcgtcaacgtctctcaatcctggaaccatttcttatcctacaggtggcccttatacggtgtcttttacggctaccaacgaatgtggtacttctacgacggctacacagagttttacggttaatgtagctcctacagtaaccaatactgtaaccagtcaaacgatttgttcgggtacagcaacggctcctattgctttaaccgctaatccttcgggaactacatttacttggagcgctacggctacttctggtgtaactggatttacggcttcggggactggtgcaacgataccgccacaaacccttacgacaacaagcacaaatccgggaactgttacttatgttgtaacgcctaccttttctaactgtgtaggggcaacttttacttatacggttactgtaaatcccgctcccttaataactgcacaacccgtatcgagttcggtatgtttgggaggaaccgttttgccattgaccgttagtttgaatagtgcaacggttacccccacgtatcaatggtattccaatacgaccaacagtacaattggtggggtaattatttctggcgctaccaatgctacttacactccacctaccaatacggtaggcactttatactattattgtttgattagtttggcctcaaatggatgttcgggattaacctcggcggttgccgctgtaacggtcagtcccttacctacgatcacttcgccacctttgccaacgcaaaccgtatgtgtgggcgctacggtgagtccgttttcagttgcatattcaggtggtttagggaatgcaagctatcagtggtttgtaaatacaaccaatagtacagttggcggaacacctttaggaagtaattcatccacatttacgcctccagtatttacaaacacgggaaccttttactattatgctgtagtaagtttgagtggtagtggttgcgggacagttacaagcactgttgcagaggtcaatgtggttgctgacccaatcgttaccactcaacctctacctagtcaaatccaatgtcaaaatacagctcctactatattgagtgttgatgcaagtggaggaactggtgtctttacctatcagtggtttagcaatacttcgaatagcaatacaggtggtgttttactatctggtcaaacaaatgcaacattcaacccacctacaacagcaattggaacgttatattactattgtgttataagtcagtcatctgtgggatgtagtgtcacaagtgctactgccgcagtaacagtggttccagctccctctataactacacagccccaatcaatcacggtttgtgagggttctaccatcgctccattgacagttgccttcacgaatggaacgggaacaccatcctaccaatggtttgattcaaatggtccaatcacaggggcaacctcagctagttatttgcctagctcaacccaatcgggttcttattattgtgtgattacctttacctcaggtgggtgtactagtgttacctctgccactgctgtggttaccattaatcctctaccaacaattactagtcagccgctcagcacgcaaagcatttgtgttggaggcataatcccagcattaaccgtttcctattcaggcggtgtgggtacacccatatatcaatggtacagtaatactactaattctactacaggtggcactcctgttggtacaaatgcagccagttttacccctgctgcttttaccaatacgggcactttttattattatgtcattataaccctcaatggtgcaggatgtggtgtaattaccagcgcaattgctgaggttgacgttgtgcctgatccaacgattaccacacaaccattgctcacgcaaaccgtatgtcaaaacacgccttccactactttagctgtacaagtcattggtggggtgggtactagttattcttatcaatggtatgtgtcaccaactaacagtaccactgctggggtgataattgcaggggagaccaatgcttcctttacaccacctactcaagtagcgggtactttttattactattgtattgttactcaaagtagtgggaatggttgtgccgtaaccagttcaatagcgactgttattgtcaatttagcccctgattttgttactcaaccggtaaacagtgaagtttgtttggggcaaatcccttcattactttcctttactctcgtgaatggagtagggacacccgattaccaatggtattcgaatactatcgattccactgtgggcggtactccaataaatggtgccacttcggctacctatgcgcctccttcaacaatcgcgggaactacctactattattgtattgtctcctttccatcgattagtggcggttgttccgttatctcttcgaataccgctgaagtgattatccaaccaaatcccctaattgctcctgaaactactactatttgtagtggagctactttttcaataacacctgatccaacaggaagtaatcttattccaatcgggacaacttatacctggggagtacctactgtaatgccggcaggctcggtcgtaggtgctactgctgtacttacaccccaacccaatatcagtcaaacgttaatcaatacgacgtcaagtcctgccactgtaacctatacagtgacgcctacatcgggtgtttgtgtaggtccttcatttactgtaaccgttattgtcaatccggcgattaatcccaatgtggtggttgccaattcttcttgttttggtgttaactctgcttcgatagttacggccatcaccggaggaatcccttttccatcgggggatccctatcagataaattggacaggaccaaatgggtttagtgctacaagttcctcgatttctaatttagcgcct

SEQ ID NO: 3349 - DNA, 16946 bp, synthetic construct
  misc_feature 1..16946: note = Synthetic
  source 1..16946: mol_type = other DNA
ttagagaaaaaacgtttaaaaaattggatatctaaagattctacgcatacttataaagcttctaaaaatggtttttggtatcgatatgtagttaaagatactgtaagtacagtactagcaaaagctaccaacacggtgttgttatcgtatgatatttccgatataaacggtcatataatatatcaaaagcaagagcgaacttataaggtagatcaagaagattttattcctgcattacaagacggaataaagttgatgaaaaagggagaaattattacatttgtaattccatcatatagggcttttggcgttatcggcgatggaaaaaaaataatggtcaatcaacctatacaaagtaccgtaacattaattgaaattaaataacaaatagataaaaatgaaattaattaaaattttagcagcaacagctgtaacactttcagttgtatcatgtggaaatagtgggtttaaaaccaaaagttcattggctacagaggtagattctgtaagctatagtttagggttagacatggcaaacaaaataaaagtgaattttgaagatttagatcaagatttatttgttcaaggatttaaaaatggagtagattctaccaatttattagtagattctaaagagattaacaatattttaagatcattttttcagaaaaaacaagaagagaaaatgaaagagcaacaagcggctcaggctaaaaaagcaataactgaatttggagactacaaaaaagaaggtgaaaattttttagctgaaaataaaacaaaagaaggtgtaaaaacaactgctacaggtttacaatacgttgttttaaaaccaggtaaaggtgatgctccaaaagtaagctcacgtgtaaaagttcattatcacggaacattaaccgatggaactgttttcgatagctctgttgatagaggagaaccaacagaatttggcgtagggcaggttattaaaggttggacagaaggtttacagttaatgaagccaggagcaaagtataagttctttatcccacaagatttagcctacggagcacagcaaagaggtgaaaaaattaagcctttttcagcattaatttttgaagtagaattacttgaagtaaagtaattacaatgtataaataactagaaatcaattaggttagtactcgttactaacctaattgattgtttataagcatatctaaaataataaaaaatgaaaatttataaaattttaatagcagtagtagtgttgttttcggcttgtaaatcagttaaataccctgatttagaaaacggcttgtatgccgatatacaaaccaatcgtggtgatattttaataaaactacacgcaaaagaagtgccaatgacggtggctaattttgtgtcgttagcagaaggagacaaccctaaaatagccgattctctaaaaggaaaaccgtattataacacgactaaattccatagagtaattaaagattttatggtgcaaggaggtgatattacaggtacaggtcgtggaaatgcagggtataagtttgcagatgaatttccgatggatgaaaaaggaaaattactttataagcacgatgctcctggagttttatcaatggcaaattcagggaaagccaccaattctagtcaattttttatcacccataaagcaacgccttggttagatggtaaacattcaatttttggtaaggttattataggacagcatatcgtagatactattaagcaaaatgatgttattaatcatttagaaattatcagaataggtaaagatgctaaaaaatttaaagcagccactgtttttgaatatgaattaaccaatgttgtaaaaaaagctgctgaacgtaaaaaagctgtagccgaattaaaacgtaaatttcaagaagaaaaaggaattagcaaggctgttaaaacaaattcaggcttaaaaatagcaaccataaaaaaaggaacaggtaaaaaagtaaacccagcgatttcaacaacggttcattacacgttatttttaaccgatggaacaaaaatagattcaagtgtagataaaaacaagccttttacctttacacttaacgatgcaaacatgcctttaatagcaggttggaaagaaggtgtgcaaaccatgcaagaaggtgataaatcagtgttttttattccttattatttaggatatggcgaaaattctttaggaccaatccctgcaaaatctgatttaatttttgaaattgaagtattaaaagtagggaaataattagcaaaattacttatggaagatatcatacaaaaagaccaggcgtttttaatctatttaaataatttaggaagcgaacaatgggattggctttggctagcgattaccaatcaatttaattggattcctttatttgcgtttttaatatttttaatttttaaacacctaggctggaaaaaagccgcatttaccttggtgtttatcgctgttttaattactttttcagaccaatttacgaacctaattagaggtatttttgaaaggttgcgcccaaataataatccagcaatacaagattctttaagaaggttgataaacccacagagttatagttttacctctggtcatgcaaccacttcaacggttgttactgtttttttaatcatgcttttaagaaaatatgtgccagcgattaaatatttagcggtatttccattgatttttgcatacagcaggttgtatttaggcgtacattttccgattgatatattttgtggctttataaacgggatgattatcggctttgtgtcggcaaaattatatcagtttttatcaaataaaatatttaaggaattataaggttacgtacaatattgtagcgacgcgattaatggcgtttttactatgctggtaagaaatatcagaaaataaaaagactatccatttttaagtaaatgtggtagtttttttttgaagctatttcccgctttccgcactcgctttttttatttttttgaagaaaaaaaacaaaaaagagctcaaacaattgcttcaataggggctaggaatttgtactatattttaagctatgagattgtttaagttttagtcaataaaattttattacaaaaattcactaataatctgtcagttcgagtgatttttttccttcaaaaaaattgtatcgagaactttttagcatcaaaatcaatcaaaataaaattctcgatacaattttaattccttctagtcattaaaatcactcgaattgacaaaatggtggaaaatcaagaggagaaactgacataaaaatccctttgacggattctatttttaagttataaaacgtttttaaatgaaatttaaacaggttctaataaataatctaaaaacttaaaataaaaaaagtcctaccgaagcaggactcaagattttcatctacggcatatagccttattgtgataagattaaaagattagagtaattttttcacatctcaaatatagtaaaattttgctgattatcagaataatatattaatttagagcaaataataattgctatattatgtcaaaaatacttggattagatttaggaacaaactctattggttgggcgttggttcaaaataatatcattttaggaatgggaagtagaattttccccgaggatgttgtaaacttaggcgaaggagaaggaagagaagtttcaaaaaatgctagtagaacagaagcgagaggggttagaaggcaaatttttcgaagaagattgcgaaaacgatatttattaaaagaattggcaaagcataatttctgtccaatttctgccgatttaattaaagattggaacggtacagaaattttcaaaaatcaagaattacaagattggtttaaattaaatccgtacgaattaagagcaaaagcaattcatcaagaaatatctttagtagaaattggacgtattttttatcatataattcaacgtagaggttttttaagtaacagcagaagtgccggtgcagatgtcaaagaaacaagtacgctttttacaggtgatgccaaaattggtaaaataggaattagtagcacgctcgaaaatatcaaaaatattggaaatagtgaagaaaataaaacactaggttcttacttaaattcaatacaacccaaagaaaatgaaccttattccgaatgtttagaacgcataagaaatagatatacaacccgacaaatgtatattgatgaatttgaattaatttgggaatttcaaaaaatatatcattcagaattaacagaaaatttaaaatcgttatttggtggaagaaaaaaagacggctataaagatgacggcgttttatttcatcaaagatctttacgttctcaaaaacatttagtgggttattgtgcttttgaacccaaaaaaacaaaatgtaaaattagtgcgattcctttttaattatttagaatttatcaatgggtaaacacgctttcttatgattttaacggcgaaaaacaagaagttgcatccgaagaaaaagaaaaaattatacaacttttattatctaaagaaaaagttgcctttaaagcaataagaaaagttattggcaaatcagaaagtaattatcaatttaattataaggataaagatactattgtaggaacgcacacgataagccaattatcaaacaaaaagttttttggcaaacagtggtttagtttttcagaagaagaacaagaaaatatttggcacgttttatctttttttgacgatagggataaattaaaagaatatgccttaaaaaattggaatttcgatgataaaaaagcaacagaaatttctaaatttaatttaaaagatggctattcaaatttaagtagaaaagcaatcaatactattttgccttttttaaaacaaggttttatgtatgatgttgccgtaggattggcaggggtaaaaaatgtattatcaaaagaaaataattggtcagaaaatgagcaatttgtattagataatgttcctgaaatagtgcgttcaaacataaaaggcggctatattgaaccgcttaaaaatatgctgaaaaatgaatttaattgtacagataaacaattagaaaaattatatcatcatagtagtgctattgaaacgcaaataattttagacaaacttcctgtaaatataaatgccgatagagaaattcaaaaaattaaaaatcctgtggtaattaccgctttgtttgaaatacgaaagctcgtaaatcaaattataactacttacggaaaaccaaccgaaataaaagtagaattagcgcgtgatttaaaagcgtcaaaaacaaaccgacaagaaactagaagaaaagaacaaattttagagcgtgaaaatgacagagtaaaagtagagttagaaggtttagaccaaagaacaaatcacaccaatattttaaaatataagctctgggaagaatgtaataaaacgtgtccgtttacaggaaaagtaattacgttaagtaaactttttacgggagaaattcaaatagaacatatttttccgtggagtaggtcgttaaatgatagtttcaataataaaacattgtgttttgctgatgaaaatagagccaaaggaaataaaacgccgtatgaattttacagttcgcaaggtgctgaaaaatgggaagctataaaattacaagcattaagttgttttaaaacaaaggctcattatccgaattgttataataaattcaagcattttgtaaagcaaaaatacgatgaagattttataagtcgtcaattaaatgatacaagatatatcagtaaagaagctaaaaattatctatcgaaaatatgtgcaaatgtaatggtcgctcctgggcaaatgaccgccgtattaaggcataattggggtttaaatacggttttaaataaagaacaagatgcaaaaacaagagccgatcacaggcatcatgcagtagatgcgttggtgatggcgtgtgcgaaaagaagtcatttacaagaattaagtaaaagaaatagataccataaaaatcacgaattaaaagattttccgatgccttggcaatcttttagaatggatgcagaaacggcagttgaacaaattttagtatcacacaaaaagcaaaagaatttaataaccgttagaactcataaaactaaaaaaaatggggttgaacataaaaatttaggggtttccgctagagggcaattgcataaagagtcggtttatggaaaaagaacagcaccagatagtaaccaagcatttcatatacgaaaaccgttagaaagtttaactacagaaaagcatttagataaaattgtagatgcaactgttcgattacttattctaaaacgagttaaagaattaggcggttttgtaaaaggtaaaataccagcagatactttttttaaaattgatgaaaatggtataaaacaagcacaaatatttttaccaaatagaaacggtagcaaagtaccaataaaaaaaatacgtattaaagaaaatataggcggagcagaaaagttaaaggaagatataaatcaatatgtgaatcctagaaataatcatcatgtacttatttataaagatgaagatgataatttaaaagaggatgtagtaactttttggacagccgtagagcgtaaaagacaaaagcaagatgtttttcaacttcctgaagatgggaaaaaaattgtaactactttacaaattaatgatatgtttttattaggtttacaaaatgaacaggttgattgggataatatagatgcgaatcttttaaaagaccatttgtatagagttcagaaaattagttctaaagattataattttagaatagttgaggcttcaacaattttaaataaagaagaagctgttagaagtagtttaattagttttcaaaaattaaacccaataaaagttaaggttagtagtattggtgtaatagaaaaactgtaataatttggttaaaaagagttccttgacatattttcgactgttgtggtttgattaaagaaaacagtattagtagagacggattgcaatccgtctttacaggttatggtttgattaaagattagagaaaacgatattttagaacaggagaaaaacatactgcttatgttgtggtttgattaaagattagagaaaacgatatccaaacacaacgtcaatgcaataccttcttgttgtggtttgattaaagattagagaaaacgatattttgaccctttgttaccaagctatctcacttgttgtggtttgattaaagattagagaaaacgatattaaaatggtgttctaaagtttgatagaaagagttgtggtttgattaaagattagagaaaacgatattagtaagctatgtaaccgttgctaatactcgttttagtaagtaaatatcgtataaaaaaatgcttcttataaagacataatcgctttgtttgaagcatttttttattcctattagaataattctaattgagaagggcttggttcttttggtttttgaaccttgccccaaaaattcataatattaccaaattgtttatcggtaatccttaaaatacttacttttccaaaagcaggaagtaaattttttatcctcttttgatgcgcatcagcactttcgctactagcacaatgccgcatgtaaacagaaaattgcatcatcgtaaaaccatcttttaaaagatttttacgaaactgttgggcatttcttctgtctttttttgtttgagtaggtaaatcaaaaaacacaaataaccacataattctataagcatttaaatccataatttgggatagattaattttctggtttttccagaaaaacattgttgtaaagagtttgttgttgaggttaaagcaaccattaaagggctttttttatcttcaaaatagaccgtttgtgttaatgtttttaaaagttcggctttaataggagtaattaaatcgcgctcatcatattgttttataatttctaaaacttttaggtcgattctatgcaaaccttatacagacaactaaaacccctagccccgattgaagcaattgtttgagctccttttttttgtttaaaaaaaagagcgagtgcgtaaagcgggaaatagcttcaaattattttagtgattatcttaaaattagataaaaaaaatagtagtgatacccctgaaaaattagtaattttgtaggtctgaaaaaaaccgagttataagcgtgtgtcagttgtgtaatctgacagcacaagcgaggttattgtagcaaaaaatttaatatatggaaatgataacagcacatgactttgaactaaatattgaattgaaaggtgttaaaaatccatcaaaagtatttgatcatttgtctggtttttatgataaattattggttttagacaggcatattgtttataatatttctgtagaagctaaagttgaatatgatttagtcgatattcaatttgaggctattagtacaaaaattaagcaaattttagtcaatactccaggcgattacttaaaaaatggtgtaaaaccaaccgcttggttaggcgatttattggttcacataaagtacaaaactttaaaagcaattgagctacagcaaatatcctctaaaaaaggattagataaattaaccaatgaaataaacaggaaaataaaaaaggaaacgcccagccatttattgtttttttcggtaaataattactacattttaaacactgttaaagaaattagcgtacaaacaagtaagttaaaaagaggtgaatatttttgttttaaaagcggaaaaaataaagcaaaattaaccaataaaagctttgtggatgttcctaaaattttgagtgaactaggcgatgcaagcatagcgcaagaaagggtagaggttttaaagataaaaacaatggatttattgtcggataattcttattggaaactacaaagagaaggcgctcctatcgatgttaaaattacagatgaagcttggctagaggaatatcataatcgaaaatttgtaattcagccgaatgattatttaaagtttaatttaaaaataattcataccaattcatcaaataaaccacgagttagttatcaggcaacaaaaataatttcggtaattccgccaagtcatatcgaaaatcatgggcaattagaaattccatattaataaaaaacgctaacaaacttaaagtttactagcgttttttatcaaaaatattaaaataatatgtgagattagccctatttttttcggtaccaatacgcagttctaccaaaaacagcaaaaccaatatagcctctaatctttaatttatcggcattttcaagctcgatataacatttatattcttttccgtttttaggatcaacaatagttccaccgctccattcattgccatctttttttaagcctgttaaaatattcatgcctaaaataggagtgtttttacgatttccgctacatttatcgcaaacggatttttgcttgtctttattggtgatttcaataattttagcaaatgcttttccgtctttttcatagactttaattacagaatctacggtattggttttttcattgcggttttcccattcgccaaaaatagactgtgcattaattgttgttgctactagcagtaataagatgcttaaaaataattttctcatgtttgttggggtgtattaataattaattaaaaataacttcaaaaattgctccaataataatagtactgctacaataacgaaggttaatcgtactgagcatcaaaattttcagcccattttccttgcactcttaacacttgttctaaaacatcgcgggcacaaccttcgccaccatttttatcagaaatatatttagatacttgctgaatttctctaacagcatcatttgggcaacaaggcatacctactaatttcatcaccggataatcaggaatatcatcacccatatataacacattttcagggtttaaattgtactcgctgataatttcattaaactgcttaattttatcgtgagcacctaaataaatatcctcaattcctaagttcgccaaacgagtacgcacgccttcattttttccaccagaaataatacacactctaaaacctgcttttactgcggctttcaaggcatatccatccttaatattcatttgacgcactaattcaccattcggaaaaacggttacaattccgttggttagtacaccatctacatcaaaaataaacgtatttatttgtggcaatatttctttataacttttttccatttcgttggatttatgttgttttttggattgattttgtaataagttgatagatatcttgttgttctttatcgagtagttctaaatgattttgaatggtttttttatcgtttctttttgcagggcctgtttgtgcttctgtaggcgataattcttgaatttttttagccgtttcttcaattaaaggatgtaaaatttcaaaaggaacacggtgttctttacaaatatcatcgccaattttatacaaatgattggtgaaattatttacaaaaacagcggctacgtgcaaggtttttcgctgctgagagctaattggatatatattttttccaatcgattttgctacactttctaagagcttaaaatcatcgttattttgcgcctctaagcaaaagggtatttcatcaaaattaatttctttatccttagaaaaactttgcaataaataaaaaacaccttttctcccgttattttgtaacgaatgtaaagaaacacttcctgaggtatgtaccaccaagctatttttcttgtttatttttgatgaaactcctgaaatagcatcatcagaaaccgctataatataaaggtcagcagctgctaataaatttaagttatcagtaatagcaacctgtttttttaaatggctaatttgctgaatatttctggcatacatttgcaccaaataaatttccttggttttgcaaaaagcactggctaaatgcagggcaacatttccacctccgataatgacaattctaatcatgggcacgaagatattgaatttatatgatagtgatttggctattttaaaaaagcgaattataaaataacgacaatctacaactcattactgccgattttgtaaattagcctatcaaaataaacattaaaataaagaagatgaaattagatatattagcttttggagcacatccagatgatgtagagttaggttgtggggctactattgccaaagaaatcgcttcgggtaaaaaagtaggtattgtagatttaactaggggagagctaggaacacgcggttctgccgaattacgtgatatagaagccaaaaatgccgctgctattttaggggtttcagtgcgtaaaaatttaggttttgccgatgggttttttaaaaatgataaagaacatcaattagcggttataaaaatgcttcgaaaataccaacccgatattgttttgtgcaatgctattgatgaccgtcatattgatcatccaaaaggaagcgatttagtatcgaatgcttgttttttaagtggattattaaagattgaaacaatattaaatggcgaggttcaagaaaagtggcgacctaagttagtctatcattatatacagtggaaaaatattgccccagatgttgttgttgatgtaacaggttttatggataaaaaggaaaaatcggtcttagcatacgcttctcaattttttgatccgaacagtaaggagcctgaaacacctattactagtaaaaattttaccgatagtataaattatagagcaaaagatttaggaaggttaattaatgttgattttgcagaaggctttacctcagagcgttacgtggcagtgaaaaaaataagtgaattaatttaaaaaaaacttgaaaaaaagtttggtggaacagtaaaagagttatatatttgcactcgcaattaaatggtggttgtagctcagttggttagagtatcggtttgtggtaccgagggtcgcgggttcgaatcccgtcttccacccaaaaattaaatccttcttttttaagaaggatttttttgtgcgtaaaatttaggtataaaaaaaacaaggctttttaaaccttgtatttatattgtattaaaaacttatttttttttaatttctagccattcatcatatttatctttatgcttaaagcgtttgtgcgaccataaataaaaatcgggctgtgctttgatatttttttctgtcaatgctaaaaatttatcggtaatctgataattttcaaaatcagtaggcgtatcggtaattaattcgaaagatgtttcaaaataccctcttttaattttagtaacattcatattaataactactaaattatattttttagccagagtttccgctccggtatgtacagggattttttcatttaaaaaagtagcccaatacctagctcttgctaattgaggagattgatcacttaataaaatgtataaactttgaataccttttgcctgtctttcattaatttttttattaaataaccgtgttggcacaccatcaaaaccatatttggttcttgagcttttaattaccttttcaaaataagggttttgtagtttggtatatgcgccataacaattaatatttaagtattgtggcaatgcaaaagcccattcccaatttgcctgatgcgcacctgttaaaacaatacttcgcccttgttcggcatatttgtttattaaatcggcatttaggtatttatagcgtttgtttatttcttttttactaatagaaaacgacttaatactctcaaaaataatatcaacaaaatgactgataaacttttttgttaatcgggtgatttctgcttcatttttatcgggaaaagcagttttaatattggtttcaactattttttttctatatcctataatatagtataatatcacgaaaaagaaatcagaaaaaacatacaaaatacgcattggtaatcttgaaaatatccagataaaaggatatacaagcgcgaaacttaaaaacttcatagattaaattttaaaaatgcaaatatcgtatttaattatcaatcatttacttttgattattagctttttcaaaagctgttattttaaaaatttattatctttacgtttaaaatttaaattttatgaaaaagtatttactcttgttttttgttttatttttaatgtattcatgtactgatgaaggggtgtgtacttgtacatatgaatcacaaggatggaatggtggacaaatagtgaatcaaaatagctctataaattatccctgtaatatgaaacctccttgtgaataattaagtgctactaattaaatgtattatttgatctgttttttactctggtatgtattttaggataaaaacaacgatttgctaaaatcatgtgtaattaattttagttgtaagattactcgcagattttcgattacattttttaccaattttagtgtttaaaacaagcaattaatcatacgtaaatacaatactatgagtcaaattatcttactattaatagcggcaaacgtgttggtttcctataaaggatttaacgatattactttttttaatcgctataaatttcaaattcaacaaattgtaaatggagataaaatgagaatgttgacctcgggttttttacatgccgattggatgcacttagggtttaatatgtacgctttatatctttttgggaaaacagttttgggtaatttttcaacaccttatttcttgcttatttattttgggagtttgtttgcgggaagcttatattcgttgtatcagcataaaaacgactattattatagcgctgttggagcatctgctgcggtgtcgggaattgttttttcggcaattatcttgtatcctgatatgaccctaataatgttacctattccacttcctttaccgggatatgttttcggaattgggtatttattgtattcaatttacggtatgaaaaaccaggcagataatgttggtcattcggcgcatttaggcggtgctattggtggttatttacttactttattgttaaaaccgagtgttatttcaaataaccctttaatgattggagttatcggcgcaattattgttggtttgtttttatttggcgataaactgaaagttaaataattttattacagatttttaaattctttttttgaagcaatttcccgctttccgcactcgcttttttttgaagaaaaatcaaaaaaagagctcaaacaattgcttcaatcggggctaggcatttgtgctaaaaagtaaaaatagaacttcaaacaacatttagaacctcttgcctaaaaactaaaatagaaaataaaaccacgctgtcagttcgagtgattttttccttcaaaaaattgcattgataattgttttaacctaataatctgttttttaaaaataaacaaacatcatactgaatttagttcagtaccccatcaaaaagagaactacggaaaaataaaaaaaactcaaaattgcacaaaattacaactgtcagttcgagtgattttttcctttaaaaaattgtatcgagaactttttagtcattaaaatcactaaaattgacaagaatcatcaaaaaaagttagaaactaaactaaaacacttttgacggattcgatttttcataaaacttcactgtaaaaaaacatgctgaagattggctgttgtttggtaaatagtaaccgacagatttcacgtgcaaaagcttgcttctcaggcggtacaggaggttcgaattcgtttaagatgggagattatcgatgtagaaaatcaggcaatttcaacattaaaaaacacaagtactatttacaaacctgaaattcttgaaaatggagaaaccaagcgtcagctactagctaggagcaggtttacactttttaaatcacaagaaaagtggacagataatcaaaaagaaagggctgttattttatttaatttatatcctgagataaaaaaagcatacgatttatataatcggcaaaacgaaaagtaccaaaaaagaaaacaaaaagtacattttttcaccaatttaatacacctttaaatagtgattaaaaggtatttaatcactatttaaaaatgttaattataaaaaggcagttccaactcctgctccttgccactcgggcatcacaacaagccttgacgctctgtaagaattcgcctgaaacataggcattacagccacgtggcaaacaagctcgccgtttactgttccaacaaaatactccgcacatggtgggtgttttaagtctaaataataatgttctttaaaatacttccagtaagttccgtttgtcttgaaaatatcaagtttgatttttggtcgttcggaaatagatttttttttttaagctcttgcgttgttgtgttataaacccagtcaggttgtagccattcaattatatcataatgtgggcttaataaaactatttttttccctttattacgcctccaacctttagcaaaagctaatgcgccaatcttagctatttgcctatctacaacgcttgtaaattcatctacaacaacttcatctggagcatcaataattaaccttgccattcctgctctaaattgttgcccgttagaaagtacgttaaatggttttagccaactcggaacatctccaagaccaacactagctaatgctgcggttacttcttcaaaacttccgtctggagcaatacaatctataattggtttactattatcccaatcggcataaggattgtaaatcttattttccttaaaaaatgatttcccaagtgaggttttacctgttccacttgcgccaataataagaccaatttgccaatcatcattatcaattggtatttctgcggtgtgtttccatgtgtccgccttatcaacgttaaataaactttttactcttaaagctctgtagctttcaaaatcttttgttttgtgatttacttctattttcataattatacgtttactaatctgatttttaatcctagttttttcatcttgctaaatagttctttttgttccatttctgattctacaagtagaataactccaaattgtggcttgtagttaaatttatttttaatcatatataacacttactttaattaatattcttacttttgtacctctcacagtaatattttaaacaagcaaagcccaattagaagacttatgtcctccaactgggctttgatgctaaattaaattactgtgagaagtatttattttgttgggggactttttatatccccattttgtttctttttcttttgatgattttattattgttttaggacgtaagtcgctgacgggtctttgatccaagaccaatcgtcaggctgtggcgttactccgtttaaaatatctaattgattttggtttacgtgaatttttgttaggttggagttatatttgcaatttatttgcaataatctgttgttttttgacacgtctaatatgtttaaaaagttatcggtacagcttagataaactagactggggttattggttaaatctaatgtagttaaaccgtttcctaaacaatataaaccgttcaaccccttgctagattcaataatgatttttttacgccccgcgctactacttaaattaatctcaggcatatttctctcgtaagtattacctaaagcatgccatttaatcgcgcctatacttcctgcatgcctaaccttccaatcactttccgtactcgtggtaaccattgttattgtctgtatcggaggacttccatacctccttgaactactcattgtcataattacgcacgtattaattgtccgcaaacgaaatactcatttgctcctgttttggttatttcaatcattgaattttgcccatcaaattcgagcgtatcgtttatattgcacaattcagttgccgttcctgatgta

SEQ ID NO: 3350 - DNA, 14583 bp, synthetic construct
  source 1..14583: mol_type = other DNA
  misc_feature 1..14583: note = Synthetic
gggcaggaccatccgggcctgtaccgccggggtctgttcattcctgccggtgatgagcactgggtcaggcccgacctggcattatcccccggcgaacaggcgccctacctggtaaggatcaggtaccggcagcccctgcagcaagccacccttcacaaaacggcagaagggatccatattctgttcgatcagccacagcggggcatcaccccgggtcagtttgccgcctggtaccgggaagacgaactggtgggatcgggagtcattcagtaggaacgcttacgcagagttctcagggtttcttcggccgcttccttcaggaaaaggaaatcgataccggccgtgatcagcatatacccttgcagcatatattcctttaccgcccgggcattcataccgaaaatacctgccgggatctttttcctccggcatttttcattgatacgggctatctcccgctgcacctcttcatcctccacctgtccggttttgcccacgctggccgagtaatcgtacggcccgataaacacggcatcgaatcccggcacctgaagaatctcgtcaatattttcaaaagcctcatggtgctccagctggatgatcaccatcaggtcgtcattggcggttttcatataccgcccgaaagcaaggccgtaggtatgcgcccgggcaatacccacgctccgggtccctgacgggggataatggcacatctcaacaaccctttttgcttcagccgctgtttttacgttcggaacaatgatcccttccacccccaggtcgagaactctcttgatccaggcctcatccgatgccggcaccctcaccaccccgctgcatcccggggccagggactgcagcagcaaaccgatctgcgaaacatccagggccgaatgctcggcatcgataaacacccagtcgtaccccagagaagagacgatctcggccacttccgtggaaggcagggtcagcatggttccgatcaggggctcatcgccctgcagtttttcctttaatgtgaatttcatatggttacctcctgcagataagtataaaggttaacaaattaccagtacaggtccatcaccccggtcagggcatggtcttccaccctgcgggcctggcggtagagggccttcaggtcttccggcgcatcttccaccatataggcatgtccggcccattcaagcatttccacgtcattgtaatcgtttcccagggccagggtgcgttcccggtcaatccccaggtgatccgacagccaggcggcagcggctcccttggataccccgggatgaaaaaattccatccagaaccattctccgctgataggcgaggtggaacggatcacccgcactccttcgaacttcgctgccagctcatcaaatttcttcccatcggggggcacaatggccagtacctgtgaaaccgtttgaaaagggatattcttcccgtcgaatggactggcgtaaggcctgtacagctcgcagcgtttttcgaaatcaggattcaactctttcccgggaaaatatacaaaatgatgattttccggcacttccctgtgcaccatgaaccccacgccctcctccaccagcttttccaccactgcatcggccagaggccggtcgaggctgcaggcatgcaccatctttttgttcttccagtcgtatatcccgcacccggtactgaaaatcaggtagtcgacgggaaaatcatcgggaataagccgcctgaaagaaaagaggttccggccggtggcaatcacacgaacaattccctcgtcttccatccggtgcagggtttccaggtcgcggctgctcacgctgttcaccggatgatgcaaggtgccgtcgaaatcggtaaggaccattcccggtctggtctttttctccatcatcagtcgagtatctggtatgatccgttatttacgggcatattcagtgtattcagtattcgttccagcatgatcccttcattgggatcgtaattataaccaaacgtagtgcgaaccccgctggaaataaaatgtaccgcccggtcgagggcaacgggcaggctgtcgccctgcagcaaagaacccaccagcacgctggcaaagcaatcgcctgtgcctggataatcggccggcaggtaatcacagctcacccgccagaaacgtttatcctgtcggttataagcgatcaccgaggtgcgtttgccggaatcctggtcgggcacgctggtcaccaccaccatgccgggacccatttccgaaagttttctgatccaatctttcagttcctgtatccctatttgcgcgggcggttcctttccaagaagaaaggcagcttctgtgaggttgggagtgatcaggtcggcccggccgatgagctgacgcatttcattcaccatctccggtttcatgggaccatacaatttcccgtcgtcgcccatcacaggatcaaccgccaccagcagctcttcgtgccggaaagcggcgatcatttcctccaccatcctgatctggcggtgagatccgagaaatccgctgtaaatggcatgaaagctgattcccagccttttccagtggtcgataaaagcgggcacatgatcggtcaggtcgacaaaatggaatgcttgataccggctgtgcgccgaaagcaccgccgtgggcaggggacacacctgtatgcccatggcggaaagaatggggatcaccgctgtaagcgacacgtgtcctattcccgaaagatcgtgtatggcggctacccgttttaccggactcttcatcagcatcagtttttcatgttttcattcaaccagtttcccgcttcctctatccgctctggctttccaacatccatccacacatccccgttgtggggatatgccatcacccggtggttgcgggccagttccaggtaaacgggaatgatgggaaacgaaggggttgtggcttcatacagtttgaagatttctgacgataagacatgtatcccgctgaatgccaggggaaccagatgcccgttcccggaaacatccccccgggtctcccccgttccggcatttttccaggcccgcaacctgccgctttcgtcaaaaagaaggtagcgcgatgcattccgttccctgaccgccagggtagccagggcgcccgatgtacggtgcctgtcgatcatccggtgaaggtcgatgttgctcaccacatccacattatacaccacgcagcattgcgcccggctcagaaatggcgccgccctgaaaatccctccgcctgtatcgagaagcctgtcttcttcaccggaaatttccagatcaatgccgaaccggttctgccggtcaatgtattctctgacctgctgtgcatggtggtgtacattcaccacaatccgggtaattccatggctgatgagctttttcacagcctgctccagcagggtataccggcccacctgtaaaagagctttgggttgatgccttgcatgccggcccagccgggttcccattccggcagccaggatcatgccccgtatgttttcttggtttcccattcctttcaggccattgctgtatcaggtattttttcccagttcccggtgccacaccgatacatccaccgggtatgccgaccgcaggcgttttgccagcctttccgccatataaaccgaacggtgctgtccgccggtacatccaaaattaaccatcaggtgcctgaagtcgcggcccaggtatttttccacagcttccgacaccatccggaaggcatcgttcaggtatttctccacttcttcttttccttccaggaatccaatcacttcccggtcgaacccggttttatccctgaactgaggcagccggccgggattatctagaaaccggcagtcgaacacaaaccctccgccgtttccggaataatcggccggaatgccgttcttgtatgaaaagctggtgatcatcacccgcaggccctcgcccccggggtccatatgcctcagttcatcggcaaaagatgcttccgacatccggggtaaaatatccttcagataagggatttcaaccggcatctcccggtcggtcagcagggagttcagattttccagcaccgggaggatgctgcggataaaatgcggtttcccctcgaaccagccccggtaaccgtatgcccccagcacctgcatcatacgcagcagggcaaacgccgtgaactctttccggaagtgtttctcatccaaacgcaggtacctgccggcttccctgaggtaatgctccagcagcccctccctttcttccggggaaaaacccgcacgggcctgaaacagcagtgaagcgggatcatacgccagagggccctttctgccgccctggtaatcgatgtaatacaggccatcggcacagatatggatgttccggctctgaaaatcgcggtacataaaataggaagcatcggcagaagccaggaaagtgcacagctcaccgaaatcctcctccagctttgcttcatgaaaaggcactcccgaaagacgcaggaagaaatacttgaaatagttcaggtcccacatcatcgactgccggttaaaacgtttcaccggataggcctgttccatctccagcttttcccctcccgtcaactgaaacctgagcaggtcggtcaacgcctggcggaaatattccattacctccggtctgtcgccacccggtttcccggccgccagcacctttccgaaaagggtactgtcgcccagatcgctgatcaggtaaagggatttctcctcatcaccggccagccaccggggaaccggcagtcccatgctgttgaactgacgggtaaatgatacaaaagcacggtattcgggatgatcgggatgatacaccccgatcgccgttttccctccgccggtaagccggtaatattcccggctggatcccgaaggcgggaaagcctccataccggtcacttcttcacccgaccaggttttgaaaaggtcctgcagaaaaggtatgaaatgtttcaatgctccgtgttttacccgacaaaaatacaactatttacaaataggcatgaatttcctatttttaaaacgtcaatcgtccgctcatgcgtgtagacctatacaaaaaagatctgaacaatgtggtggaactgcaggttctggaagaggatcttccataccatccgggcatgagggaatcgttctttctcgatacggaagtattcaacctgctgacccattgtttcgaaaccagtcactccctgtacgattaccaggaacccacccgctattcggcaaggcagatcgtagccctgcaccatgccctgaaaaaagaacggaaggttctggaagaaatacaggaagaagcatccttcatctccctgatcagaagccggttcatgggcaccctgttcctttcggcccttgaggaacaggatgcattatgggagaaaaaatgggagttttaccgccaccggctggccggggtggtccgttccctggtgaatttaacggaactttgtatgaataccggcaaaaccctgtgggtaaccggttattaggcccttccctttcttcgccctgtgcccgcttccctctcgccgaagaattttttcacccgggcgatcatctggttttctgtcattttatcggccttttccacatgtacagggatattccgcaggcttttgttcccgcggatctccttcccaagctttttccccgtttcagccgggccgaagagataaatctcccccacccctttcatgtgcgacaacagccgttcaaaatactctttgaactggtgttttctcctttccgtccgttttctgacaggattgataaacatgcctcccaggcgtgaggcttctttggtttctccttcaatccttaccctgctttccacttccgaagcgatgtgttccaccctcacctggtcatccaacaggaagatcaggcaggctttctcgcagtcaagccaaatccccagttttgtatccataaattgtgttgatttaagaagtatgtcatccacagaagtcagataatccaaacaatccggaagaaccgtggggccgggaaacccatatctttaaagataatcaatatgcggtaagatttcaagaagaaccggtactttttatccccgttttaacagaaaataacaatgaaaaattggttcggacaggaaaatggccataacgaaaaaagggggaaccggaaaccggatccccctgaatgttttctgaggttgtgcccaggacaggacttgaacctgcacgcccttaacgagcaccagcccctcaagctggcgtgtctaccaatttcaccacctgggcgggttggaagcgtgtatggcgggttggaaccagttccattcctgtaccaagacacggcgggaaggacggaaagccttcgcatccttcccccttccctggtgcccagaacaggactcgaacctgcacgtacttgcgtacactagtccctgaaactagcgcgtctaccaattccgccatctgggcattgatctatcattacactatctaaagaaccaataacttttctgcaaaaaataacttttcattgcttcacgcccagatgccggaattgtctcccctgcaggctggctcctcccggaaatggtccaccggaccatttctcctgccgggcggccctgccatctgggcattgatctatcattacactatctaaagaaccaatgactctttccaaaaggaacgggctgcaaagttaaaaattttgtaaaaatcatgcatgttttccggataaattttaaccggataaaataaacccggagtgtttttctctccgggttggtttttcataaattcctgtcagtttatttttctgccggggtccttcggtatggaaatttctccacgggccggtctttttccacacgcaccgagcggatccggcgttctccttccaccaggcttttctttcccggaggatagtaatccacatacagggtccagagattcacctggttctcggtcacgtcgatttttacattcagcgggtcttccagcccaagctgctcgttatcatggtattcctcccagatatccacataatacggaccgccttccacatggtagaattccacctcccctacctggttggtccatccggaaatgaccgggtcgataaagtcaaaccagtcttcataggtataatacagggtcacctccgccccgggaacctcatactcatcccagtattccagcaccaggatgttcaccacggtctggggcaatacggtaatatccatgaatacccggtctatcaggtcgtggcgggaataagccgtcagggtgacggtatacgtcccggtagcattgtactgatgcaccggatgggtttcgtaggagatgtatccgtcgccgaaatcccattcataggatacggcgtcaatggatcgattggtgaaataaatatcctcacctgcttccaccaccctggattccacagtaaattctgcttctggttttatccggcatccggtcatgatcagcgccacgccggcatataaaatgaatagctttttcatgattctggttattggtttcttttagcttaaccaatccaaataatgtgccatttttccggacattctcagccagcctacaggttttcttcgataaaagaagaaattttccggtacaggtgcaggttggtcactcctcccctgaagccgtgtgcctggtcggtataaaagtgcatatcgaaggttttgttctcctgtaccagccggcgcaccagttcggccgaattctggaaatgcacgttgtcgtcccctgtcccgtggatcagcagaaatttccccttcagctgcccggtaaaatgcagggggctgttatcgtcgtatccgtcggggttatcctgcggcaggcccatgtacctttccgtgtaaacggtatcgtaatacctccatgaagtaacgggtgccccggccaccgccaggctgaacacagcgggacttttgaacaggcacgacgaagccatgaagcctccgtagctccatccgaagataccgatccggccggcatccacatagggaaggctgcccaggtagcgggccgcctcggtctggtcgatggtttcgtattttcccagctgcccgtaggtcatttttttaaacgcttctccccgggcgccggttccccggttgtcgaccgaaaccaccaggatgcccttctgggccaggtactgattccagccgaaatcccacgaatcggtcaccgtttgcgaaccgggaccaccgtatacccgcatcaacacaggatatttcttcccgggatcgaagccggcgggtttgatcatccagccgttcagctccactccttcggaggtggtaaaagtgaaaaattccttttcgggaatgccgtatgcctgaaccttttccttcagggcggcattgtcttcgagcacacgcaacaggcggcccctgcggtcgtgcagggttatgagggttggggtactgaccgatgaatggtacattatataataatcgaacgagcggctgaacacggcccggttggttccgggcatggtgctgagtttttccttccgtttcccgtcaaggcggatgcggtatacatcgcgccgcaggggcgattcttcggaagcggtataatacagcatgtcgcgcctttcgtccaggcacagcagattgtgcacatcccattcgccgcgggtaacctggttcagcaggttaccgttcaggtcgtacagataaaaatgattgtatccgtctttttcgctgtagataagaaaacgcttcccgtctggcaggaaagtgaggtaatcatcgctcacctcgctgatgtacctttcgttcttttccgtatacaccacctgggaatagcccgtgcggggcacggccagcatgatatcgaggcggttctgcaggcggttcatcctgatgatgcccagcacgccggaatcatgggtccatttgatgcggggaatgtattggtcggtttccgggccgatgtccattttcacccggcgtccggtttccgtattcaccacccatatttccaccacggcattcttctcaccggccttggggtatttgaaagtatagtcgcgcggatacagccggtcttcgtaaagggtcatgtggaacaggggcacttccgactcgtcgaagcggtagtaggcaatgtgccggttgtcgggcgaccaggcgtaggcccgggtaaaggcgaactcctcttcgtacacccagtcggtgtgcccgttgataatgcggttttgctccccgtcggtggtaagctgtttctcgtcgcctgtttccaggttcttcacaaacaggttgttgttgcgcacgaaagccaccgattttccgtcgggtgagaacgaagccacctgttgtttcccgttttccgataccggtatcaggtttttcctgtcaggctcccatacgtaataatcggccaggaaagagcggcggtagattttttcgaacccggtaaccagcagcatgcgtttctcatcggaggaaaaggcatagtcgctcacccttcctatcgtttcgtctgcccggccgggatggaacagggtatccacaggcaggccggtttcgtagctgtatttcacaatcagatcgtcgtcgaaggccgtgtagtgccttccgtcgttcatggagcgcagcccgctcacggttttcgcccggaaagcctggtgcaggtatatatcctccagggtaatgcggggcgattcctgggcatggaggcagaacggaatgctgatcagtaaaataaaagagatacgtttcatgaaaaaaggcatttggtaaattctacatatatcatcggggggtaaatgtacaattttaccggtaaaatacggaggatacaaaaagccctgccgggtagacagggctcaaggattactcctgcagcatatagccttattgtgataagatgtaaattggataataatcctttacaaatataaaaaattattttaatttagtcaactcacccaaaaacatactagcaatgtcacgtatactcggtttagacctcggaaccaattccatcggctgggcggtggtagacccggaagaaaaacagattctcggaacaggggtaagaatattccaggagggagtggaaaacctgggccagggccaacgggaaatttcacgcaatgccacccggagagagacccgttcagcccgccggcaacatttccgccggaaactgagaaaaaaactgatgctggaactcctgcggaaacacaacatgtgcccccccgcagaagatgaacaggctatgaaagaatggttcagaatgaatccttacgtgctcagaaagaaagccctgtatgaagaaatccgtttgccggaactgggacgtgttttctaccatatggcgcagcgtaggggatttcagagcaacagccggattgtaaaagaagatgagggaaaaatctttgaaggtaatccatctgaaggaaaaatcgggatcaatagcacaaaggaaggaatgagctcctaccccacgctgggagcttacctggcttccatcgatacccggaatgaaagaatacgcaaccggtataccacccggcagatgtatatcgaggaattcgaaaaaatatgggaagctcagaataaattccacccggaaatggatttctccctgcgagaagccatcgggggaagaaaaatggataaagaaaaatacggctatgctagggacggggtattgttctatcaaaggcctttgcgatcgcagaaataccttatcggaaaatgccggttcgaacccaaaaaacaccgttgccctgtcagcgccattccgtttgaaaaattcagggcctgccagtttgtcaacaccatcgaatgcaacggggaaaaacttagccgggaagatagggaaaaggctgtttccttcctgttatcgaaagataaaacaacgttcaaaaatatcaggaaaaaaatcaataagctcgattcatgctaccatttcaactaccaggacgaggataaaattgtcggaagccaaaccatcagccagctttcatccaggaaattcttcggagaaaaatggcatcagttcagtgaagaggagcaggaaaaaatatggcacatcctgttttcattcgacgacaaacggttgttaaaagaatatgccatgaatcgctggggctttgacgaggaaaaagcccggaaaatagccggtttcggcttgaaacagggatatgccggtctgagccggaaagccatcaacaacatccttcccttcctgcaaatgggcttcacttacgatgtggccgcagtgctgggcggagtgaagaatgcgtttggagaggaatgggaacaactggatgaagggaaaaggcaacttgttctcgaccacattcccgagatagtgcacagcaggaaaaaaggcggtttcatgaatgatgtacgcacctttttaacggaacagtttgccctggatgaaacccgcctgaaaaaactgtaccaccacagcgtagaaaccgacaacggggaaattctggacaaacttccggtagataccgatgccgatcgtgaaattcaggcaatccgaaacccggtggtggtgaaagccctgtttgaggtaagaaaggtggtcaacggactgattgatcagttcggaccgttcgatgaaatacgggtagaactggcacgggaaataaaaggaagcaaggaagaccgccttcgcatcagatgggaacagcaggaaaacgaaaaagaaaacgacagaatcagagacatacttttgcagcacaatcagccggtaaaccatgaaaacattctgaaatacaagttatgggaagagtgccagcatatctgcccctacacgggcaggcaaataggaatagaccagcttttttcgggcgaggtgcaaattgagcacatacttccctggagccgcaccctcgacgacagctacatgaacaaaaccctgtgttttgccgatgagaacagaaacaagggcgaccgcaccccgtacgaatattataccgaaaaaggaacctgggaagaggtaaggcagcgagccctgaccctgtttaaaaattcgcctgaattccccaaacggtatgcaaaattcagacgtttcacccagaagcaactggatgatgattttgcccgcaaacaattgaacgatacacgttacctcagccgcgaagcaaaaagatacctgaaaaaggtatgccgtacagtaaacgttgcttccggaggcatcacagccaaactcaggtatatgtggggcctggatagtatcctgaatcccggggcacagaagaaaagccgcgacgaccaccggcatcatgccgtcgatgccctgacaatggccgcccttaccctttaccatgtacagcaactctcccactggaaccggtacagaagaaccggaacagaaccgcgctttcccgacccctgggaagatttcaggttccaggcaaaacgttccattgaacagatcctggtttcacatgagaaaaagaaccgggtaattacccgccgcatgtataaagcaagaaaaaacggaaaggaatacagaaacctggggctggctgcccggggacctctgcacaaggaatacatttacggaaaaagaacaaccaacggagaagaagcttaccatatcaggaaaccgcttgccagcctggatactcaggcccaggttatgaaaattgtcgatccggtgatccgagggctggttttgaaccggattgaaaagctgggcggatttaaagggaaaaaagtacctgaaaatacatacgtggaaatgaacgaaaacggggaaacccaatggatgatccacctccccggcaaacagggtgagcaggtaccggtcaggtcggtcaggatcagggaaaacctgggttatgccgcccggctgaaaaaggatgtaaaccagcatgtgaacctgcggaacaatcaccacgtgatgatttatgaagacaggaacgggaatctcaatgaacaggtagtcaccttctgggaagccgtgaggcgaaaaatcaacaaagaacccctgtaccaattgccaccggatggagaaaaaatacatacggtactgaaagtaaatgacctgtttctgattgggctggaaatatcagccgacatgcaaaacataccccgggaacggcttgcacgccatttgtaccgggtgcaaaaactatcttctatgtattatacattccgtttgcatacagcatcaaccatagataatccgtcagatgaaatcagaatagtaagttttaaaaaatggaaacagttgaatcctgtaaaagtccgtctgactattacaggccatattacaggcattgacaaaccatgctgaaaagaaccgtatgcattgaaaacccgtactacctgaaattcaagctcaaccagctcatactggaaaaccgggaaacgggcagcacccggtcggtaccgctggaagatctggggtttctcatgattgaccatccccaggtggcagtgagccaggtattgatgagggagctggcccgggccggcgtggcggtggttttctgcgatgaaaaacaccatccttctgccatgctccaaagttttgatggcaacagcattcagacagaacgttaccggcaacagattgccgcctcagaacctatcaaaaaaaacctgtggaagcaaacggtggaggccaaaatatccaaccaggcggccctgctggctgtgcacaggaaaaagagcgggtaccttctggcatttaaaaaagcggtgaaaagcggcgatacgagcaaccaggaagcccgcgccgcccaggtatactggaaggaattgttcgggccgggattcagaagatcacgcgaaggcctgccgcccaacaacctgctgaattacgggtatgccgtactgcgagctgccatggccagggccattgtatcatcgggcctgctgccttcattcggcatccaccaccgcagcaaatacaacgctttctgcctggccgacgacctgatggaaccttaccggccctttgtggatgcagccgtttacgagtggatgcatacacgttctgattttcatgtgatggatacggaaacaaaatcccatctactgaacattttgaatcacgatgtgctgttcaccagggtcaaacggcccctgggaatcggcctgtccctcaccactgcctcgctggcaggctgttttgccggaaaatgtaaaaagatcagatacccgtctttttgctgaaacatgtcattaaaaaggatcagcgcctaccgcatcatgtggttgttcgtattttttgacctgcccaccaatacaaaaaaagaacgcaagattgcggcagggttcaggaaaaagctgctgaaagacggcttcagcatgatgcagtattcggtgtatgtaaggcactgtgccagcaaggaaagcgccgaagtgcaccagaaacggaccgtggccatcattccctcgcgggggcaggtcagcatcctgcagatcggtagtgttccattgagtgtgtctgggctgaatcttcttctcgtagctttgcattgtaaatttatgttttttttcaatttcaggatttaataaacaatctccattaattgtttattaaatcca

SEQ ID NO: 3351 - DNA, 5750 bp, synthetic construct
  misc_feature 1..5750: note = Synthetic
  source 1..5750: mol_type = other DNA
ggcggggcggggcggggcgggggggggggggacaagggttggcttgggggttaggattaggaccgggaccaaaatcaggatcaggatcaggatcaggaccgagccgggacccgggcctgcgcgatgttctggtccgcgtggcccgcggcgatcggccccacgatggggagcaccaacggcccatgaaaaaacgcccctctgggaggcgttgcggggcggccgtggccggagcccggcggatgcaacctttaccgtgataggtcgggaagcatcgctcggttacactgcgggaaaaaaagaaaaaaggggccgttcagggaggcccctatggggttggtcgcggccggtgaggccactccagagccctgcggatgtttcctttaccgtgatagacggcagggagcatcgctcggttacactgccagcaaggtatcacgactcggttgctttgtcaaccccggagaaacaccatgcaagtggggccgaagtacggactgggcttggaccagggggttcgctcgatcggttggacgctcgtgaagttgaacgagcgtgcagaaccgactggggtcgagcggatgggtgttcacctcttcgaggctggaacggaaggcctgatcgaaaaaggaatggatgcgtcgcgcgcggcgaagcgtcgcgcagcacgccaggcgcgcaagcagtacaggtgccggtgccttcggaagcggcgtcttcttcgctggctgcaggaactcggactaatgcccccgggtgatgtcagctccggccaggcgcggaacgagttgctcggccgagtggatgccgagcttcgggccaagtgggagccgcccggcaccgaccatcggctacgccagctcctcccgtaccgtcttcgagcggcgggcctcaaagaaaaactcgaaccgtatgaactcgggcgcgcactctaccacctggcgcagcgaaggggataccaaagcaaccggaagcaggtcgcggacgagacggatgtcgatgccgggagtagccccgacgaggcagagcataagaagcagaagaagacgaagaagccgcggcccggaagcgtgggcgaagtccaagccggaatcgacgacctccggaggcgcatgtcgggggcgggatgcacgacgctcgcggggtatttcgcaacgctcgacccgaccgggaagctccacgagcgcatccgggcccagtggacgccccgcgagctctaccggctcgagttcgagcggctatgggaagagcaggccaagcaccacccctcgcttaactcgaccgctgcgccgcgaccttctcacaggatcaagcacccaccaggtcgagggcagccgtctcgaagcgcgggttcacccgttccacccccgtgcccactgtccaagcagcgaacataccgggaagaggtcggacgcgccctctttttccagcgcccgctcaggagcgcggcggggctggtcggaaggtgttcgctcacgaactccaggtgcgcacccaaagcgcacccgctcttccagagattccgcatcctccagcaggtgaacaatctgcgcgtccagcttcccgggggggccgaaagggaccttacacaggaggagcgctcccgtctaacggaggcactcggcacacggcgcgaggtggcgttttcgacactgaaaacgaagaaatggtttggcaagggtgcgagcttcaacctggaacggggcaagcagaaaaaactcgtcggcaacatcaccgaggcgcggtgccgggcggtgtttggagccgaccgctgggcggcggtgagcgagacagatcgtgcggcggtcgtccacgatctgatcgtgtgggtcaagcccgcggcgctggcgcgccgaggtcagtccaagtgggggctctcgccgcagcaggcggtgcgcttcggcaactgcgtgctcgagcagggctacgccgcgcactctgtgcaggcgtacgggcggctcgtgaagcgaatggaaatcggcgcgccgtacatgacggcggtggtcgatgagtttcagaaacgggacgtgggagttcacgaacttctcccggccgtgctgcaccgggactcggtgggcgacccccggaatcccacggtcctgcgggcgcttaccgagctgcgcaaactggtaaacgcgatcgttcgccgctatggcaagccggagtggatccggctggagcttgcccgggacctcaagcggtcccgcaaggcccgcgagaggatgagcgaggagatgcgggcccgagagagcgcgaagaacaaggcgcgagccgaaatactcagacgcgccgggatcgccggcaaggacggcgatgtcgagaaataccttctcgccgaggagtgcggctttgtctgcccctacaccggcaaacagatggacaaggatcggctcacggacattcttggaaacccggagttcgaggtggagcacatttggccacgctccaagtgcctggacaacggtttcctcaacaaaaccctctgccacgtcaacgcgaacaggaccaagcggaacctgattccgcacgaggcgtacggtgaagagcgtctgcgtgagatcgtcgcccgcgtcgctcactggcccgatagcgcgggaaagcgcatcaagctatcccgctttctcgccacccagatcccccccgaacaccggcccgaggcgcatcttgcggagacgcgcaaggtgagcgcgttgaccgcggagtatctcgggcggttgtacggcggcgtgcacgggaccgacggccgccagcgcatctgggtcacgacgggcatcctgacaagccaggtgcgggagatgtggcggttgaacgcccttctttccaagcgcgatgtcaaggacagggacgaccaccgccaccacgcgatcgatgctcttgtggtcgcgctcacggacggcgacacgatcggacagctccagcaggcaaccgccgaagccgaacggctgcgccgccgcggactgcccgagcaagacccgccatgggacagcttctttgagcaggccagcgagcgcgtagcggcgataaacgtctcatttcggcagacgcggcgggtccgcggggcgcttcatgatgagactctctacgcccatccgcgcccaggggaatcccacccgcgcgtgagaaaggaactctcgaagctgaccgagaaggatgcggcgcggatcatcgacccgcgagcaagggccgctgtcgccggcgcgatccgcgcacaagggttcaagcccaagggcacggcaaaggcgtataccgagttcgcggagcgcgacacgcacccgccgctcggggcgggctgggttcacaaggtccgggtccggagcggcaagaagggcaagcttcgcccgatcggcccgggctgtgcgcgtgacgtcatgctcggagccaaccaccacatcgtcatccgagacgctggcccggcggtgggaaccggagccggcgaatggaaggagtctgcgaccactctcatggaggcgcaccggcgcgcgggagctggtgaggcggtcgtgcaccgggccgacaagggttccgagcgctttctgttctcgctcgcgccgggagagttcattctgatggacacacccgaagacccctccaaacgagccctctaccgaatcaccaacatctccgaaggccagtccgaggcgcgattgcacaccgacggtcggcctgtcacagcacttcgcgccgacaagaagtcgggaaagaaggatgagcgattgaggattcacggcgagaaactccaacgacttaacgcgcagaaggtgaacgtgacctacctcggagaaatccagaatgccggcgggtgaccgcgtcatcgagatcgcccgcgcccccgccaaggtctcgctccggcacgggtgcatcatcgtctcgcgcgaggatggggcggggggacgggtcgatgaggcctcgacgcccgtccgcgaggtcggcgttctcatcctggcccacccgcaggccatcgccaccacgcccgccctgcacgcgctgatggccgagggggcgacggtgctggtctgcgacgccgcctgcctccccgcggggctcatgctcccgctccgggccaacgcgctccagacccagcggatgctcgcgcaggtggtcgccaaagcccccgtgaagaagcggctctggcggcagatcgtcaaggccaagatcatggcccaggccgggacgctcgccggcctgcacgacgacgacggcggcctgcccgcgctggccgatcgcgtgcgctccggcgatccgatgaacgtcgaggccacggccgcgcagcgctactggccgctgctgttccgcgacgccgagttccgtcggcgcttcgacgccgaggaccagaaccgcctgctcaactacgggtacgcgatcctgcgggcggcgatggggcgggccgtctgcgcggcgggcctgcacccctcgctggggctgcaccacaagtcgcgcgagaacccgtggtgtctgtgcgatgatctcatggaaccgtaccggccgctcgtcgatttcgaggtggcccgcatggccgccgagcgcggccgcgactgccccttggaccccgcgtccaagcaccgtctcatggaagtgctggcgacccgggtaaacgtggaccgaaaagcaaccgatacccggcaggtgtcggaccttgtccaccggaccgcgaactcgctcacgcgggtcttcgcgggcgagtcgagcgcgttggagtatccgcacgggctgttcacatggtgagaatcgcgccacgagaggcccggacggcggaggggtacgacccatcggggtaccgctggatgtggctctttgcgatgttcgatcttccggtggagaccaagcagctgcggaaggcgtacagccggttccgcaagcaactcctcagcgaggggttctcgatgctgcaatactccgtgtatgctcggcattgccccagcgaggagtcgggcgaagcggtacggaaccgggttcgtctgtccgtgcccgattccgggcaggtccgcctgctgacggtaacggatcggcagttcgggaagatggaggtgctgtatgggaaaaaccgagcgccggtcgaggagccgccccagcagttcatgcttttctagcggcgcgggccgccgcaaacccttgttcctcaagggtttgcgaggggcctagtgtaaccgagcgacgctccccgccaaaccacggccgtgtctcgcaacaaacacgcccagccggtagtgtaaccgagcgacgctccccgccaaaccacggcgatcgccccggtcgcctgcaccgccgcctcagtgtaaccgagcgacgctccccgccaaaccacggcggcatcggcgcgacatggacgctggcaacgagtgtaaccgagcgacgctccccgccaaaccacggcgaacttgagggcctgctcgtagtcggcaagagtgtaaccgagcgacgctccccgccaaaccacggccaggcggccatgcgggcgctttgcaccaggagtgtaaccgagcgacgctccccgccaaaccacggctagccgcggatgttggcgtaggaagcctcgagtgtaaccgagcgacgctccccgccaaaccacggcccagtgcgaatctgcgccgactgcacgcccagtgtaaccgagcgacgctccccgccaaaccacggcaggtcgcgcatgaggccgtcggctatgcgcagtgtaaccgagcgacgctccccgccaaaccacggcagcgcggccttgtggtgtttgacctcatccagtgtaaccgagcgacgctccc

SEQ ID NO: 3352 - DNA, 23297 bp, synthetic construct
  misc_feature 1..23297: note = Synthetic
  source 1..23297: mol_type = other DNA
gccacacgatcctcggcgcctgcacgaccgggtcgtcgcggaagtcgaacgcgaaccggtccgcgaacctgccctcgacgcgcaagtcgagctcccgctccacgcttcgctcgaattcgtcgagcagcgccacgggatcgaagcgcctgacgagcccgcgccgcaccgcggcctgcgcgagccgtcgagccaccgcgacgtccgcgcggatcgagtcggctgcgcccggccggatcaccttcaccgccaccgcagcgcctgctggaagctcctcgccccacacgggtcgatacgcccgcttgaggcgcgcacggtgcacctgcgcgatggaagccgacgcgacgggctcgtcctcgaaatcgtcccagaggtcgtccgcatcgcggccgaactccgcacggacgacttcgcggatcgcagatgccggcagcgcgggaacggcgtcctgcatcgactgcatctcggcgaccaactcatcggagaactcgtcggggcgcaccgagatcagctgcccgagcttcacgaacgccggcccgagctcctcgaacgcctcccgccacgcgcgcgcggactcggcccgccagcgcgcgcggccagcaagcccgaacgcgctgcgcacgagcgcacgagcctgacgcgccgccagcacgctcgcgatgtggcgcgcccgcgacatcacgaccgctcctcgccctccaggcgcgcgagcaccgcgtcgagcttcgactccacgctctcgagacggcctcgaagcgcgctcacctcgaagcggatctcctcgatcaccgggtcgggcttctcctccgcaggaccaacctcgccacgcgcacgcgcgatgagctcggccttcagcttctccttctcttcggcgatcatcgcagcgagcccgtcgacgaacgcgtcggggccgccgcccatgccctccagcccggcctcttgcccgcgacggatcgccgccttcacgccctcgtcagcagtctcgtgcgtgagcagccacgcggcgaagaaccgcatcacgtcgtcagtcatcgcggaaccttcctttgccgtcgtcgtcacagccactcgggcattctacggcgtacacgccttccctgcctgtgcgcgcagttctacactgccagggtaccccgtggcgatggaggttccatgcgcgcgacagacgtgctgattgtcgcagccggcggcgccgtcggggccgccgcccgctacgtgctcggcggctggctgaccgaccgcttcggcaccgccttcccctggcacaccttcgtcatcaacgtcagcggcgcgttcgcgctcggcgtgctgatggcgctgtcggtcgaacgcggcatcgtgacgccgcagtggcgcctcgccctgggcgtcggcgtgctcggcggctacacgaccttctccacgctctcctacgagagcatcgccctgctctcgcagggctcgtatgcgctcgggttattgaacatgttcggaagcggcgccgcggggcttctcgccgcgtggctcggcctcgcgaccggccggatcgtctaggagggcacgatgcacatcgaaggcgacgcgaagcgcgtcacgatttacgtcggggagagcgaccgctggcacggccgaccgcttcacgacgcgatcctcgagctgctgcgctccgaaggatgcgccggcgcaaccgtcatccgaggagtcgccggtttcggcaaggccagccgactccacaccgcgagcatcctgcggctgtcgcaggacctgccggtcgtcatcgagtgggtcgacgacgccgagcgggtggcgaagatccttccgcgcctcgacgagatggtcgaaggcggtctggtgacgatcgaggacgtgcacgtgctgcggtacgtctcgcacgagggccggcgcgacgcatgagcgaggtgcgccgccccgacgaacgcgagtccttcgcgcgcgtccgtgcgctcgggctcgtcagcttgctcaccgacgcctcgtccgaggccgtctatccggtgctgccgctgttcctgacgaacgtcatcggcgcgccggtggcggccataggcctcatcgagtcgctcgcggaagctacggcgtcgatctccaaggtgttctccggacggctgtcggaccgcctcgggaagcggcggccgctcgtgctgctcggctactcgctgtctaacctcgtcaagcccgctctcgcgctggtgccctcgtggccgtgggcgctcgcgctgcgcgtcacggaccggctcggcaaaggcatccgcaccgctccgcgcgacgcgctcatcgccgactacgcgccagaagttcggcgaggcgaggcgttcggcttgcaccgcgcgatggacaccatcggagccgccatcgggccgctcgtcgcgtgggcgatcctcacgctcaagcccagcgggtaccgcacggtgttcctcgtctccgcgatacctggcacgctcgccatcctcgtcgcgctcacgatggtgcgcgagcggacgaagcctgccgtcgagcgcgaagaggccgccacggtctcgttccgcggcctcgggcggcccttcgcggtgttcgcagcgatctcgatggtcttcgcgctcggcaactcctcggacgcgctgctcatcctgcgcgcgcaagacctcggcgctcaagccgccacggtcccgctcatgtacttcgccttcaacgtggtcgccgcttcgctcgcgcggctgttcggacggcgctcggaccgcgtcggccgcctccgcgtgctcgtcgcggggttcgcgacctacgcgctggtgtacgccggcttcgcgctcgctcgccacgcgtggacgccgtgggcgctcttcgtcgcgtacggcgtcccgtacgcgctcacggaggggctcgcacgggcgttcgtcgtcgacctcgtccccgagagcgtgcgagcgaccgccatcgggacctataccttcctgctcgggctggccaccctgctttcgagcaccgtcgccggcatcctctgggacgccgtgtcccactcggcgccgttcgcgctgtcggcggcgctcatggcggcttccgccgctgccctcgcgctcgctcgcacgctccgcagcccgggagtatgatgagcgtggagggcgatccaagggggtgtgggagatgaacctcgccggaggcaaggcggtcgcggtgatcgccgccgtggccgtgggtgcagcagtcctcggcggagcagccgtctacctcgcgacacggcagcgcgagccagcgcagccgccatcgagcagcgccgagcagacgcagacgcccgagcccaccacgacgccgtcgctgccgtcgacctcgacagcgagcgaggagccgacgacgccgagcggttctgccgcgacgacctcgtcaggcacgacgcgctcgacagacgtggtggaccagccgacgctcgtggtggactggagccgctcaggaggccagatacgtctcacgctcgactacgtgcaattcctgttcggcgacgacgcgaaccgcgaggcggcccgccgaggcctcgaggtgccggtgccgaacgactacctcatcgtgaacgacaacccgcggctgcgcgtgttcccagtcaagcccgatatcatggtgcacgtgctgtacaacgacgacgggacgatgtcgttcgagggccgcgacatcacgctggacgagtggtactcacggctgatggggccgctcgcggaccagtactcgagcagctacttcctcgtgacggtggaagacggcgtcatcacgaaggtcgcgcagcagtacacgccgtagcgccgcgtacgcctagcgccgccgcttcttgacgccgtgcgtcgagccgcgacgcgcgccctgcttgagacgcgcgagcacctcgtctgcgctcgtcgcgtcgatctccgctcgcagcttcaccacctggtcgcgcaagcgagcggccgtctcgaagtcgagcgcctcggcggcggcgtgcatctcctcctccatcgtggcgatgatgcgcgccacctcgtcgcgcggaagcgtcgccaggtcgcgtgccacttccaccgacggctcgagcccggcttcggtctcccgcacgtactgcgcgatgtcgtggatggccttgcggatcgtcttcggctcgatgccgtgctcggcgttgtacgcgagctggatggcgcggcggcgctcggtctcgtcgatggcggtgcgcatggagtccgtgaccgtgtcggcgtacaggatgacctcgcctgagacgttgcgcgcggcgcggccgatcgtctggatgagcgagcggtggttgcgcaggaagccctctttgtcggcgtcgaggatggcgacgagcgagacctccggcaggtcgagcccctcgcgcaggaggttgatgccgaccacgacgtcgacgacgccagagcgcaggtcgcgcaggatctcgacccgctcgagcgtgccgatgtcggagtgcaggtaccgcaccttcacgccgtgctccgcgaggtactcggtgaggtcctccgccatcttcttggtgagcgtcgtgacgagcacgcgctcgtcgcgctccacgcgctggcggatctcctccatgaggtcgtcgatctgccccttcgtaggccgcaccacgaccttcgggtccacgagccccgtcggccggatgatctgctcgacgacctgctcgctcacccggagctcgtagtcgccgggcgtcgccgacacgaatatcgtctgcggcacgcgctcgcggaactcgtggaacgtgagcggccggttgtcgagggcgctgggcagccgaaatccgtgctcgacgagcgtgatcttgcgcgaccggtcgccttcgtgcatgccgtgcagctgcgggacggtcacgtgcgactcgtcgatgatgcacaagaagtccttcgggaagtagtcgatgagcgtgtgcggcggctcccccggcttgcggccgtccaggtggcgcgagtagttctcgatgccgctgcagaaccccatcgtctcgaggatctcgaggtcgtaggaggtgcgcatctccagacgctgcgcctcgaggagcttgccctgcgctttgagctcggccagccgctcgcgcagctcctcgcggatcgagtcgagcgcctcctggatgcgctcgggccgcgtgacgtagtgcgtggccggccacaccggcagcgactccagctgctcgacgacctcgccggtgagcgggtcgacctcggcgatcgcgtcgatctcgtcgccgaagaactccacgcgcacgaggttctcggcgtacggcgggaagacgtccacgacgtcgccgcgcacgcggaaggtcccgcgggccgactcgtagtcgttgcggtcgtactggatgccgatcaggtcgcggatgagctggtcgcggtcgtactgcttgccgcgctcgaggaagaccgccatgcccgcgtagtcctcgggcgagccgatgccgtagatgcacgacacgctcgcgacgaccaccacgtcgcgccgggagagcaacgcggcggtggcggcgtgccggagcttctcgacctcctcgttgatcgaggcgtccttctcgatgtaggtgtcggtcgtggggacgtacgcctctggctggtagtagtcgtagtacgacacgaagtacacgacggcgttgcgcggcatcaggtcgcggatctcggatgcgagctgcgccgcgagcgtcttgttgggcgcgagcacgagcgtgggcttctgcacggcttcgatgaccttcgccatcgtgaacgtcttgccggagccggtgacgccgagcagcgtctggtcgcgcatgccctcgcgcacgccgcgcgcgagctcggcgatcgccttgggctggtcgcctgccggctcgtactcggagatgacctggaactccggcatcagcgcgcctccgcgaacgcgtcggggtagagccgtgcgtagcggtcgcgctcgtcgagcacgcgctcgacgtaggcggccgtctcggggtaccgtgccttcgtgagcgtctcggtcccctcctcggccatccaccgcccgaccgtccctgcccccgcattgtacgccgcgagcgccgtggcggtgtcctcgtagcgcgcgagcaggtccgcgaggtgccgcgtgccgatggcgacgttgacggccgggtccttgaggtcgagccggtcggcggggatgccgagcgaagcggcgacttccttggccgtggccggcatcacctgcatgagcccgaccgcgccggcgcgtgacaccagatccgggtcgaagccagactcggcgttgatgacggccgccacgaggtacgggtcgatacggttggcgtcggcagctcgcgcgatctccgcctcgtagcgcagcgggtggtagagccgctgcgcccacaccggcccgcgcgcggcggcagccgccacgagcgccagcacggcgaggaccgcgagcagccacgcccggtgcggtgcaagcacgcgatcacgagaagcgcggcgcgatctcacgctcgaagaactcctccacggcacgccggaacgcgtcctcgtcgccgtcgttctcgatgacgtagtcggcgattgaacggcgctccgtgtcgcttgcctggcatgccatgcggcgctcggcgtcgacggctgacatcccgcgcgcggccagccgctccaactgcgcgtcgtctgacgccgagatggcgagcacggcgtcgaacaggtcgaggaagcgcggcgcctcgtacagaagcgggatgtcgacgaccacgacccgcggcggcttggcctgcgccgcgagcgcgtcgagcgcgcccgcgagcgcggcgtacaccgctgggtgcacgatggcgttcagccgagcggccgcctcgggcgacgcgaacgccgcctccgcgagcgccgctggctcgatgccgccgtccgcggagcgcaccccctcgccgaacgcctccacgatcggctccacgaccggcgagcccggctgcagcagccccttggcgagatcgtcggcgtcgatgacgaccgcgccccgttcggccaggacgcgcgccgccgtcgacttcccggctccgatgccgccggtgatggcgagcacgtacatcgttcctccagaacacgcagggccggctgccctcgcggacgcgccggccctcgcgattcgtcagtcagccgctactcggctgcgggatcctcttcggccggctcctcgtcgctggcctcgggctcctcggcctccgctgccggctcctcgggcgcggcctcctcagcggcctccgcttccgccgcgggctcctcggcagcagtctcagcggcctcggcctccggcgcctcctcggcttccgcttcctcctcggtctcgggaatcgcgtcctcgatgccgagctcctcgttggcggcgcggatcgagagcgagatgcggcgccgctcggggtcgatctccatgatcttgacctggacctcctggcccaccgtcacgacgtcctcagccttctcgacgtggccgcgcgccatctcggagatgtgcacgagaccctcgacgccctcgccgatctcgacgaacgcgccgaacggcacgagcttggtgaccttcccgctcacgagctgaccgacctcgaagccctggacgagctgcttccacgggtcttcctgggtctgcttcaggccaagcgagatgcgctcgcgctcgaggtcgacgtcgagcacctgcacctcgaccttgtcgcccaccgacacgacctcggacgggtggttgacgtggctccacgagagctcggagatgtgcacgagcccgtcgatgccgccgaggtcgacgaacgcgccgaagtcgacgatcgaggagacggtgccgggcaggatcatgcccttgacgagcttgctcaagatctcctggcgctcctgcttgcggtcctcctccagcaccacgcggcgcgagaggacgacgttgttgcggttgcggtccatctcgatgatgcggcactcgagcttctcgccgaggtacgcgtgcaggtccttcacgcggcgcaggtcgacgagcgacgccggcaggaagccacgcagcccgatgtcgaggatgagaccgcccttgacgacctcgatgacctcgccgacgacgttctcgcccttctggaacttctcctcgatctgcacccacgcacgctcgtacgcggcgcgcttgcgcgagaggatgagccggccgtccttgtcttccttctgcaggacgagcgcctcgatggtgtcgccgaccttgacgacgtcgctgggatcggcgtccttgcggatcgagagctcacgcgcagggatgacgccttcggacttgtacccgatgtccagcaggacttcgtcccgctcgaccttcacgacggttccggtgacgaggtcgccgtcatcgaagtcggtgatggtgccgtcgatgagggcgtgcatctcctcgtcggtgtagtccttgtcctgctcgatgatgctgtcgttctctaccactctggtggcccctttccgtatggggccccgatcctcacgtactcgtgtctcggtcgactgctttccgtacatgcatctcgggggcctacagtactcctgcctgtgcgggtctgcacaagcccgatgatggtaccacgcgagggcgtgtgttgggtagtgcgcagcgtgagacggcccgggggcagtcgcagagacgacggaaggttcagccgcttgagttatacgccgatttggtgcatactgcgtataaccgcgtgggaggccgaccatggagcgcatgccgctcgagacgcagactctgtgcgcagagctcgtcgagcgcctacggacgttcgaggcgatgcgttcgctcgggtattcgcccgggaccttcacgctcaagacagtcaaaggccgccagtactactacttccaacagtcgctccctggaggaaccaagcgccagacctacatcgggccgaaatccccagacctcgacgatctcgtcacgcggttcgccgagacgcgtgccctcgccgagtctgacaagcgttcgatcgcccggctcgcatcgctcgtcagggctggcggcgggatggtcaccgactccccatccgcgcgtgtgatcggagcactcgccgacgccggcgtcttccggctcggtggagtgctcgtcggcacgcacgccttcgtcgcaatcggcaacctcctcggatggcgctggtcttcgtcgctgaagacgctcgacatcgacatcgccgcagatccgcggatcaccgtggcggtcccccacccttcagccgacgtggcgacggcgttggagcgtctcaacatgggattccttccggtccccggcctcgaggccgacagccctacgacttcattcaccgttcggggaaaagggctcagggtggacatcatcacgccggcccgccgcgaatccgatcggccggtgcacatccatcacctcggagtcgctgcccagccgatcagacacctgtcgtatctgatcgagagcccagtcgagggcgccatcgtcgacggagatgggatcctggtgcgcgtccctcaaccagcgcggttcggtctgcacaagctgctggtgtcgcggtctcggcctgccacccagcaagccaaggcgtgcaaggacctcgagcaggccgcgcaggtcttgcgcgctgtcctggaggatcgtccaggcgacgtcgaacgtgcctgggacgccttcctcggcgagggtcgccgaagcgtccggctggtgcgcgaggccgtcgcggcgctcaaggacgaacagccggagctcgcgctgaggctcagggccataacgggctgacgcgacggcggtcgtccatcacgccttcgccgcgccgcctggcctcgatcagcggacagcgcacgaagcgaggcagttcttgacgaacgacaggactctgtgctatctgatggcttgcagggttcccatgataacgctgttggctcagccttcagcgcagcacggtaagcccccggagcatacgctcttgggggtatccgttttctttggcccgaatcagaaccgctcagccccctctcgtccattggtgtcagaccgatgggatatgctgtaattcaagcatgtcagcgtcgtgctgcacgtcgaagcgggggtgttcgtcatgcgctattcgttgggtctcgacatcggcagcgagagcgtcgggtggagcgtcgtcgagctgaatgaatccgatgatccgatccgtctcgtccggctcggcgttcgagcgttcgatgcggtgcggagcgaggcggcaaacgccaccacgcctgccgaggaacgtcgcgtcgccaggagccagcggcgtcggctcaggaaccgcaaacggagactgcgcgagatcgtgaacctgttcgctgagcatgggcttgtcggcagccgtgaagagcttgaggacgtgttccgcacgagacccgacgacttgacgccatggcagctcagggtccaagggctggaccgcagactcgaaccacgagagtgggcgcgcgccctcttccacatagcacggcaccgcggattcaagtccacccggcgaggcgagatggagacggtagacgccgaagagaagaagaagctgggcgagatgttgagcggcatcaagtccatccatgacggcatggtcgcgcatggctatcgcacagtcgccgagtacatggagtcccccgactggccacacggtgagcagcgcaggaacaagggaggccagtacatctgcaccatcggccgcgacgacttgctcgcggaggctcgcaccctcttcgacactcagcgcagactcggcaatccgcacgcctctctcgagatggagcagcggtacatcgagatcgtcgacgagccgccccacctcaccgagggcccagacttgatgaagaaggttggccggtgctttctggagcccgacgagcctcgcgcacccagggcgaccttcactgcgcagaagttcatggcgctccagacgctggtcaatcagacgctcacacactcctcaggcgcgcggcgccgactggatcccgaggagatcgcgcttctgttccaggaggcgctcgaagtcaaggatctgaagtacaagcgggcgctcaaggcgctctgcgcagacgatggatggctcttcgaggtgcgagggcgcaagcgcggcaagacgctagcggacatgcaaagcgagacgctcctcaagctggagtcctaccacaaggtgcgtagcgcgctcgaagacgacttcccgcaggcttgggagcagatacgatcgaaccccgatctcttcgacgaaatcgcgagccgactcacgtattggctccgaccagattcggcctataacgcgctgatcgaacttggcatcgaggaaggcgcagcacgggagctcgctgactcggtcgtcttcgatggccacgcacggctgtccctgaaagcgatgcgcaatctcattccgtacctcgagcaaggcaaggtctatagcgaagcgtgcgagttggcagggtacaaccactcgctccgacagacaggcgccaagtccgacaggattccgcctctcgacacgctcgaagacttcaactcgatcacgaatcccaacgtgaagcgtgccctcacgcaaacacgcaaggtcgtgaacgcaatcgtcgctgagtacggcttgccgtctcgggtggtggtcgaacttgcacgcgaggcggcgctcagcccgcagaagcgccgcgagatcgagcaggagcagttgaagaatcgccgggagaaggagcgcatcttcgaccggatccgcgaactcgcgcccgccgccgtgcccgagcgcgtgtggcgcaagtacctgctatacgaacagcagggcgggaagtgcgcgtactcgcttcaggacttggatctacgacgcgtgctcaccgaccagacgtacaccgaaatcgaccacgccataccgcgcagcgtgtccttcgacgactcgatggcgaacaaggttctggtgctcacagaggagaacaggaacaagggcgacgagcttgccgccgtctacgtcaagcgcgctcacggtgatgcgcacttcgagcggtatgctgcgtgggtccaaagctcaccgatgccgccgaagaagaagcggctgctgctcacagaagagctctcagaagaccagaaacgcgagctgcaaggacgatacctgacagccacgcaattcgctgcaaagtacttcctgcgcatcgtcaagagctacctcgacctgccggagacacgagtgcttgcggtcaatggcagaatgacgaacgacttgcgctggcgcctcgggctcggcgaagaaaagaaccggcaagagagcgataagcaccacgctatcgacgcgacactgtgcgcgattgctgatcacaagatggtgcaccgcatggctcggtacttcaaggcgcgcgagcgatgcgagaagacacccgatggtcgctggatcgatccagacaccggcgaaatcgtcgagccacccgtgcttgagccgtggccagagttccgcgacagcgtgattgctgcggccgaacagatcgtggtgtcccgcatgccgaaccgccggctatctggccgagggcacaaggagacactctactcgctcaagcacgttcgcaaagcgctgggagaactgcccaagcggggacgggtggcgctctcgggcgcagacccgcggccaaccaagcgcacgaaactctcacagctcagcgactcgcaaatccgcgagatcctgaagactccgtcgccaatcctcgttgacgaggaagcgaactggcggttgtacgagctcattcgccaacggctgcgtgaagcggagcatgagaccggcaagacctgggccgagcgcgcattcggcccccaagccgagccgctcaggatgccgacgaacgacggacgcccaggaccgatcgtcaggagcatccggctgttcacggacgcacgctcaggcatcgttgtccgcggcggaatggcagagaacgacaccatcgtgcgacttgacatctacaggaaagcaaacagcgcggggaaggtacggcactacgtggtacccgtgtatgccgcagacgtggccgcaggatggataccgaaccgtgccgccgttcagggcaagcctgaatcggagtggcccgtcatggacgagacgtatgagttcctcttctcgcttcacccgggagattgcttccgcgtgtggaagaacgagtcccagccaggtccgttgctgtatatgacttcgtttgatcgaaacagtgtgaggatttctggcaatctccacgatcgctcgaaccggaagccagacggaacgattgatccggttcgagtatcgccgaagctcgcacatcgaatcgagaaagtcgaggtcagcatcaccggagagattgcacccgttagacggaccggtaagcgacccgcataggattcatggctggctggcgcacactcgtcgtcacgtccgaagcgcgcctggtggtgcgcaacggcagtctgcatctcgagcgcgatgaccgccagctgacgctgcccatcgaggacatcgacgcggtcatcgtcgaatcgccaagaggcagcatcacgatttcggttctgagcgaacttgcccaacgcggtgtcgccctcctggtggtcgacggcaagcacaccccatgcggcgtgctgcttccctacgcacagaacccgcgcatcccttcactgctgaaagcacaaatcgaactcacagaacccttcaagaagcgcgtttggcaaagaatcgtccagcagaagattctcaacgcagcggcctgcctcgacgtactcggcaaacagggctcagaaaaacttcgagaaatcgcagcgtcggtgaggtccggcgactctactgccagagaggcttacgcggctagaacgtacttcaagttgctagaacccggtttccgcagacgatcggattccgcgctcagctccgcgctcgactacggttacgcgatcgtacgtgccgcagtcgcacgctctctggcatccgccggattgcagtgcgcgctgggggtgggccacaggagttctgccaaccccttcaaccttgctgacgacttcgtcgaggtgttccgtccttgcgtggacttgatggtcttcgagcagcctcccgaggccgatacaccactcagcacagactatcgttcgtatttggtctcaatcttgcgactcgaatgttcgatacatgggagtacctacacggtgtcgacggcagctcaggagattgcggagtcgtacgcccgtgcaatcctgtctcgcgactatcgagcgttggctcttcctgagctcgtcggcgatcaggtgcgccgctatgagtaggatgaggatgagccgacttatgcggctgattgtcttcttcgacttgcccgtcaagacgcgacgggacaagcggaactactccgagttccgccgattcctgctgcgggacgggtactatccgatacagttctccgtgtacggcagggcatgcggaggattggatcgcacagacatgcacctcgctcgcctcaaagcccatctaccgccaagaggcagcgtgagatgcatggtggtcaccgagaagcagtacgcctctatcgaggtattgcttggacagcaaagaccagaggaaaagcagtgcgaatacgagcagctgaccttctaaacactcagatttccgacagaatagagccccagatcagcatcctgacctggggcttttccatgctcagatcttagcatggatgggtttgcagggaacccatgaccggtgctgcgttcgtggccggccttgctatgatcttagcatggatgggtttgcagggaacccatgactggtagaaaggagtggagatgctgaagttggatcttagcatggatgggtttgcagggaacccatgacggacgtggcgccgctgtagggatcgaccatgatcttagcatggatgggtttgcagggaacccatgacagcacccgcgtgctcggcaccttctcggcggatcttagcatggatgggtttgcagggaacccatgacggaggtggggagatgccgaccagtcacaaggatcttagcatggatgggtttgcagggaacccatgacgtctctaagcgcggttacgatcacgagcatgatcttagcatggatgggtttgcagggaacccatgacatacacccagaaagaccgcgagctgctccagatcttagcatggatgggtttgcagggaacccatgacgttccgtgctctctcctgagcagtcctacagatcttagcatggatgggtttgcagggaacccatgacgtctgcaccatcgacggcatcggccccgacgatcttagcatggatgggtttgcagggaacccatgactccgtgaacaccatgtccacgctctcaggcgatcttagcatggatgggtttgcagggaacccatgactgggcttcgtgccgttcgtgccgcacctgtgatcttagcatggatgggtttgcagggaacccatgaccgcatcgaggcgacggactgcgtgttcgagatcttagcatggatgggtttgcagggaacccatgaccgtgacgctgcgcgaaagcgaccatcgcgagatcttagcatggatgggtttgcagggaacccatgacgaggtgcacatcggctggcgcttccggagcgatcttagcatggatgggtttgcagggaacccatgaccgattcgtgggactggtgcgtgctggtgtggatcttagcatggatgggtttgcagggaacccatgacttctcagcacgagagtgcgccggcgctgctgatcttagcatggatgggtttgcagggaacccatgacggatgttgtcttcgtctccactctcgttttgatcttagcatggatgggtttgcagggaacccatgactgtcaggggagcaacctgtggccgcctcgcgatcttagcatggatgggtttgcagggaacccatgactgacacgtggataacgtcgcacatcatgcagatcttagcatggatgggtttgcagggaacccatgaccacaccgggcacgcgcttgccgtccttagtgatcttagcatggatgggtttgcagggaacccatgacgactcaccatggggctatctgcagatcaaggatcttagcatggatgggtttgcagggaacccatgacgcggcgcaggcaccgcccctgctccgcgcccgtcctacgggagctgcgacagcgggtggcagttcaggcagaggtcgtctgtggacgcggtgacggtggcctcgacgagcatccggtagttctgcgtctcgtgcgggaagcactggaagagagggttgtccgtgccggggtcgccgctcgtgttgccgtcgccgtaccggtacaccgccgccggagcgacggctcccggctccccgacgatgcggctgtcctcgtggcactgctggcagatcgggtagtgccctgactgcgcgggcgtccgcggatacggcatgacgaagccgcggttgtgccagatcgcgctcggaagcgagcccggtatggcgttgagaagcccgagcgtgccgtaggtggtctccagcgacgtgtccgtggtgacgatggcgacgcgatcgtagtagaacggcgtggcggtcacgagcgtggagtcgaccgggtggttgttcaccatgccgccgctgcccctgcccttgtggcacccgaggcaccagtccgacccgtagacggccgtcggcgtcgtcgcgcctgtgggccgctgcttgagtagcttgtcggtgctccagtacggcagccaggtcaagtccgacgcgtggaagcggatgcgttctccgctgaaggtcgcgaccacgctcgaggcatgcggcgagtggcagtcgtcgcacgagaggtacccgttcgcgccggtgaaggtggtgatcgccgagccgcccgtcgcagcgtcgccgccggggacgaggttggtggtctcgatcgagtggtccgcccccaccgtcagcccgcgcgcggcgatggcgccgtagacgccgtagccgccggtcccgtcgtggcagtgacggcaggtgccgagcacggtcgacttcgggagcaggaggatgccgtcggcaggtgcgacgtgcaccgtgtggcagacttggcacttctgcgtggtggtggtgtatccgccgtgagggccagagcgggtggtgaagaccgggaagtcctcggcgtggcacgccgggcaatccatcaggtcgccgtcgtacgtgacgtcgccctcggcccacccgaacgccactgagcacgccgcggtcgccatgagcgccacagcagctgcgatagccggacgcgccttcatcgcgcctcccctcggctcgacgataggagtatagcacgggatgatggggtggctgacaggacgaccagtttcgccagcttgtgaagagcggacttgcagcctacttcgcgctcgcccagtcaggtccccaggcgacgctcacttcgagcggcacggcaagctcgaccacgcccgtcatcgcctcgcggagcatcgccgcgagccgctcgacctcgccctcaggcgcctcgaagacgagctcgtcgtgcacctgcagcaccatgctcgcggcgaatccgtcttcgcgcagccggcggtcgacctcgatcatcgcgagcttcatgatgtctgccgccgtgccctgcatcgggtggttcatcgcggtgcgctcgccgaacgagcgcaggttgaagttcgacgacttcagctcggggatcggccgcctgcgcccgaacatcgtgacggcgtagccggtggcgtgcgcgtctgccacgagccggtcgaggaacgcgcgcacgccggggtacgccgcgaagtagcgatcgatcatctcctgcgcctcggtccgcgagatgccgagcgactcggcgagcccgtgcgcgctttggccgtacacgatcccgaagttgacggccttcgcgcggcgacgcatctccggcgtcacggcgtccggctcgacgccgaagacgcgcgaggccgtcgctgcgtggaagtcgcgcccggaggcgaacgcctcgatgagcccctcgtcgccagacaggtgcgcgagcacgcgaagctcgatctgcgagtagtcggccgacaccatgaggtcgccggggcgagccggcacgaacgccgcgcggatccgctgcccgagcggcgagcgcaccgggatgttctgcaggttggggttgctgctcgagagccggccggtggcagccaccgtctggttgaaggtcgtgtggagccgaccgtctgcccccacgagccgcggcagcgcgtcgatgtaggtgctcttgagcttcgtgacctcgcggtactccatgatcttcgcggcgatgggataggacggcgcgagcgcctgcagcacggaggcgtcggtggaaaagccagtcttcgtgcgcttgccggccggcagctggagcttctcgaacagcacctcgcccagctgcttgggcgagtcgatcgtgaactccacgcccgcgaggtcgtagatctcgcgcttgagccgctcgacctcagccgcagtctcctccgcgagcgccgcgagcacgctcgtgtcgacgccgacgcccgcctcctccatgcgcaccagcaccggtacgagcggcatctcgatccgccagaagacctcctcggagcccgtctcggcgagcttcgcggcgagcaccggcgcgagatcggccgtcgcgcgcgccacctctgcggccgacgcggaatccggcagcgcgcgcccgaggtacgcggccgcaagcgagccggcgtcgtacgaggagcggttcgactccagcacgtacgcggcgaccccgcagtcgaagcagcgcgcgggatccacaccgtccgcgccgcttctgtcgcgcgacgccacgctcccgggcgggcagtcagcctcgagaagcgccttgaggtcgaccgccgcgacgcgcgccttcgcgagcagcccgcgccacgcgcttccgcgctccggcggcagcaccgccacgacgccgcgcgccgctaccgccacctcagcagcgtcggagaagagctggcccgcgctcccgccgagcgcgactcccgcccactcctccggcgggtcggctgcaagcgcctccaccgccctgagcgcctcggcaccctccagcgtccgccacgcggcctcgatgctggctggggccgcagccgggggccgctccccgccctcgcgccgcgcgatcgcgagcacgcggtcgacgagcgaggtgaacgcgagcgcagacagcgccgccaccgcgcggtcggggtcgaagtcgccccagctcgacgcgagcggcgtcgaatcgagcggcacgtcgcggcggatggtcgccacgagcttgctcgcccgtgcggcgtctgcgtgcgcgcgcaggttctcgccgagcttgccggggatcgattctgccgctgcgagcaccgattccaagtcgccgtgctcgcccagcagcttcgccgccgtcttctcgccgatgccgggaacgccggggatgttgtcggaggcatcgcccatcagcccgagcaggtcgggcacgcgctcaggcggcacaccgaagcgagcgacgacctcgtcgggcccgtacacctcgatgtccgtcagccccttgcgcgtgcggaccacgcgcacgccgtcctcgatgagctgcagcgcgtccttgtcgccggtcacgagcagcgccgagtcgccctgctcccgcgccatgcgcgcgagcgtgccgaggacgtcgtcgccctcccagccgtcgacctccaccaccggcacgccgagcgcggccaagagctccttgaccatcgggaactgctctttgagctccggggccgtcggcgggcgttggatcttgtacgcggcgagcgcctcggtgcgaaacgccggcttgcccttgtcgaacgccaccacgaccgcatccggcttgaggtcggccgccatcttcagcagcatcgtgaggaagccgaacacggcgttcgtcggccgtccgtcgggagccgtcatggtgggcggcagcgcgtgaaacgcgcgatggagcagactattgccgtcgacgacggcgatcgtgcgctggggcatctcgtgcgcctttcgggtacgaacgagcaaacggaccgcgtgaccgattctacccggaaggaccgacgtgggcttcttcaattgggcggcaccgctcgtgcgccgctacggcgattgcgaagcgctcacgcgcggcagctatcgctttctcggtgccgtggccaagagcgagccggccgcgtgaggtcggcggctcagctccgccacaggtagccgacgttgcggaccgtctccaggcgcgcggcgagctctggcccgagcttggagcggacgcgccgcacgtggacgtccaccgtgcgcgcgccgccgaagtagtcgtgcccccacacgcgcttgaggagcgcgtcgcggctgtagacgcggttcgggtgcgtcacgaggaacgcgaagagcgcgtactcgaggtaggtgaactccaccggctggccggcgatgtgcgcttggtaggtggcgaggttgagcgtgaggtctccgatccgcacgatctccgagccggccgcctcctcgcctggccagagcagaagccgagcgcgtgcggcgacctcgcttgcggcggcgtcccgcaccacgaagtcggcgggcacccccacgggcagccgcagccccggcacggcgtcgtgctcgaccacgaggagcagcggcagcggctcgtcgctcgctgcgcggcgctcagacgccgcgacgatctcgcggctgtcgtgaccggcgtccgcgatgagcagcgccgcgtccgacaggcgctccggacgcagcgcggcctcgcgcgggagcacggtcacggaggcgtcgagccgctcaagcgcctcgcaaagccgggcagcgaggtgctggtcgtcgctcgctatcgcgatagtcttcacgtgcgccatcatacccgctgctcgcctccctcccgatagcgcgggcgccggacgggagacccgcccggcgccgttgccgaactccgacgaccgcttagaccaccgacaggtagcggtcgagctcccacttggagacgttcttgatgtagtcggcccactcggccttcttgttctccacgtagaacgcgtggatgtgctcgcccagcacctcgcgcatgagctcggagtgctcgaagcgctcgatcgcctcgccgaggttcttcggcagcgtcccgatgcccgcctccgcgagctcgtcctcggtcatctcgaagatgtcgttggtggcctccggcatgagttcgagctcctcctcgatgcccttgagacctgcgcccagcatgaccgcgaacgcgaggtacgggttgcacgaggggtcgggcgagcgaagctcgatgcgcgtcgcggcctccttgcccggcttgtacatcggcacgcgcaccatcgcggagcggttgcgctgcgcccacgagatgtacaccggcgcctcgtagcccgggacgagccgcttgtaggagttcacgagcgggttggtgacggcgcagaactccggcgcgtacttgagcagaccggcgatgtagtgccgcgcgatcttcgaaaggtgctgcgggtcgttcgggtcgtagaacgcgttgccgtccttcgtgaacagcgactggtgcgtgtgcatgcccgacccgttctggccctcgatgggcttgggcatgaacgtggcgtacacgccgttctgatacgcgatctccttgacgacgaggcggtaggtcatgacgttgtccgccatcgtgagcgcatcggcgtaccgcaggtcgatctcgtgctgcgacggcgcgacctcgtggtgcgagtactccaccgggatgccgagcttctcgagcgtgagcaccgtctcgcggcgcaggtcgctcgccacgtcgagcggcgtcaggtcgaagtagccgcccaagtcgagcacctcggtacccttgtcgttcttgaagtagaagaactcgagctcagggccgacgtacatcgtgtagcccatcgccgcggccttgtcgagcatgcgcttgagcgcgtagcgcgggtcgccctcgaacggagagccgtccggcttgcgcacgtcgcagaacatgcgcgcgacgccgacctcgccggagcgccacggcagcaactggaaggtgctggcgtccgggaacgccaccatgtcggactcctggatgcgggtgtagccgtcgatcgaggagccgtcgaagcccataccctcctcgaacgcgccttcgagctcgctgtcggtgatcgcgaacgacttgagcacgccgagcacgtcggtgaaccagaagcggatgaacctgattccgcgctcttcgaccgtcttgagcacgtagtccttgtcgaacctcgtgatcactggatcctccttcgccttcgctacgccggctcctcgccggcctcctacgcgtccaccgccatgctcgcgcacgcgtgtttccaacgtgtttcgagcagaagaactcctcgcgaacagcgccttagaggtaggcgtagagcttgccgtacggccggtggctcaccggcgcgatccgcgtgaagggctcgctcaacacctccgccaggtccagccccagcgacgcgcagtactcgtcgaggaccggcgtgagcgctgccatgtcggcctcctctgcttcgctgacgccgacctctttgccgcactgccacggctcgacggcgccgcgcacgtagatgaccccgccgtgcattccggtgccaaggaagccgcctgccaccgggtcgtccgggaactgcgtgttcatcccgagcagcacgagcatgccgcccgccatgtactcgccgaagaagtcgcgcgccttgccgccgcacacgacgatcggcaccaggccctcgtacgccttcatgtggattccgacgcggtagcccacgtcgccgcgcacgaacacgcgaccgccgcgcatgccgtacccgagcacgtcgcccgcatcgccgtgcacgacgaccgttcccgacgccatggtgttgccgacgccgtcctgggcgttgccgaacacctcgactttcgggccgtccatgaacgccgcgaggtcgttgcccgcggtcccgcgcacctcgatcgtgaggtccttcgcctgaagccccgccccgatgtagcgctgcccgttggcattctcaacgacgatgcgcttcgcgcctgcctcgaccgcggcgcggatggcgtcgttcagctgctggtagtacacgccgttcgcgtcaaagacgaccgcgtcgccttcggtgcgccgcgccggctcaacctggcggtaaccctcgatgacctggatcggcatcgctcctcctcacatccccgcgggcttcacgcccaagatgcggctcgtctgctcatccagcccaatcgagcgcagccgctcgcggctgccgcgcaggctctcgatggcgttcacgccgagcgcgcccaagatctcctgcagctcg

SEQ ID NO: 3353 - DNA, 15897 bp, synthetic construct
  source 1..15897: mol_type = other DNA
  misc_feature 1..15897: note = Synthetic
gattgtggtgaacaaggcagattccggcggagaaagcttgattgacagcctgcgcgaggttctcggcctgcaggggacgggcggcagcccagcggtggtggccacagaagcggtggaaggccggggtatggatgagctgtgcgaagagctctgcctgcgctgggacggtaaggaccccacacggcgctagtgccgggagaaagggggacaacatgagtgacagtgatatcgagcggattgccgagagcgagaaacggtggcgggaaacctgtcttaccccgtacgtaaaggagaacccggagcgagagatctatagcgaaatccccaccaaggtgctttacactcctgtggaccaggcgggaagcgactatctcagggacctagggtttcccggggaatatccctatgttcgaggcatagcgcccaccatgtaccgcagccacgtttggcctatgtcggattacgcggggtttggcacgcccaaggatacggcagagcggcaccgctacctgctcgccgagggtaacacccagatggccattgcttgtgacctacccacccagcttggctacgacgctgacgatcccgcggtggaagcggaagtggggcttatcggggtgtctctgtcgtcactgcgggacgtggaggagatgctggccgagattccccttgacagggtcaccataagaggatcgacaagctctttggtgctggtcctgtgggcgatgtacaccgtggcggcggaaaagcgcggctatcctcccggccagctccgcggcgatgccaagatcgacgtgatggacgagtacctgggcagaggcacctacatcttcccgccggagcatagtctgcgcctgagtctcgacttggtggaatacggccttaagaacatccccagccttacctaccagatcaactcttacaccattcacgagcagggttccaccgtggtccaggacggggcctactcaattgccacggcgcttttctacctggaggaggcgcgcaagcggggaaccatcgacgtgggcgagtttgccgcccgcatctcccatcacccggccatccatacccacattttccaagaggccgccaagagtcgggctatgcggcggctgtgggcacggctcataaaagagaggtttgctccctccaacccggcagcgctgcgctgcgtcatcgatcccaacaccggcggttcggtgcttacggctcagcaggccgagatcaacattgtgcgtatcgccctagagattctggccgcagctctgggcggctgcaccgtgatcgcgccttgctcctacgacgaggccttaaccatccccacgaagaaagcggtcaccatgtcgctgcgggctcagcagatcatcgcctatgagtccggggtgtgcgacaccgtcgatccgctgggcggctcgtactacgtggagacgctcactgatgagatcgagaaagagatggaggcgttcatcaagaagattgaagaccggggcggcatgcttgaggtcatccgctcggggtggttgaagcgggaggtcgagcgcactgcctacgccaagcagaaggcgcttgaagacgggcggctggtccgcgtgggcttgaacaagttctgtgtggaggaagacaccaggtttgagctacatcgtcacgaccccgagctcgtgaaaaggcggaaggaggagcttcgtcggctgcggggggagcgcgacccggcagcggtggagcgggccttacgggagctagagaaggcagcgcgaggcccggagaacctgatgccgtacatgcaggaggcggtcagacactacgcgaccatcggggaaataaccggggtgttgaagagcgtctttggcgagtacaagccagcgcgcggctccttgtgagtgctgctcgcgcgaacggggacgcggcggtgggctccgccgagaagcagggttgaggcagaagatggccaaggttgaaaacgcgtttgtggacttcatcgtgggcggggattttcacgacctgcccgcggaagcggtgggcatgattaagaaggtggtgctcaatgacttgggggcggtggtagggggcgcaaccagcgagggttgccccgagctcctggagatggtgacccgctggggcggtcgggaagaggcgacagtgctcgtccacggtcagcgcgtgccggctcataacgccgctttggtgaacggggttatgatgcgcgcgcttgatatcgacgatcacatgccgccaggcatgcacgtcgggggctcggcccttccggcggctctggctgcagccgagcttgctggcggttgcagcgggagagagttggtgaccgcccttgctctcggttttgagatggccgtccggataaatgagcagtcccactatgacggctttgatccctcaggtgtgtgcggcatctttgctgtcacagcggccgccggccgtatcctgggcctggggcgaacggagatgctcaatgctttgggattgggattcacaaggccggttcagacttttcaggcgattgtggatcgcaccacggctgttcgggtggggcagggggtgatcgctcaggcgggtctggtggcggcggagatggccagtggagggatcaccggtccgggtgatttcctggaaggtgtctacggctacttccgcttctatggtgctggtcagtacgactcaagcaagctcttagccggattgggagaggtattccatctcgatagagtggcctttaagaactaccccagttgtgggcagactatagccgcaaccgacggaatccttgaacttatacagagacacgacatcacccctgatgatgtgctagagataagagttaccgttactccttatacttataaaatgacagggaaagattttgttatcggtaataatcccagggtagatgcccaattcagtatcaaatactgtcttgccaacgcccttttgcgcggcggctctttgctcaggcactttgatgaggacttcgtcagggacccgcggatcatggacctcgcgaagaaggtccagatcacggccgaccccagcctggaaggggaggctctaggatcgagcctgcgcaccgacctagaagtggtcaccatatcgggtcaccggtactccatctccgtgcccatccccagtggctttgctggcaatccgctctcagaagagagaatcgtcgagcgcttccgggaggcagcaggctatggaggaaggccgctctctcccgagcaggccgacaaggtaatcgcggctgttcagcgactggacgaggtcgaggatgtccgcgagctggtcgggttgctcgtgtccatgccgattagtcgggccattctggagtaggcctccggctgcactgctcccggcctcatctcatgaatcatgggtaggcgggtcagcttgccctctccttcgatgattcttctcatgcctagcatgaagtcgttgaacttgctcatcggcagcgtgaagatcatctcatcgtccccagccatggcggtgatgtggtcgccgcggcagggcacggccacctgatacttgttctccttgatggcagggacgatggcgtagacacaagccgcatgcccggagagcgcagtgggcaggttcttgcctgtgcggtattcagcggccagcagcaggatgacgagctgagaagagttgcagtagatggtgatgacgtcgggctcaaagttggccttcgctaggggcgcggaaacgacgcctatgtacttgcccgtctccaacctgggaaactgctcggcaaagcgccgcccggcttcgggcgtttccacgtcggcagggtagcgactttccccgtttaggaactcctgcgggggtgccgccatgccgtagcccagcaccggctcaaagcagtacatgtcctccatgagcatggccatggtgtaaccattgcggcgcgagtacgcataagcctggcagacgttgtacagattgccctcgtctctgcgcgggcgcttcgcttcggcgggaatctccgactccgacctaagtagcctaatcgcgaggggataggtttgcaggcgaaggtatctttccaggtcctcggcggctttgtgcaagtcatttaagttggtcacttccactcctctctttgccacgttgttggggggccggccgacgacgggtaggcggggcggcctggtgatgtcgccggcagggtgcccatggcccgatagtgactaccttacaatagtaaacaagagagaagcagaggtgggggagtgaaggcgggggccccgggcgggccgccccgggcccccgccttcaccagctctcggttgagcgcctaggcccagttcttgcggtgccatggtctctacttcagtggcgccacctggatctgcatgaacccgcccagagcgctgatgctttggatggtcaccttggttcccgtgttgggggtgataacgctacctagcgggttcgtcgggtcataccacgacttggtgtcgtcgaacactgagaccgctggcaggctcggcacgggcgaaagcacgctgttgtggtggatgttggggatcccatcggtcttctcgagggagaaggtcgcatcgtaggtctggatgcggttgcgccatctcacgccgtccacccgatacagagtttgcgggtgagcatccaccggcagcaggagaccttgccccggatgtagacctgtgttgttgtcagtctgcgaggtatcccagtagttgataagtagcccgtcctgataggcgaagtgatcaacccagttgccccggtccgggtcgttcagatagccaaagtagtacgggccgactttgaggccatagtcataacccttgtaagtgcggtactcaagcacatagtagtggctcttaagggtcgtctcggtgccagtcgtgacccggaacccacccgagggagcgaacgtccagcccgcatccgtctcggcgccgtcgacaggataaccgctcacggaaatgtcgtcgatcatgaagccaatctctgacacagctccatcagtccagtagcggaaaccgagcagcactggtccgctgtatgccgagagatcggcagtcaaatcgacccagttgccgcccgacgagccggtgatgccgtagccgaggttctggccgttggggttgtcggttgttgagaggttggtcgggatgcttgcccaggtcgcgccgccatcagtcgagaccaccaggtaggcgtagtcccaatcttgctcgatctcgtacctcaccttggcagtcagcgtcgaccccggagccaagtcgaacgacttatacatcttgttgtccaggtcgtcgcccatgccgctgtaatagaacttgtcaccggaatatggtttgccgaggtctgtggtgacgagctttttcggcagaactatgaacactccctgggcttgtttggtgttgaactccatcgggcctagcttatgcacagatttctgaccagctctcgccacttcgtagttcagccagccgagctggaacttctcccaggcgcccatatggcccggcttgttgccaatggtgttcttgccttcgtcaagccaggaaccgctggacatgagtgtccaaaagccggtgccgttctcgccgtagtagtcgtacaggtcagggaggcccatgtcgtgcccgtattcgtgggcgaacacacccaccccgccgtcctccggctgaatggtgtacttgcctacccagtagtcgctatcaccaatctggatgccaccgagtttgttgaattccggaccggcgacgccgatgaggtcgtagtgggcgtaccagctgtggctccagatggtccaagccgggccgccttcttcttcgcccagtccggcatgcaccgactggaaggtgtcgatgtagccgtccggctcgtcgaaatcaccgtcgccgtcatagtcataacggtcccagacgtcaaactggcttagatacgcgttgatttgctccggcgtcttgcccgccgcaatctgcatctcataccagccatcgagcgagtcctcgaggaagttccaaacgttgctatccgggttgtcgtcataggactccgctgtgcccgggcacgtcacccagtcggtgacgtcaccatagactgtgtagcgcccggaggactgctcgaggtagtagttccgcatcgaattggcgcccttggcgtcgttgaacaggatgtccatatagtagtcgcggctaaagtcagggacccagatggacgtgttatcgtaagcgcgatcaggctccgggatgctgttatgcggtaagtctgcgaactcgcccaacaccgtccagatcgctccctcgccctcgcgggccagctcgacgtactgaccgcgggccacttcggccacccgcccgtatgccttgcccttgttgagtttgttctcaagagccacctgtttgagcgcctgttgcttggtggtcagcggatcgggcttgttgtccactttcggcgcaaagctcttgcccgtctggccgtccatattgggcatggcaagcgctcctgccccccatgccagcactagtatcgccgcgaggacgccgaggaccagcagccagcgtcttcctcttgcacccatccttctctcctctctccctggagtaacactcactgacacctggagggtgtagttctgaaacgggcgcagaggcggagaaccgatacctggcacccccaaagtgcaccgctgacctcaggactttgcctccggctgaggatgtatatccagcctggttattcagtgtgctgaacaacactagagcacggcgacgcgggttgtcaactctcggtggaagtgttgcactgagtgtgtgctaggttgcgttgtccggtgaggttgccaacaaaagcctgggctctcgtgacacgcgggctggcgaagcggcctgggggaccggtatgaggagggatccgtactacagggcgatctcctgtctgcgcaactgtgggttggttcttcacgtggcttgttttcggtcagactggcaactgacaattagattgggggttgtttgcgcttgagtaagctctcgagactgagcgggcggctcacccatccagagaggtaggcatggcccctcttgggcactggtcaaagcaaggactgctcaaggaagagcccgaaaatcctgttcgcgtgtgcgaggtacggccttacaacgtgcgagtcttcagattgcagccgcgtgaccctggcagcctgccatctgcggccggcaactcgcatgtacgtgctctgtaatctatctgcgctgtagcccatggcagctcttgtggctgggtcgaatctggctggcagcgcagatgagcccgcatttcgcgagcaccggcgggggcgccccgcgcgccggtatattcgcacaggtagtgctgagctgcgggccaaggatgggctgttccgcgttgaccttgggtgcttcctcctcacttcgccgaaggcgtttgtcattacgcggtcggcagttggtgccggtcattcggcggcgattgtccaagatgctgaggcctttatcaccagatatcccccttcggggttagcacggacggtgcccttgtaacttccgatctcattgactaacaggtcggggaaaagtccgccatattgggtgacagcaaaatgagtatcagctttcccgccgcttatggtgagcttctttgcccccggagcaagggcaaccacagagtcgcctttcccttcgatggtgccgggcacctcaagacggggagcctcggacaaaggcgcctgttcgatggtccaggcggcgctggccttgacttccaaagccaccgggacgcgatcatcgagcgcaactgcaaccgttccctcgtaaggccccaaagtgtttacaagcaggtctatgggctcgttgtcgctgccgagactggtcacggcgaaatgcgtgtactcaccgcctgacgccttgatgcgcaacagggccggtccgtcaagaccctccagtgtgacaatgtcgtccccgctgcccttgtagctcttatgttcgacggccggggcggcgctagtggttgttgtaagcttggttgtgctggtttctgttgtagaagttatgctggaagtggactgctgggtgcttgtttgtggtgtggtgatggatgcgagcgtcgaactgctggccgcaggggcggctggttgaccagtggggctggaggcagaagtcacctctccttccgagctctcgcggctggatgacgcagcggctgcagcgacaatcacgaccagcaccaccacgccgatagctatccataagatcttgcgcttgctcatggtccgtaacctcccggtgctaatcctgttgatgcgttaaatcggcccgtcgcacgttagcagggccatgcaacacatatagcaggtggagcggacagaaaatgcgttgggccggcgggaggggaggctagtcgggcgcgctttcgatccggacgctctttgggtgcggtcacttccggggagctggctcgctttctgtccggttgcggttgtggtatccaactttccgtgcctaggtgcctgattgttctgaggagcctgcaattcagccggtggcttattgtcatttggcggcgcggtaacaatgaggctcagcattattcacggttgtgaggacaacggctgtgtggatgtagcggaggaggacaggtcgttttgacatcaccgcggttggaggctgcacacacgcgcctttgtacccgcttctttgtcgcccgggcccaccgcagagatgagggctatgcatcagcgcctgtcattagaaaaagccctgcctgcctgcggccggtcagaccgacgcggcatacagtactgctgcacgctcggtggaaactcttgccgaacttggcatactgcgataactcaccgagcgccgccacggccgtgtgtttgctcatgaccgatatgtagccatcctcagtgagggagctcaagtgctgtgagaggtcagcgtgcccttcagcaacctggtcttcagcaggctgcccactgcggcgaccaagcgcccacttggcatatccacggtctgcggtccatcttcgctccagctggcggataaggcggtcaagtaatggcaccgccagggagtgtttcccccgccgcgtcccataaaccagcctcatgtcacacaaagaggccaagagttgatcacgtggctgggactgaagggcttcggcaattcgacaccgactttgtgagggaacaggacgtgggaagcagctcgtaatgggtggcctggctggggtgggcccacggtggcgggcggaacgcgttccgatccggaatgtggagacagcctgcggcggccggcacgtcctgcgacaggctgtaccggtaaaattatggccgtgtccaacatgcttattcgcgagtattttgcaggtaaatccccaatcagccaggcaggtgagtcccaatcagccgggtgatgaagaaactgtaaaacctgctcgtgatccaggcgggcgcagccccatcaagtggtgtactaactcccatgctccggtcggtcgttcatgagttaggctcgttatgacaaacgacgccaccttttcaggcgtccgggtcccgaggccccttgaggatcttgggctacatgtggcgccagtactcggtgggatagcagtcaaaaaagggtctgttgcgcccgatctcttctggcatgtgagtcatctcggatttcgggatctaggctatctttgaagattagcggtgctcgttctgtaccaagcgctcgatcaacaagatgcttgtgtgcaagttcgtaagcactattttgctcaaggcacttggataattcgggtgcttgctctaagatgatagcgcagggttcccacgataacgccgttggctttgccttcggcgccgcacggtaggccccttagggcatgtacctaaggggtatccgttttcttaggaatcgtttcggttttttcccgtccgacccatgtactagtatgttttgggtccgctttgtttcatgtttcacatagcagggaggctgacatgcgctacgcattgggcctggacataggcagcgaaagcgtgggttggagtgtcgtcgagctagaccacgaggatgagcccatcagactggttcgactgggggtgagggcttttgatgtggtacacagagaggaagcttctgcgagtacgcccgccaaggaacgccgtgtcgcccgtagccaacggcgtagactgcggaaccgccgcaggcgcacccggagagtgggcggtcttttgcaaagcatcggcctcgtcaggaactcagccgagctgcaggagcttctcgttacaaaacccgaagacgcttcgccttggcaactcagagtgagggccttggatcatcaactcgagccacgtgactgggcaagagttctttaccatctcgcaagacataggggattcaaggccactacgcgcggggagctcgagtcggaggacaccaaagaaaaagagaagcttgggctgatgctgtccagtgtgaaagcaatacacgaaggttggcatggaaagtaccgcactgtcgctgaatacatggagtccccggagtggcgagaagtacatggaaaccaaaaacgcaaccgtagtggcagctatgtgtgcacgataggtcgcgaagacctaatccacgaggcccacacgctctttgagtctcagcgcaaattgggcaatccgtttgcaagtgctgaaaccgaaaacgaatatatacaaatattggatgagccgcctcacctgctcgagggcgaggagctcatgaaaagggtgggtttctgttttcttgagccgacagaacgacgtgcgccaaaggccacccttactgctcagcaatttgttgctttgcagagacttgcaaatcagcggctggtttcccgcgacggcttattaagaagtagaggtctcacccccgatgagatacagctcctcatggcagaagcgaccgaagtcgaaaaggtgacctataaaagggctctcaaagctctggaactcaacaacgagtggctgtttctcgtcaacggtcagaagagagcgaagaagctcgaggagttgcagaccgagacacttatcaccttggaaggctaccacaaagttcgcaaggcgctcgaaaaagaatttcgcgacctgtgggagaaactacgggccgatcgcgattatttcgacgaggtagcggccgtgcttacctattatctacaagcagactcggccgtgagtgccctgattaagcttggtcttgaaagagaggcggctcagtgcctggcgcaggaggtagttttccgtggccacaccaggctctctctgaaagccatgcgtgctctcattccatacatgcgggagggacatacctatgataaggcggctgagcttgccggatatgtccattaccgcctgcccgcggttgagaaaagtccaacaatccccccgcttgaaagcctccaagaattcgtaggtataaccaatcccaacgtgcgccgggcaataaatcaggctcgcaaagtggtgaatgccatcgtgagagagcatggccttccctcccgcattggtcttgaattagcccgtgaagcggccaaaagcaaagcgaggcgcagagaagaagagagccgcatgcgcgaaaacgagcgcgataagaaaagacgtttcgatcacattcgtgaaattgctcctgatgccgatccggaaaaggtttggaaaaagcacctgctttacgagcaacagggaggcaagtgcgcctattcgctcaaggaccttgaccttgccagagttcttactgacccgacttatactgaagtggatcacataattcctcgcagcgtttgctttgataattcactcaacaaccaggtcttggtgctggctgaagaaaaccggaataaaggcgaccaattggcggcagaatacgtaagaaaggctcacggggaaaagcattacgagcagtatctgggatgggtagcctcctgccagatgcctcctcgcaagagacagtttctccagaccccagaggtaaccgaggagcagagaaaagagatgcagcgccgttaccttaccgccacgcaattcgccagccgctgcttcctcggaatactcagacaatacttcaacatccccgaaaacaggattatcccagttaacggtcgcatgactgccgacatgcgctggctgcttggcttgcccgaaaaggaacgcgaggtaagcgacacacaccacgccatcgatgcgacaatggccgccctcgccgaccataagacggtgcacagaatggctcagtatttcaagatgaaagaaaccgccttcagagacccggaaggaagatggataactcccgacggggaggtgatcgagccgcccgaaatagtagcctggccgggtcttagggaagatttgctggccaagtctggtgcggtgtttgtctctcgcatgcccaaccggcgtgcaactggcaagggacataaggataccatttattctctgcgccacgtgaagaaggtgttggacgagctgccgagcagcggaaagctgtctcttccctccgatgcaccacgacctacacagcgagtagctcttactgctctttccgacgtacagattaaggacatcctgatagagccttcccccattctggtcgacgaggcgaacaacaaacggctctacgatcttattcgtcaaagactgcgtgcagctcaagacaagaaagatgagaaagacaggagaacctgggctgagcgggcctttggagcagaagcagacaccgggcccctgcggatgcctacaaacgacgggagtgaaggtcccatcgtacgcagtatccgagtgtatgttgacgttctctcgggtttggctgtgcggggcggaatagcggagagcgacactattgtaaggttggacttataccgtaggcctaaccaccgaggtgagcccagacactatgtggtacccgtgtatgcggccgacctggcggctgggtggtgcccgaagaaagcggccgtagctcacaaacctgagtctgaatggcctgaaatcgatgactcctacgactttctcttttctctgtacaagggtgactgttttcgcgtatggaagtctccggaagaaccgggaccttacctttatatgaccagttttgatagaagtggtatcaccatcagtggcaatttccatgaccggagcaacaaaagcgacaacggcaagatacaaccggtaagggtatcagtcggtacgtcctacaaggttgaaaaattcgaagtagatcttctaggcaatctgcacctcgtcaaaagggaacctcgcccggtatgaactagcgggagacaaatagtagatgggcggctggcgcaccttggtggtatcttccgaggcggaagtttccatccgcctcggaaatttgcacattcggaacgctgacaccgccatcaccttgcccttggaggatctcaacaccttacttttcgactctcctcgcgggaaggtgagtttttcggtgttggcctctgccgctcaggcaggtgtagctactatcgttgtggacgaaaagcacctgccgtgtggagtccttctgccctatgcgcaaaattcgcgcgaaccgttgctggtaaacatgcaggtagagactagcgagcctttcagaaaaagggtgtggcaaaccattgtcgagcggaaaataagaaactcggcagcgtgtcttgatctcttgagtcgcaagggaggaaacacgttgcgcagaatagcgcggaccgtggcatccggagattccacagggcgggaggcctacgccgctagagtctacttccagcatcttggtcccggttttaagcgtcgcagcgactcctccctatctggagccttgaattatgggtacgcaattctgcgtgccatccttgcccgttcgcttgcggcagctggtttttgttgtgctctcggcgtcggccaccggagcaaaaccaacaatttcaaccttgccgacgacatggtcgaagcataccggccttttgtagacttactcgttttttctaatcctcctggagacgagctggacgccgattaccgggcctatctgctgggagtactccatatggagtgcgaaatgggaaagggaacctacaccatcgctacggcggccgatgaaactgccgcgtcgtacgcacgagctttaagctcgcgtaactaccgtctgctctcactcccagtgcttactgctaattctaggcgcacgtatgagtaggcttatgcggattatcgtctttttcgacttgcccgtgaaaagcaaaaaggataagcgcaactacagcaggtttcacgggttcttgcttaaacagggttactacctcattcagttttcggtttacggccgcgtctgcggtggtcaggaccggctggacatgcaccttggccgcctcaagagcaatctgcctccgaagggaagtgtgcgttgcatgatcgtaacagagaaacagtatgcttcgatgctggtcctggtcggtgaggaacgcccggaagaaaaagtgcagggatatgagcaactcacgttctaaagttgcagtttttgtcatgacgcgacccccggaatgtcgcttggattccgggggtctggagccctcagattttaccagagggtgaattgcagggaacccacgactcacctctcgccgtataccaagaaggactagattttaccagagggtgaattgcagggaacccacgactggaaacctatcgtcccgacaagcggtttggattttaccagagggtgaattgcagggaacccacgacaaagcatcggttatgccctcaaaactgtcggattttaccagagggtgaattgcagggaacccacgacgcacaacaccctaacgccctcctcctaatagattttaccagagggtgaattgcagggaacccacgaccggacgctgggtatgacgggccagtagagtgattttaccagagggtgaattgcagggaacccacgacagatcggcgccgctcctgacaccgatccgaagattttaccagagggtgaattgcagggaacccacgactcacttcttctcgcgcttcccctgcgaccgggattttaccagagggtgaattgcagggaacccacgacgaaaccaagtacgctttgccaggtctccctgattttaccagagggtgaattgcagggaacccacgacagctgaaaaccgcccgattggtgaagatttgattttaccagagggtgaattgcagggaacccacgaccaagtgtactaggtggagtctcggcggatggattttaccagagggtgaattgcagggaacccacgacaggccagcagcattctgcaaggtcactgggattttaccagagggtgaattgcagggaacccacgactagagccgccatatcaactctgttcgggtggattttaccagagggtgaattgcagggaacccacgacagtcgcgtaggtaagccgcaccatgccagcgattttaccagagggtgaattgcagggaacccacgactccgcggcagcagccgataaagggtacggcgattttaccagagggtgaattgcagggaacccacgacgcccggatcttgagccccttgatatccgcagattttaccagagggtgaattgcagggaacccacgacgattactcctcccgcatcctcgctccgcaggattttaccagagggtgaattgcagggaacccacgaccagaggaacagtgcgagtatttgtgcaggtgattttaccagagggtgaattgcagggaacccacgaccggcgctgggcgtcgagtgacggctcgggccattttaccagagggtgaattgcagggaacccacgacgaaggcgctccctggattgtacgctgaccattgactggaccatgcgcgaaaacgtccgcgcccacttgc

SEQ ID NO: 3354 - DNA, 23753 bp, synthetic construct
  variation 238..523: note = note, n is a, c, g, or t
  source 1..23753: mol_type = other DNA
  misc_feature 1..23753: note = Synthetic
tgacgtggattttcgaggaggaattgatttatctaaggttcagatgcttcagactacaacacaaagaatgtgattatgaagatacagaacgttaaaaaacacatcttaaacgtcttggagccatttgcttctgccaataatttcaagattctcaaaggacgatttgcattgagccgaaaagtcggcaatcgtactgatgaaatattctttacatattgttcatggggttttgaggtannnnnnnnnnnnnnnnnnnnnnnnnnnnnnnnnnnnnnnnnnnnnnnnnnnnnnnnnnnnnnnnnnnnnnnnnnnnnnnnnnnnnnnnnnnnnnnnnnnnnnnnnnnnnnnnnnnnnnnnnnnnnnnnnnnnnnnnnnnnnnnnnnnnnnnnnnnnnnnnnnnnnnnnnnnnnnnnnnnnnnnnnnnnnnnnnnnnnnnnnnnnnnnnnnnnnnnnnnnnnnnnnnnnnnnnnnnnnnnnnnnnnnnnnnnnnnnnnnnnnnnnnnnnnnnnnnnnnnnnnnnnnngtatgtcagtgtggactatggagagataactacaatatgcaatgactgtggctttaatctgaaccattcggcatttatcaatcttttattgcttcaacggataaaacaacgaggatttaacgaggatttaagatggaaaatgcaggtaaccaaaacagaccggtttattctttcagatgatgagacagacgactataatcagcttgatatagggttgtctccattactccctatttcgttgaattttctctctcaatacaatagtataaactcaatagaccggctattcaataatcccccgatagaacaatacaacccatattgttcaggtcttgatacgcattgcatgattggactaatttctgccaaactctccaataacgctgattacgaaaatattaagcaaatgtaccaacgaatagtggaaaaagaagatttcacagataatatgaaatcttcttttactcgactaacaacctatcttgacaattatgaaactgacggataaacgattttggatatttgaggcattggcaatattgtcaacagctacaaccataggtatcatgcaagtctgtttgggtagatttgaattggatggagactccatgcctatttgttgtattattttgacttcgtatttagtcgggcaaacggttgcttggaaagtatctaaatatcttaaatggctgaaacttggcctgtcaacttatttttactccattatttcttttgcgtcgatatttgcatttataattattcttgattatttggatcgaaagccacttcctgttgatgtctcagcagatacacatattgttttttctacattcagcatatcgttggtggcattatttttatggagtatagtttccttcattccatctatgcttacgggatttattgcttcattatgtttaagttctaaaaagtctaaaagtgatagaacattaaagagtgtatctcttgagctcttgggcgttaatggttttgcatatccgagaaaagaagcgctgaaaatagcgaataggtactttaattcaaacaagtctattcttggtggtgatgtttataagctggttaacggacgtatagaatccacttccgacagttggtactgtgaccggaaagtgtctgaatcgtcgtatgattatgttgtccgcagctatcacattgcttacgactatattagagattatccggacaaagcaaatacttttttcagcatcgttatagagcaaatagaagatgaaatctgacagcaagatatacaggtttttctttgggcggcggggtgagagacgcttgccttttggcgttatgctgctgattcttgtgcctttccttattgtaggtctatatttccagaatcggaaatataatgcgctgtctgcaaatccgttttttacatcaactgtggtttctgatgtgtacagtcttagcaatagtagatatttgaagtatcagatttctgtggatggtaaagcttatgaaggtagtgctccacgccgtggtctttccgtgggcgacagtattggtgtggtgtatcagaaagacgatccggaaaataacatgacggtttttgagtattttgatggtccggaatttggctctgtcataatatttgtaattgttgcgattgttttggcagcatatcgctggctgacaatcaatcgaaaatacaacgaccgatgccctgagctggagcgttccgggaagtgtacaatatatcgcaccgacaaagagtacatatttgtcacggtatatcatgccaactcaagctatccgattaaattcttgcctcttgactgcgataatggggcgtttgagaatattctgactgatattttccatgcaagtcagcatgacaaatacaccgaaataaaggcatccgagctaatcaaagcgatgaaacaacgctcatggcgacagctttatatgcactctacaagtgtgcgtgtaactcacgatagccatcgactgaaaatactgccaacccgaaaagccaccgacaaaggacttgattgggattatgaccgggaattatcttttgaccttgacagagcctcttggaaaaatattatcatctcaatccggaaactccttgaaaataatgagactgaacgataatcgattctagaaaatagatagaagataatctataaatatatccaggagaaaaacactctgagtctcgtattattgttccaattatcttttttatcagacatttttccttctagattaagtaaatttattctgattatccccttatatcacaacacataacacattacataacaatatattatatttttagtttctatcttcctaaacgaatataaataatcttttatcttaaaatatgttaactagcataacatttctcttgaaatattttgcaggtttcagatataccactacctttgcaccagtttttcatggtattagatttaaggtaagaagattattcgtcgtgatgacgagtaattttttttttgccccaaacgaaccggcagtgttttcattgagtttttaatatgtgcagatgttggtatctgccctccgtatatcaaatcttatgaaaacgactattaccgtttctatcctttttctggccgttttatttccgaatatcctggcggctcagcagcccgggctttacggcattgcggccgacactccttcccgatggcaatcagagacaggtttcactcaagaaccacagaaggacgctttctggtggaagaaattcaacgacccacttcttgattcactgatttccctgggccttgagcgtaattacaaccttgccatggcggcatggcgaatagaaatcgcaagacagaccctgcgttccgcccgaagcgcatattacccgtcggtcaacctatcggcaggatggaacaaaatacgaaattccggcaatactacggccagaagcgttccggaaaccaacttggattatttttccggatcagtaagcgcttcttgggaagttgacctcttcggaaaaattacgtcaagaataaaacagagcaaggaatctctaaaagccacccgcgccgaaacggccggagtgatggtatcgctttgcggcgaaatcgcgtcggcctacatccagcttaggatgtatcaggacgaactcacagtggccaaagaacagcttaaatcccagaaccatgtgtatgacgctgcgaagtcgcgccacgaggccggactcgcctctaaactcgatgtagcacaggcggccgtcatagcccattccactgaagccatgatccctggactggaggccaatgtggaatcggcgctcaactctctttcaacactcgtaggcgacttcccgggagcgctgacggctctctcggatacggttgcttatcatcgtctggatttgcgtcagattgtgccggtgggcgtgcctcttgatctgctgcgccggcgtccggatctggcagaggctgaattcacggtcgcctcatctgccgcagcactcggcatggcgaaaaaagactatcttccctccctcaccatagacgggtccataggcttcgcatcccattcccttaaagatttcggcaaaaaagaatctctccaatggtcggtggcccctacccttagctggactgttttcgacgggttcgcccgtcgtgcggctgtgattacagcgcgggagaatatgcagaattcagttgactcatacaatctcacactgctgtcggcagtgcaggacgtaaacgatgcgatggcctcctatacctcttcactgcgggccatcgactcttactcaaaggttgtggacgatgcacgcgaagcttttacgctggcttttgatctttaccgcgacggcctttccgatttcacggatgtggccgatgcacagatttccctcctgcagtatgccgaccgtcttgtcacggcgcgcgccgacgcggctcttgctctcgtcacgctctatcgcgctctcggaggcggatgggacatcgattcaattaacgataataaataatccacatcaataacttatgtcatgaagcaaatatatcttcccattgttttcgcaatagcgctctcttcagcttcgtgcggacataagtccaccgacagttctgacgataatctcctgagtgtggatgtagcgccggccattcaggattccgttgtaatataccgtacttatcccggcagtctgcatgcagccagttcggttgaccttgtggggcgcgtcagcggatatctccgttcccagaattataaggagggtgatctggtaaaggccggtcagatacttttcaccatagaaagcacccaatatgccgatgccgtaaatcaggcgcagagccaggtatcgtcggccgaaagctcgctggaatatgccacatcgcgttatgccgcaataaaaaaggctcttgaaactgatgctgtgagccgcatggaggccaatcaggccctgagtgaagtgcagagtgcggaagcccagctgaaaaatgccagggcggcgcttaacacagcccgcacgaatctggggtattgcaccgtcagggctcccttcaccggacacatcacagctgccgtgccctcagtaggcgcgtatatcgatggaagtgcgcaaccggtgaaacttgccaccatttatcaggacgacaaactgaacgcaaagttcttcatcgacgacaaagtgcttcagaaaatccttgccggtaataaggcggaaatcagcggcctcgactccatcccgcttattttcgagactccgctcaaccacgtatattccggcaaactcacatacgtggctccggatgtggacacctctacgggaacccttacggtacaggccaaagttgacaatccgtataatgaacttcacgacggcatgtatgtgcagatacgcctgccgatatcaaccgatccgaaagcggtgattgtgaaagatgcggccctctccaccgaccagctgggaacattcctctatgtggtgaatgactccgaccgtgtggtttacacacctgtaaaaacaggcgaactggtccagggtgattcgatgcgcgtgattacctccggtatcaaggccggtgaccggtatatcaccaaagcccttcttaaagtgcgccctgaaatgaaagtaaagcctgtaaccgtcaattaattccattatgttctcacgcttctttatacgccgccctatctttgcgatggtgctcgccgtaattatgattctcgcaggtctgcttacggtcaagacgcttccggtagcgcagtttcccgacatcactcctcctacggtaaacgtgtcggcttcctatcccggagccaacgccgagactgtggcttccgttatcggagcacccatagaggagcaggtaaacggcgtggatggcatgatgtacatgagttcctcgtcgggaagcgacggcagctacaacctcacgatcacgtttgacgtaggtaccgacctcaacatggccaccgtgaaagtccagaaccgtgtgtcgcgtgccgaacccacactgccctcagccgttaagcaacagggcgtgcaggtgacctcacgttctacaaatatcatcctgtttgtggctctggaaagcgatgatcctgaacgctacgacgccctttacctcaccaactatgcccagctgagcatcgtggatgctctgtcgcgcgtggacggtgtgggacaggtgggtgctttcggagcgggacagtacagcatgcgcgtgtggctcgaccctgacctgatgcaggctcgcgggataaccgcgcaggaggtaatggccgcaatccagtcgcagaatatggaagtctcggccggaagcattggatcggccccggggacaaatgcgcaattcagcttcacgctcacgtcgcagggacgccttaacacggtggaggaattctccgatattattctgcgcgccaatcccgacggaagcatgctccggcttaaagatgtggccaaggtggatctgggcagtgacagctatggaaatacggcgctggtaaacaacaagccggtgggccttatgggtatttaccagcttccgggagctaacgcgctcacggtagccaagaatgtggaggatgaacttgaaaacctatcgcaatactttcccgaaggaatacattaccgcattatccagaactcaaccgaatttgtgaccgcgtcgatcgacgacgttgttgtcaccttcgtggagacaacccttatcgtgatgctggtgattctgctcttccttcagagctggcgtgcggtcatcatccccatgctcaccattcctgtgtcgctcatcgccacattcgcggtgatgaaactgatgggattcaccatcaacactcttacgctgttcggacttgtgctcgcgatagccattgtggtggatgacgccattgtggttgtggaggattgttcacgaatagtggacgaagggaaaatgacaccacgccaggcggccgtcaaggccatgaacgagctgcagggacctgtggtgggcgaggtgctggtgctgctttcggtgttcattcccaccgcgttcatttccggcattaccggcgagctttacaaacagttcgcgctcaccatagccgtttccacggccttttcgggattcaacgctctgacgttcaccccggccatgtgcgctctgttcctgcgtcccaagaaatcgagctcgttcttcctgtatcgctggttcaacaagggcttcggcgcaaccacggccctgtatatgagaatcgtcggcaccttcctgaagaaaccggtggtggccatcacggcctatctgctgatttcggcagcagcgttctgggcattcctgaatatgcccacgagctatgtgccgcaggaggacatgggatacttcatgggttccgtgcagcttcctaccggcgcttcagttgaccgcaccgaaaaggtgctggccgaagctaccgaaaaactcaaggagataccgggcgtgaaggatgtaatctccatctcgggattctcgttcctgggtggccaaggctccaacatgggcggtctttccgtcaccctgacgccatggaatgaacgcaagggcaagggaatggatgtggaaagtatcatagcgaaatttgaagcggcgtgcgccggaatccaggaagctgagatattcggcatcaacccgccggcaattccgggcctgggtatgtcgtcgggtctgcagcttcagcttctggacataaacaaccacggcccggagcagatggcgcaggcgctgcaacagattcgcgatgccgcgaaatccaacaaaaacattgcctcagtgacttcgctctatgagggcaccgttccgcaatacactctaaacatcgaccgcgagaaagtgaagatgctcggactggagatggccgatatctattccgtactctcagccttcacgggctcggcttatgtgaatgatttcaccaaattcggccgcatctaccaggtgactatggccggcgatccgcagtcgcgcaacacggttgacgacgtgcttaaactctcggtgaaaaacgaccgcggagatatggttccgttctcatctttcatgaccaccgaccttaccagcggctcaccatcgatcgaccgttacaatatgtatcagacggcttcgcttacggccactccggctcatggcgtcagctcatcgacggctatcaaggccatagagcagattgtgaaggacgcattgggcaacaactacggatatgcatggaccggcgaggcttatcaggagacccagggcggaaccaccgtggcgatggtaatgctgtttgcggtaattatcactctgcttgttctagcagcccagtatgagagcctcaccgacccggtagcggtggtaatctcgatgcctacggccatattgggaaccgtgatcggctgtctgataatgggccaggacataagcatctacacgcagatcggtatcatactccttctgggcctctcggccaagaacgcaattctcatcgtggaatatgccattgattaccgcaagcagggaatgccgataagacaggcggccaccgaagccggtcaggtgcgattccgaccgatcatgatgacggcacttgccttcgtattcggtgtgatgcctatgctgtttgccaccggtgcaggcgccgcaagccgtattgccctcggcagcgccgtagtgttcggcatggccatcaacgcccttgtaggtacgctgtttgtccccaacttctgggaactgcttgagcgcttccgcgaacgccatatcgcaaaattcttcgcagccggcgataccccggctccgacacccactccagcaccggccccggcagaagccccctcccccacaggcgccactgccgagaagccttcggcacccgcatcgcctccatcgccaaaggaatagcctgatatcagattaaaataaaggacgtcaatgggctcctcgctgcgcggggccttttggcgccctttcttcgtcaggcggctacagcggccgctaaattaagcggaattttcaaatggattactgggggataagaaatataagtcggataattcttataaaccggatatccgagagggtcgaggggaagcagggggtccggtaacagggccggtgcctgagggggatgtttggtttggcgggttgcaatgaggtgtcgggcggcgggattgaggtcgacggtgagccaacggggaccatagcggccacgggctgcatcccggacctcaccggcgaacatgaggttgctgaaaatatcgaccacgccgtggattataatggctgtgccgggagcatccggtatagccggaaagagatgacggcgcagttgaccggtgacatcggcataccaggcgtggccgtagaagtcggcgttgagcaggagcaactgactggctgaatggccccgggttcactggggatagtaggaattaaggggtctgcagcgaggtatgcgccgggcgttgcggcgcgccatacggatgttctggtcgagcagaagcgtattggcctgcggattgatgcgcgtggagagccatgaaaggtagtcgagcaggaactcaggtatacggttggagaaatggtgctcgttgacatacatgcgtatgaagcccatgcggctccgctgccgctcaagagcctcaagcaccttgagctgcgatgcgttgagactgagcgacgtccaacggagataatcccagccgtaaggagccttccatgtatgtgtgttgttcctcatcatcaggcaaagataatggctaagagggccaaaagggtgctaatttgcagaattgagggctttttttacggggattataaaaaatttgtatatttgaaaggcattatgatttgagcaaaaaaaagaaagagagccacaagggctcctctttctgaatgttttcacaacggaataaaatccttattgtgatttgcttagatattttgctgtgcaaatataataaatataagaattacaattacacatatcatgaaaaaaattttagggctggacttaggcataggatcaataggctgggcacttattggcattgacgaggaaaaaacggaagaatctaagattgaaggattaggctcccgagtgattcttctaaaagaaaacgagaccacaggtataacacaaggaaacggcgaaacaataaacagccagcgaacattaaaaagaagtatgcgcagaaacatggaccgatatcagcaacggcgcaaaatgcttgctcagcttcttgaagaatacgggatgaattttagcgaaagtttattgaaactttcgccgctcgaattatggaaactgagatcggatgccgcccggggagaacatctgtcactaccagaaataggccgggttctatatcatctaaaccagcgacgcggttaccgtagttccaaagatgaaaatcaggagaacaagaatagcacttatctttcagctataggtgaaagagaaaaagaagcattgagccatgacgagactccaggccagtatttttaccgcaagctgaatgaatcccgatatcagacagagaggggtcatactgcctgttcctaccgtgtaaaagagcaagtgtttccccgaagaatgtacgaagccgaactgaaacaaatattaacgtctcaggcagtttactatcccgagattctttcagaagagaatcaggccaggatattcaatattataatgtatcagcgccctctccggagctgcaaacatcttgtgtcaatctgcgaatttgaaagcaaagaaataataaacaataaaggcaagaagatacagataggaccacgagtcgccccaaaatcctctcctctggctcagttgtgccgaatatgggaaactgtgaataatattgagcttaaaaactataaaaacaaatcgaaaaagaaacaatcaacaattcctctgtttggagacggaaggctctcggaattcatatatacacttaataattctgaaagaacagctattgccgaatttctttcaaaaaacgagaaaatgagttccaaagaacttttaaaaattctcgggctgaaaaaagatgacggctttaccgtggataaaaatgtgagcaaaggaataaaaggcaacagcacatattgcgccctgaaaactgctcttgaagacgaaccggatgctgaaaaatatcttaggttcgatatccattcagaagagtcatcacttgtagatacagaaaccggtgaaatacttaaaaaagtttcctcctcatatctaaaggagccactttatatgctgtggcatacagtctattccatcaatgaaaaagaggaattatccaaagctttaaattcaaaattcggcatagttaatccctcgacgattgataaattatttcacttggatttcagaggagaaggatattccaataaatcctcgaaatttatttgtaaaattcttccgtacctcacagacggactgaagtatagcgaggcatgtgaaatggcgggggtcaatcactcgtcaagtcttacaaaagaggaaaacgagaaacgggaactgacaacgtgccttgaaccacttccgaagaattctttgcgccaaccggtagttgagaagatactcaaccagatgatccaccaggtcaatgcaatcgtaaaagaaaacggtccaatcgatgaaataaggatagagatggcccggcaactgaaacaaagcaaagaggaacgcaacagagaattcagccggaacaacgcaagagagcgagaaaacaaaaaaatatccgaaatcataagcggatatggattcaagccttcaaagaaccgtatacagaaatacagaatgtggaaagaatcggaagaatgctgtatgtactgcggcaaaccgattggcgtgcacgaatttctttcgggaatggacgtggaaaaagagcacgtaattcccagatcaatattttttgatgacagtttttcgaataaagtatgtgcatgtcgcgactgtaatcacagaaagggtcaaatgacgggctttgacttcatgcagaacgaaggagaaaaaaagttcaaggaatataccgacagagtagagagactatatgctcaatacaaaacatcgaaaggaactgccgggatttcccgtaccaaacatgaccggctgatgacatcaaagagcgagattcctcaggatttcatagagcgcgacctcaggcaaagccagtatatagcaaaaaaagcgatagaaatactaaagggtatatgcagaaatgtatacgcctcaagcggctctgttacggacttcttcagacatgcctggggttatgacaaaatactacatgaactcaatctgccgtattataccaaggccggacagacggaaacaatcacagtcaatcacaaaggttcctcatgggaagaggaaagaataaaagagtggagcaaacgactggatcaccgacatcatgccattgatgctctcaccatagcactgacacggcaaggctatatccagcggcttaatacgctcagttcaatttcgcctgacaacgagagcaaaattgaaggagagtatatgcgccaaggacaaaatctcgacaaatgggcctcggagcagttccattttccataccatgccgttaaaaaagcggtttcggagattgccgtatctttcaaatccgaaggaaaagtgactgtacccggaaagcgatatatctataaaaggggaaaagccatacatgtgcaaagcggccttatgattcctcgcggaccattgacggaggactcggtttacggtataataaaacgggtaaactctaaaaccggaattggggaactttttaaacagcctcagaatatatgttcgccaaaaatcagagaagctattgaaaaccggctttctgaatttaaaggcaacattacaaaagcaaaaaactcactcaaaaaacgtccgttagccgtaagcggaaaagacacgaatccggctaccgcagcagtttttgaatcaatagtggtaatcagatataaaatagaggcgataaaatattcaaaagttgaccagatagtagatattccagttcgtgaggcgataaagcgacgatttgaagaactgaaccactcagacgaagcattcgcgaaatctctttcggagagaccgatattccgcgataacgattgtcgatttccgataaaacgtgtgagatgtgccactaataataaattggaatcgatgactgtaataaaaaaagatgcagacgggaacccaatcggatattctcttaatgggaataatcatcatgtggctctatatgaaacgcctgaagggaccgtagaaatatccgtgataccatttactcacgctgtgagaagaaagcaacttggaataccggtgataataaaggaccctcaacaagtctgggaaattgtgagtgacagagatgacatagaagaagacattctttcaagaatacctatgcctgactgcaaattcttactgtcaatgcagattaatgatatgttcgtcataggactgactgacgaagaactctccgactgcaaaatgaaccgggactttgcaacacttacgtcacatctttaccgtgtacaaagtatatcatggcgagattatgttctaataaaacatacctccgccctcacacgttccagaaaagaacagtctgcgaacggaaattacataagaataacaagcttagaaacgctgaaaaaactcaataataaaaaggttaggataaatcgtttgggtaaaattgaatttttatgataaaacagactctctatttcggcaaccctacccggctatatatccgtaatagtcagctgtgcatggtggtaaatgaaggtaaaaccgacgaagaaaagattattaccagacctatagaagatataggaatggtaataatcgattctgcacaaataagcctgacatcatctgtagcctcaatgctaatggaaaacggagcagcactaatagtatgcgataaacggcatctaccttcaggattgatgcttaatattgaaggacatacattgcagtcggaaagaataagagatcaaatatctgtttctcttccattgaaaaagcaactgtgggcacaaacagtcagtgcaaaaattatcaaccagtcaaaagttcttgaaagattcgaacttgataaaagtggctaccttgaaaaacttgcctcaaaagtaaaaagcggagacagcagtaatattgaagcgcgagccgcatcatattactggaaattattgcttgaatcatttccagccaaaaccagaagaagagatggagattcaccaaacgaattactgaactatggatatacagttgtcagagccattgcggccagagcgatttcctcggttggattgcacccttcaataggtctcttccataaaaataaatacaatgcttattgtcttgctgacgatattatggaaccatatagaccatacgttgatattatagtaatggaactgaacaaaagtggaaaatcacttacactcgaaagcaaagagattagaaaagcaatattggaaataataacgtcagatgtaagaataggggaacaaactcgtcctctggcacttgccatgaatgaaacagcatcttccctatataaatgcttctctaaaataagcaagacaattagttacccgcaaatagaattctaattggaacacaaaaggataagcaaataccgaataatgtggatactggtattcttcgacatgccaaccgaaacgaaggaacagcgaaaagcatattgtgatttcaggaagaaattactgcatgacgggttcacgatgtttcaattttccatttatatacgtcattgtgcatcctgggaaaatgcgcaagtacatataaaaagagtagagcgcctaataaaagaatggggagacgtaggtattcttgccattacggacaaacagttttcagatataaaacttttccacgggacaaaaaatactcctccgccagtacagggaattcagcttgaactcttttaaacctaaaaaatgagcctgtcaaatgaataaacaggttcattttttatttctcagcattacagtgtaatatccattattacaattatttacatcaattctgttgtattatgctgagcaaaattaagaaaatctaagcaaatcacaacgcgccgattaagtttgtcaacgcattttaggttgtattatgctgagcaaaattaagaaaatctaagcaaatcacaacccctacggatccacgctcaaaaattgagaggttgtattatgctgagcaaaattaagaaaatctaagcaaatcacaacgttcgggattatcggattgctccgcgttaagttgtattatgctgagcaaaattaaaaaaatctaagcaaatcacaacccacagcgacggtagatggtactggtggcggttgtattatgctgagcaaaattaagaaaatctaagcaaatcacaaccaccgacgtaaaactgtcctcactcgcgctgttgtattatgctgagcaaaattaagaaaatctaagcaaatcacaacagggcctcaataagggtgtcatcggccgaagttgtaatacactgagcaaaattaagaagatataagcaaagttcaacgaggttaataatgggaaatatttccggaatatagcgggggctgaagggataaatgagatgaagttttcaatgggatttgggagggaagttacggactgtacggatcctacagactttacggacatcggggatttcggggatttcggaggggggagctatcggaggaagtggtattattagaggaattggagggattggggttatgggaagaggacggcgggacgccgaccttcccaggggtgggaggggatgccgggctgccttagggtggaagttagagggggtggggatcagagggcggagaggagggtggagatggcggagggggtggtggtccagtcggtgacgaagcggacgggggatttttcgggctggcgtgggccccagagctcgaaggagaagtgggagcggaggcggtctatgagggcgttggggaggaggaagaattgctggttggagggtgagtcgatgtagagctgatggcctttggcaacgaatccgcgtttcatttcgagggcgagggctacggcatgtcggccgatctggtcatagagtccgccgctgaggagtgtggagaactggaggccgaggaggcgtcctttggcaagcatggctccatggcgcttgatgagggtgcggaaccgggggaagagttcgggacggcgggtgaccatggcttcgccgaagagggcgccacattttgtgcctccgatatagaagacgtcactgagggcggcgatgtcgcgcagggtcacatcgcagccttcggcattgagaccgtaggcgagacgggcaccgtcgatgaagagggggacgttgcggtcggagcacactttataaagggcctcgagctgacggcgggtgtagatggtgccgagttcggtgggaaaggagatgtagacggcgccgggagcaaccatggcatcgtggctgtcgtcggcatagaaactgtcgatatatcgggctacgtcggacgcttcgagacggccgtcatggccggggagcgcgatgactttgtggccccaggcctcgacagctccggcctcatgcacgttgatatggcccgtatcggcgcagagaacaccctgataattacgaagcaaggcatcgattatggtgcagttggcctgcgtgccgccctcgaagaaaaaggcctctccgcggtctataccgcaaaggcccagtatgagttcgcgggccgcggcgcaataagagtcgttgccgtagccgggggtgtgctcaagattggtgcgcatgagcgcttccattacagcggggtgaccgcctgccatatagtcgctgtcgaagtatatcatgggtgatgaattatgaagataagtactgttattctgctgcaaaattacagatatattccagaatacaaggcaactctttagggaattaaaccgttttcaatgtatggcagccagattaccggacaaaccgaaggattactcgggctatgcacgcttcttctcgcacacatcgttcagaaagaagctgaagaggacggcctcaaaggccggacgcaaggtggtgtatgcggcgctggtgctctattatgcagccaccgacaagtcgataccgctgcggcaacgggcgaaaatatatggggctctgggttatttcatactgccgatagacctgataccagacttcacggctattctgggctacacggacgatctgggggcgcttctgtgggcgctgaaatcgattgccgacaatataacgccggagatatgcgccaaggctgcggagcggcttatgctatggttcccggatgccggagagactccgccggagcttccgatgcttaacaacgaggatgaaacagagctgccgggaaaggggtatcaagaccctccggagggatgaaaccggggctacgagaccccggaatactcaaaaatgattaagggagataaacgagtgcagggagaaatcataatttttgggtatttagccgccatgtggaagtatctaattttgcatcgtaaaaaagaacgacaaattagctgatcactatcacatgaaattcagattgggttggaaaaaatttcataaatgggcagggttactgactgctgttttcctgctcatattctgcgcgtcaggtatcatcatgaaccaccgggcagcgttttccggcatagatgtgacacgcaagcttctcccggccgactatcacctgaagaatttcaacaacggtataatcagaggcacccttccgctggactccatgcggctgatggcattcggcagttccggcctgtggcttaccgaccgcagtttctcgagcttcgcagatttcaacgaaggcctgccgaaaggcgcggacaaccgccagataagaaatgtcgtaataatgcgtgacggcaacctgtggtgcgccacgcagttcggactcttccgccgcgaaaataacggatggaaggaaatcactcttccgggcaacgacgaacgcatttcagacctaacactgactcccgacagcacgggactgattgttctgggacggtcggcgatatatcgggttacgcccgacggggcgagcgaatgcaagcaactgaccgcacctgcggactataagccgcgcgtgacgcttttcaagaccgtgtggcagctgcacagcggagagctgttcggcacagccggaagaatcgtagtggacatcatagctcttgtgataatattcctatgcatcacaggtatcatacttttcattctcccctacagaatacgccgtctttcgaagaagcatcttaccgacaaaataaagcccacagcaaggaaaatgaaatggaatttccgctggcacgacaaggccggagctgtcaccatcatattcacggtgataatagccttcacgggaatgtgtctgcggccaccgctgatgattccgcttgtactcacagaaacctcacccctccccggctccaatctggacagcgacaatgcctggcacgacaagctcagaggcatccgctgggacgagaatctggacaaatggattgtatcgacaaccgaggggttcttcacattcgaccgcaatttttccggagcgcccggtaaaccggggaaagcgcccgcgataagcccgatgggagtgaatgtgtttgagaaagagggcaaggaatggctgataggctccttcagcggtctctaccggtggaacccggagaaagaaaccgtaacggattatttcacaggcaaagcgtctgaacgacagggaggcagaccggtatcgacccatcttgtaagcggcttcagcaccgaccttggcacaccgacggtatttgacttctcaaccggagcggccggactgccggagatgccggaggaacttgcatcacagccgatgtcgctgtggaatgttgctcttgaactgcatgtgggacgctgctacacgccattcctcgggccgctgtcatcgctgttcgtatttcttgcgggcctcatcatcaccctggtgctcatctcgggatatatcatccaccaccgacataagaaaagatcattaaccaaataaaagtaaccaaaaatgaaaactatcaagacaattttcgctaccatggtagccgtagcaagcatgttatctttcacctcctgcggaagcgacgacaacgacgcccccaaagcaccagcagcaaagagcattgaaggaacttacaaaggagatatgtcatgtagtgtgatgggagaggccagcgactacgaggacatgaccttcacggtaaccgccatgagcgacgcaaatgtatcgatcacgcttcccgctttcggcgaagctcccatggcactgccttccatcacagccgaaggcctcgaagtaacagaaactgacggcgtctacaccatcaagcagaaagaaatcaaaggaaccttatccaacggcaaagagtatactctcataatagcaggctcatgccagaattccgccctcaccctcaactacaaccttcagtacggcaagatgcccatgccgatgatctgctctgtaaccgccgctcctaaagtgaaataaaacaggtttccaacaaatccaatagcttatatctctatacatttccaatggtaaaaagactgacaggttcaattatcctgcttctcgggctcctgtttccattgaacacgttcggcaccaacatagtggtgacggtcgtggacgaaacgggaagcccgcttgcgggagcccgtatcaatctcccggggcagaaactccccatcatagcaaatgccgacggccagttcaaactgtcggtagcctccggcaaacaggccaagattgaggcatcacatatcggttttgtgaccgagacatttatagtgcggggatcggataataaggaaatgatgatacaaatgacgcccgacccctcctcgctggaggaagtggtagtgacggcgacacgtacacctaaaacgctcaaggaggtgccggtggtgacacgccttatctcggccgacgacataaaaaaggccgacgccaccaacattcaggatcttctcaccgaggaacttcccggtctggaattcggatacgccatgagccaggagacatcactcaacatgagcggcttcggaggaaacgccgtgctgtttcttgtggacggcgagcgtctggcaggcgaaacgatggacaacgtggactacaaccgcctgaaccttgacaacgtgggacgcgtggaagtggtgaaaggagcttcatcagccatctacggcgcaaacgctgtgggcggtgtggtgaacctcataacacgcgaaagcaaagagccctggcacgcaagcatcaacagccgctaccgcagcgccggacatgaatggcgcaacggcgcggacataaacttcaatcagggaaagtggacttccaacaccaacgtgcagtattcacgcgtgagcaccatccatcttaccgacgcattcgacacggaatcgaagattcatgatatctacggcggaaatacgctgaacatcaaggaacggcttgtgtaccgcccgaccgacaatctgcgcctgatagcgcgcggcggttacttcaaccgcgtgagcacacgctccaactacgatgaccattacaaggactacaatgccggactcaagggcgtgtacaccttcaaccccaatcagacccttgaactctcctacggttatgaccagtatgacaagtcgcgatatgtgggcggacagcgcacacacgaccacgactacaccaaccgccagaatatagtgcacggcctctacacccatttcttcggcaacgatgccctgaccgttggcgcggactacatgcacgactatctgctcacctatcagtttgccgacggcacgacccattcacagaactcgatcgacgcattcgtgcagtatgactacaatcccgtgaaatggttcaacgtagtaggctcagttcgcggcgaccacttctccgcatcaaaagaaggcgccatcaccagccgtctggccacgatgttcaagttcgacaaattctccatccgtgcctcatacgccggcggcttccgcgcacccacgctaaaggagatgtatatgagctttgacatggccggaatccaaatgatatatggcaatcccgaccttaagcctgaaaaaagccacaacttcaatctggcgttcgagcacaacggcatgatacgccacagtttcctgcgaggctcctacagtctggccctcatgggatacttcaacaagtacaacagccgtatcaccaccaccgactataccggccccgacggagaagaaggcgcccgttactgcaacgagaacggtgtgaaagtgatgggaatagatttcaccgcacgttaccgctccacgatgggcataggagccgtggtgagctacaactatctgcataactcgggccgcacaatcgactcgcagttcacccaaccacgcacacattcggccacctggcgtctggactacgacaagcagctttgcagcgcctaccggctctatgccggcatctcgggccgctacctctcgaagccgaaatcaaattatgagaccgacggcgcatattcactgtggaaattcaccctccggcagacagtgtggagaggaatcgacgtgaatttcgtaatcgaaaatctctttgattacaagccgaaagtttattactggaattcggctccgaccaccggccgaacctggaacataggcgtttcattcgacattgagaaactattcaaataactactgaatgacactgtgataacagatatgacacgacgtaaaataataatcatttcaatttgctgtgccctcctgctgggcacggcaattttgctatggaaaatgtacgcttcgcccacaaggatagcgttcgtaaattaccaggcaatcacactcggccagatctcgaaggccaacgacaattctttcatcaagatagaggaacttcccaccgaccgcctcgacaaagcgtcggactacgatatggtgatggtgttcggaatgggacttcgcctcaccgacgagcagcgccgggagctggtgaaagctgccgaatcgggcacaccggtgataactcccggagccaccaatccacagaactacatagtgtcggtggattcgctggatgccgagtatctcaagcaataccttgccggaggccagacaaactaccggaacatgctacggttcatccgcaagttcatagacggtaaaaaattgtttgccccgatgcccggagatccccaggtatcggcctcgtcgctcctctactatccatcggacaacgacgacctcagcttcggatcagtggcagaatacgagaaatggctccgcgaaacaggccgatggaaagaaaacgccccgaaaatcatactgacaggccagatgggcgtaccagacagcctgacggcagcgctggagcgcacgggaaacatggtctatcccgtaaactccatacagctattcatagccagacaccatgccgattccgtaggggcatcagccatagtcaacatggcccacggccgcatgggcgacatggtgagagactaccttaccgccaacaacatcattctcttctctcccctcaacgccaaccgtgactacgatgaatggataaacgataaaatgggcatgagcggcggcttcatgtcgcagagcatcgtcactccggagattgacggcgccgtgagaccctacaccctcttcgcccacttcacaggcgatgacggactgccctatgtggaagcgattcccgaccgtctgatcgacttcgttgcgacggtaaacaactaccttgccctgcgcactaagcccaattcagagaaacgagtagcgatattctatttcaaaggtcccggccagaattcactggtggcggaaggcatggaagtggctccgtcgcttttcaaccttctcacacgcctgaagagcgagggctacaaagtggatggtcttccttccacggcacaagggcttgaggaacttctggccgagaacggcaaggtgttcaacgattatgccaccggcgccaaagccgagtttgtaaaaaagaattctcctgaaataatcacgaaagagcagtatgaccaatggtgtgcctcaagcttctcgcctgaaatgagaaatgagatagacggggtggacggagaatttcctggccacggcctgagcgataaagagggcaacctggcgctttcgcgcgtaaggctcggaaatgtggtgctcataccccagacctccgccggtctcggtgatgacgatttcaaaatagtgcacggcaccgatgccgctcctccccacaactacacagccgcatatctctgggctcgccacggcttcaaagccgacgccctgatgcacttcggtgcacacggctcgctggaattcactccgcgcaagcaggtggcgctcagcagcaatgactggcccgaccgcctcgtgggcacgatgcctcacttctacgtgtgggccacctccaatgtgggagaggccatgatcgccaagcgccgctcatacgctaccatcatcaactatctcactcccccgttcatggaaagcggcgtcagaggcatatacaagaatctcaccgacgccatagcttcctacaacaagattgccgccagcgacaatcccgacccaaaggtcgtggaaggcgccgcactgctg

SEQ ID NO: 3355 - DNA, 14824 bp, synthetic construct
  source 1..14824: mol_type = other DNA
  misc_feature 1..14824: note = Synthetic
ctcttccgagctcatcgtcgtcgagggcctcgccaacggctcgctcgacatccgcaactcggggcgccagctgctcaaggagctcggcatcggcctcatcaacggcctcatcatctcgctgctggtattcctctacaacttcttccgcatgggcccggccggcacagccaccactctggccgtctcgctgtcgctctttgccgtcgtcatgttcgcctcggtcttcggcacgtttgtccccctgatgctcgagaagttaaagatcgacccggccctcgccaccggccccttcatctccatcaccaacgacatcatcggcatggtcatctacatgtccatctcgaccgtcctgctcatttcgttccactgacaatacggccgtcggcccccgtcttcaggtcaccctcgtcgagcatccggcgcaccagctcgatagcccgcgccctgcgcgacggcgctatctgctccaggatgtagtccagcggatgcccgcccggctgcgacgcgagatattccaccgtcgaccgcatcgtcacggcctccgacgcctgcgccgtcttcccgcccggacgccgcgacgcccggcacacgtcacacttgccgcacggactcggatgctcctcgccaaagtaccgcaacagcactgcctggcggcactcggtcgtggtgaacgcaaactcctgcatcgcgcgcacgcgccgctccatgttctcacgctgctcgtcatacacctcgcgcggcagcacgatgtagcgcggctcctcgcgcgaggtcgtccacactatatagggcgtcgtcttgcgcggcacataggtgacggcgtgcagccgcgacagatagagcagcgactcatacacctgatagtccgtcagcccgagctgtcgggctatcagaggctcgctgatgtagacatagtcggtgaaaagccctgtatacgtgcgcagtatcatctggagcaccgagtcggtcacctcgtcgagcggcagatcatagagctcgcgcttgttgaccgtcaccatcatccgcgaccgcgtcgtggtctcctcgacaaactccagatagccgctccgcgtcagtatcatcagcgcgctgtgggccacctggggcttgatgtcaaacgtgttgcagaacaggttgaagttaaactcgcacaccctctcatacccgtcgccgacagccacctccaggaagttgcccgccatctcatagacgtgacgtatcgtgtcgatgtcgggaaagctctcgctgatgcgccgtgtgagcagccccttgtcggcccgcgacaccaacagcacggcataggccggcttgccgtctcgaccggcgcggcccgcctcctgatagtactcttcgagcgacggcggcaggtcgatgtgggccaccacgcgcacgtcgggcttgtcgatgcccataccgaaggcgttggtcgcgacaatgaccctgacgcggtcctccttccaggcgttctgccgctcctctttctcctccggtgccagtcccgcgtgatagtagtcggccgatatgccctgcgactgcaggaacatcgcaatctcgcgcgtgcgcttgcgcgagcgcacgtagacaatcgccgtccccgtggtgccgcggagcaccctgagcagcatcccctccttgtagtcgccctgacgcgctatgtagctcagattgtcgcgcgcaaagctgcgcgccatcacgtttggcgccctgaactcgagttgcttcatgatgtcgtccaccaccctccgcgtggccgacgccgtcagcgccagcaccggcacgccgggaaacatgcggcgcgtctcggcaatcttcagatagctcgggcggaagtcatatccccactgcgagatgcagtgcgcctcgtcgaccactatcaggctgacattgaacagtctcagctcgtcgacaaacgaccgcgacctcagcttctcgggcgaaacgtatgcgatcttgacctttcccagccgacaacggtcgatggccagccgcgactcgcgccgctgcatccccgagtggaagtagagcgccttgatgccgtggctcttcaggttgtccacctggtccttcatcagcgagatgagcggcgtgacaaccaacgtcagcccctcgagcaccatcgccggcacctgaaacgtcagcgacttgccgccgccggtcggcagcagccccacagtgtcgcgcccctcgagcaccgacgtgattatctcctcctggagcggacggaacccgtcatatccccagtagcgacgcaacacgtcgtggatggcctgcgactgactgtccttgtctgacactgaatgtaatgttagcttgcggcggccgctcaggcaaggtggatgtccttgatcagcagctgtatcgcgttgatgttgttgcgctgatgcttgttctcctcgattgtgaagcagatgtcaaaccggtcgccggcgtggatgcgctcaaacttgtcggccatgttgaaggcgatgccgttaaacaccttgcccgacgtgtcgtcgacaatctcgagcttgatgtgctccaggtgcttgcccacgagcttgctcgtgccgaagtcgagcacgttgcgcgcacagaacaccggcttgctgttgcccggcccgtagggagcgaaacgcctgagcaccgacaggaagtcgggcgtaatctgcgagaacgtgatatacgagtctatctcgagcatcggagtcatctgtgacggcaggatgttgtcgttgacaaacttttcaaaccgctccctgaactcgggtatattctcctccttcagcgacagcccgacggcataggtgtgaccgccgaagttctcgagcaggtcgcgctgggcgtccaccgcatgatacacgtcaaatccctgcaccgaccgcgacgaccccgtcgccagcccgtttgacatcgtcagcaccaccaccggcttgtagtacagctcggtcaggcgcgaggccacgatgccgatgatgcccttgtgccagtccttgttatagatgactatcgacttgcggttctgcaacacctcggtgtgcgactcgattatcgcgttggcctcctcggtgatgcgcttgtcaagctccttgcggtcctgattgtagcggtcgatggcgcgcgccttctccatcgcctcggtcatgtcgcgcgacaccagcagctccaccgcctcgcgtccgctctgcatgcgccccgaggcattgatgcgcggacctatcttgaagatgacgtcgctgatgcttatctcgcgccccgtcaggccgcagatgcggatgatcgcccgcaggcccaggttgggattggtgttgagacggcgcaggccgtgataggtcatgacacggttttcgcccaccatcgggacgatgtcggccgctatcgacaccgccaccaggtcgagcattccctccaggtcgctcgtgtcgagcccgttgctgaccgcaaacgcctgcatgaacttgaagcccacgccacaccccgacagatggctacacggataggggctgccggccatcttggggttcaggatagccacagcctcggggagcaccctgtcgggcacgtgatggtcacagatgatgaagtcaattccctgctccttggcgtatgccacctcctcgatggccttgatgccgcagtcaagaatgatgatcaggctgacgcccgcgtcggccgccatgtcaatcgagtggagcgagatgccatatccctcgtcgtcgcgcgtcgggatataatactccacgtttgagtaatagtgctgcagatacttgtagaccagcgccaccgccgtggtgccgtccacgtcatagtctccgtagaccattatcttctcctttgctcccatagccctgttgagccgcgcgaccgccttgtccatctccggcatcaggaacggatcatgcaggtcgccgagcgagggatggaaaaatctctcggcatcgtcagtgtccttcacgcctcgcttggcgagtagttcgctgaccggaggcacattagcgtagcgtgttgccaggatgtcctcggcgcggtgctgttctggagtaaggggcgagtaattccatttacttgtcatttatgttgctttttttatatcttggctcggcaccgggcggcactatggttcgcgggcctcgccccgcgtcatcttacccctggcggcatgcatcggcaaaaaaaagcgcattcgagtctccggcgcatgatttcactcccggggagagtcgctatcattagccgcagggtggatacttgaggagagcctgccaagccgtcgcaacatttacgcgcggagtgggtgaaacgtcccgcgctcttgaaaatgaaaaaggcgctatctctgtgtggagcatcgcaacgcgttgatgcacactatggtagcgtaaggcagccaatgccgttgacatagtctgccctacgttatcgcaaaattagccaaaattttcggatttcccccgcttttaaggaaatttaatcgtccgtccggttataatagctacaatagctataatagctactatcgtgcacaggtatccggcgtgacaggtatcttgtcgacgcggcgctgatggcggccgccctcaaacggggtcgacaggaaggcgtcgacacacgctattgcggtgacgttgtcgataaatcggccggcgagcaccaggcagttggcgtcgttgtgctgacgcgccagccgggccagctcgacgttccagcagtgggcggcgcggacgccctgatgcttgttcatcgtcatgccgatgccgttgccgctgccgcatatcgcgatggcgggatagacctcgcctgcctcaagcgcgcacgcgcaggggtgggcatagtcgggatagtcacagctctcggtcgagtaggtcccgaagtccttgaaggcgatgccctgcgactcgagatagccctcgatgaccattttcatttcgtagccggcgtggtcgctgcagagaccgacggggacgccggggcggaggattgattgcatgttggtgtattatctttggtgattaatgatgtttcatgagcagaggcctcgccggtcgacatctcgacaggcatcctgacccaccacgaccgcgggatgcaggcccacgcggccgtcagcagccgccagcgccagtcgacggtcgccacgcgcttccggcgcacgatggcgagctcgatcagcggcgcggcatagtcgagcgacattatcatcggatagtccttgtcggggtcgagcagcggagtacggataaacccgggacggatgtcggtgaagcggatgttgacctcctgagtgcgcgccagctgctcgagcgcctcgagataggtgcgctggaaacgctttgaggcgctgtaggcggccgccacaccgatgcccttggtggccgccaccgaggtgatggcggctatctggcccgcgtcgatgttggccgtgtcgcggtagtacttgtaggcggcgagcatgatgcgcgcaaaccccaccacgttggtgtcgagcgtgaccacctcgcggctgatgtcgagctcggggttctggaaccccacgccggtggcatagagcagcacatccatgccgttgagccgctctatcaggtcatagaagcgctcgaccgagtcggccagcgtcacgtcgagcgtctgatagacgacgttgtcaggatactgctgttgcagctccttgagcggggcctcgcgccgcgccgccacacctacgcgccagcccaggcgcgcaaagtcctcggccacacgccggccgatgcccgacgatgctccgatgatgacgatattctttttcatgagtataggtattattcctgaggtgtaacggcctccggcgtctttttgttcagcgggatggtatacatcaccgacagctggccccctatcgacccgctgcgcttccccatgccggggatgaccatcggtgcgcccgtctctttggctactctcgtggagtatcgagtgatagttgatcatccaccccagcgacagcggtccggcaatcttcaccttcagccccagccctatctcaaagtagcccaccgtcgaccgctgcgacgggaagaccacgctgacatcctcgccccagtagctgttgtcgaccgtgacattctctatctgatacttgaacgacgtcaggccgtagcgcacggccgcccacagctggtaggcgtcgtttgagttgtagaggaagttatagttcgcccctatcttgaagtagggcgccaccggcgacttgtaggtatagttaagtccgctcggcgtgtcgtcggtcatactcaggcccacctcggccaccggcatgaaacggttgtagaagtcaaccccggcccacaccgaccccaggccatacttctggccgaaaatcctcatgacggggtcccacacgttcaggcccaccgtcagcgagtgcagcttgggatagacataccccgggatgcgcagactcgtcgagtcgacccactcgcggcccgtgaccgtatcgaccagcaccacgcgcccctcctcgtcgtgatagtgagccatccgcgacaggtcgggctcgtcgggattgtcagccgtcttgcgccccggagccggagccgacggcgactcaggcgtcaccggagtgatgcgccgctgcgccgtcaccccaatccatgccgtcgccagcatgagcgccgtcatcagcgccaccgccgcacgcctcatcgcccgaggccctcctcagcctgtgacgtcgggtagaaaatctctatctgacgcatcgccacattcgttatcagcgagtcttttatcgccaccgagtcaatcacgtgcgacgtatgctccagccggttgattttatagcggaacatcgccccgcactcctcgcccgcaaagtaaggcatcgacgagtagtgaaacgtcagcgtgtcagccggataggccgtcaccggccgtccccccgtagcgacatagcggatatagaacgacgtcgtcccctgtgtcgacctgaaaggcagatagacctcgctcagcgactggcccgcgtgatagagcagcgagtcgcccggcgcgccgatgccgccaatctccaccgagtctatgcttatctgcgcccgcgtctcatagctaaaaaatcccgccagcggcagcgagttctgattgtccgcgcagcccgacgtgttacaccccgtcagcgccgtcgccatcactgccgtcacagccaccgccgtcagcgcgcgccaccatgcgcgggccgcctcagtcgagctcctcctcgatttcatactgattgcgtcgcgttgagttacgcaccaccagttccccgacaaatcccgtcaggaacagctgcgtgccaagtatcatcatcaccagcgacagataaaaataaggcgagtccgtcaccagcgtgtagtgattgccgtgatacatattgtagagcttcatgccccccacgacaaccaccgcgataaagccaaggataaacatcagcgaccccagcaggccgaaaaagtgcatcggcttcgcgccaaacttccccgtgaaccacagcgtcgccaggtcaagatagccgttcacaaagcggtcaagcccaaacttcgtcttgccatacttccgcgcctgatgatgcaccaccttctcgccgatgcggccaaagcccgcattcttcgccagataaggaatatagcggtgcatgtcgccatagacctcgatatgcttcaccaccttgttgcggtaagccttcaggccacagttgaagtcatgcagatttttgatgcccgacacacggcgcgccgtcgcgttaaacagcttcgtcgggatcgtcttcgacagcgggtcatagcgcttctgcttccaccccgacaccaggtcatagccatcctcctttatcatcctgtacagctcagggatttcatcggggctgtcctgcaggtcagcgtccatcgtgatgaccacgtcgccctgcgcccgcgcaaagcccgtgttcagcgccggcgacttaccatagttgcggcggaactccacgccctttatcgccgggttcttctcccgcaggcccttgatcacctcccagctatcatcagtcgacccatcatttataaacagaacctcatagctgaacccatgctcagccatgacacgttcaatccacgccgtcagctcaggcagcgactcagcctcattatataatggcacgacaaccgaaatatccatatccaaaaattaagagctcctccaaagcccggtcaacaacagtcaacgtcccagagagcttatttcaaaaaaaataaaagttaacgtcttatcaacccacaaagttacacattttttccaaataatcccctttccaccccccgctaaaaaactccatgaaaaaaatccacccccgcgcctccccccctgctaaaaagtccttcatcccccgcgctaaaatttttgtcccagccggcgagcttcagcgagcccatctaatgagaccagccaattttattcaattaaatcactgtattgaataaaacaaccactttttattcaataaacctcaatttattgatcaattccatcgtccgctatctctcctaagcctcctcccgcgcctctcccccgcgccctaaaaagccgccctaaaaacccggcgccatccccccactcctcccctcgctaaaatttttgtcccccgccggcgagcttcagcgagcccccgtccaccgatgtccacaaaaagaaagagcgcctcattgctgagacgcctcttcactgaatgttttcacaacggaataaaatccttattgtgatttgcctattttttctttgcatcgcaaaggtaaatcttttccgcctaatttcaaaacaaaacatcaatttttcgtcacggccatccaaaacaattctttttcttataattctcctcctcgtcaggcctttttgaatttattttgcttatctttgccaataatcattaatctgataattcaaccaatctccttcagacaaatacatcctgcaaaaacacaaccatgaaacaaatattaggtcttgacctcggagtcggatctgtcggctgggccgtcatccgtcagtctgacaatacccctgaagaaatatctatcgaaggtctcggatcacgagtcgtgcccctcaactccgatgagacaaccggatttaccaaaggcaacggcgaatcaaaatgccatgagcgcactttgaaacgctcaatgcgccgcaatctcgatcgctttcagcaacgccgcaagatgctcggccaactgctcgacgagctggggatgacgtttgacagcgacctgcttcgcctctcgccgttagagttgtggcaattgcgtgccgacgccgccgacggcaagccggtctctgcggcacaattgggccgtgtgatttaccatatcaatatgcgacgcggttacaagagctccaaggacgaggaaagcgccgagggcgccgacaagcgcaaacaatctgaatatcttgccaaaatcagcggtcgcgcacgcgaggcagccgaggcaaaccagacacccggccaatattttgccgtacggctcaaagagtcagcctataccaccccgtcaggcgctacctgctgttcctatcgcattaaggaacagacattcccgcgtcatgcctatattgaagaactgcgacgcatccttaatgcacagcgtcagcatcttcccgacatcctgaccgacgccaacattgcccgcattgttgacaccatcttctaccagcgcccgctgcgcagctgcaaacaccttgtaagcctctgcgagtttgaaagccacgagattaccgactccaaaggcaacaaactgattgtcgggccacgtgtcgcgcccgcctcttctccgcttgcccaggaatgccgcatctgggaagccgtcaacaatctgtcgctcatcaaccaccacaaccgcaagcgcaaagactcgccactcccatcgctctttgacatctcgtccgacgcccggaagttagcatacgagtatcctatcgacgacaatgaccgcagaatgattgtcggatttctcaacgagaatgagaaaatgaaggggtccgacctgctaaagctgctcaggctcaggaaagacgatggctttgccgtgccggctcaggtctccaggggtctgaaaggcaacgtcacccgcaacatgctccggaaagcactgggcgacacgcccggcgccgacgacctgctgcgttttgatattgaaattgtcgagaccgaccaatacgacgaagtgaccggcgccgccaagacgatggtctccgacagctatctgcgtgagccgctctaccagctgtggcacacctgctactcagtcagcgactttgacgagtttgacaaggccatccgcaagaaattcggcatcaccgacagcgaagtgatcaaccgccttttccacctcgattttcgcggcatgggatatgcctccaagtcagccaaaatgatgacccgcatcatcccgtggctgcagagcggatacaagtatagcgaggcatgcgaactggccggttataaacattcgtcctacgtcaccgccgacgagaacgccacccgtcctctccttcagcaactgcctccgatacagaacggcgacttgcgtcagcccgtggtcgagaaaattctcaatcagatggtcaacgtcgtcaacgccgccattgacaaatacggcccgatggatgaaatccacgtcgagatggcgcgtgaacttcgccgcggcaaggaccagcgcaaggccgactatgagcacaacagtcggcgcgagaaagacaatgaccgcatcatgaaagtcctcgttgagaaaggtttaaaaggctctcgcacacaaatccagaaataccgcatgctcgaagagtccgacttttgctgcatgtattgcggcaagcccatcaacgatatggagttcctccgcggcattgaggccgaccgcgagcatgtgattccacgctctctatttttcgacgacagcttctctaacaaagtctgcgcctgccggcagtgcaacgccgccaaaggtcagatgaccgcctacgacttcatggcggcacaaggcgatgacacacttacaacatttatcaatcgcgtcaacatgcttctcgaccgctataaaaagtccggcggacgcgagggcatctcaaagacaaagcacacccgcctgctgaccgctctgaaagacatacccaaggattttatcgaccgcgacctgcgcctgactcaatatatcacacgaaaagcgcttgacatgctccatgccgtgagccgcaacgtgatggccacttcaggctcggttaccgacttcttccgtcacgcatggggatatgacgaaatcctccactcgctcaatttcgcccggtatgaccttgccggacaaaccgaccagaccgaggtcatccacaaaggccagacacatcttgagacacgcattgccggctggaacaaacgtctcgaccaccgtcatcatgccattgacgccctgaccatcgccctgacccgacaagcctatgtccaccggctgaactcactcaacgcctccggcggcgatagcgccgacggtcagtccgactccgaccaactgacgggcaaccttaacaaatgggccacctcgcgtccccatccctccgtcgctgcggcatcggatgctgtggccgacatcgccatatcattcaaggccggcaaaaaggtcacggtccccggcaaacgatatacttataaaggtagcaagcgcactttggctcaggacggtctgctcgttccacgcggcgcgctgacaaaagagtccacctatggcgtccgtaagatgccgattggacttcagccgctgaaatacctttttaacaatccgtccgagattgacgacatccgcattcttcgggctgttgaggcccggcttgccgacaacgccaacgacgcctcaaaggccctcaaaagctgcaaacgccggcctctcacggtggaaggctccgacgtccccgtcacagaggccctgtgcttgaaacccaccgtcgtcatccgtgtaaagctgacatccgtcacgcctaagaactgcagcgacatcgtcgacggcgccgtccgtgaggctgtcgcaacccgctatgaagaagtcggcggaagcgccgacaagtttgtcaaaagccttgccgagcgtcccctctaccgcgacgccggcggccgactgcccatcacttctgtgcgcatccgcaagggtctgtctcccgagtctatcacaccggtacgatacgatagccacggcaatgctatcggctatgccgagtttggcaacaaccatcacatcgccctttacgaaaaaccggacggaactatcgaggagtgcgtcgtgccttttgccgaagccgtccgaagccgtcaggccaaccttcccgtcgtagtcaccgatccacaggccttgtggcaacagattgacatgctcgacaaagagctccccgagtcgtctctcagccgcttcccgtcccacgacagccgttttctcatgtccatgcaggtcaacgagatgtttatcctcggtctttccgacgaagagttcagcgacttggtccgtgacgagaatcggcacgaactgacttcccatctctatcgtgtgcaaaagctttcatccctatactacgatttcaagttgcatacatccaccctctccgactgcaccactgaccagatgaactgcggcaactacattcgcatcgtatcattctcggctctgaaaaaatataatcctataaaagttagagtcgacatcttaggcaacattattttgccgtcctaagtctttaaacaccaataaatatccattccgttacagtctctctcctccatgaaacagacgctctattttggcaatccatgccatctcagcgtagccaacgaccagctgcgcatcgccatcccggccccgtccgacaatcccggcgccgccgggacagtgaccactcgtccgcttgaagacatcggcatcatggtcattgacacaccgcgcgccaccatgacagcctcagttttttccggtctgatgaaatatggcgcggcgctcattgtctgcgacagccggcatcttccctcggggctgatgctcaatctcgagggacattcaagccagtcagagcgcttccgcacccacctgacagccacactgccactgaaaaaacagctctggcaacaaacagtcagcgccaaaatccacaatcaggccatggccctcaggcagctcaatctcgaccaggccctcaacatgcttgcctgggagaaaaaggtgcggagcggcgaccccgacaacttcgaggcgaccgcagccgtgtattattggaagacctatctcgcatccttcccgggcgtgacccgccggcgcgacggcgacgagccaaactcaatgctcaactacggatatgctatcctgcgggccatcatagcacgcgcccttgtcgcagccgggatgcaccccacccttggcattcaccaccgcaacaaatacaatccctactgtcttgccgatgacatcatggagccctaccgcccttatgtcgacatcattgtggcaagtatcgtccgcgacaaccctgatgcaaccatcgccgacaaagaggtcaagcgacaactgctctcgattcccgtatgcgatgtcaggataggcaacctgcggcggcccctctcgaccgcggcagccgagacagccgcatccctattcaaatgttttgccggcgaaacgcgcaaaatccactatccagcgctctaatacacaatgacttggattgccgaacgttatagcgagtaccgtattatgtggcttctggtattttttgacatgcccaccgagacaaaacagcaacgtaaagcctatgccacgtttcgtaaacaactgttgtgcgatggatttacgatgttccagttttcagtatatatccgcaactgccaatccggcgaaagtgccgatgtccatcgaaaacgagtcgagaacatcattccccaatggggaaaaattggaatactgactgtgaccgacaaacagtttggccaaatgaaaatcatcgaaggcaccaagcacgtgtcgtccaccgctccgacggccgtgcagctcgaatttttttaaagattattcacatttaataattgtggaaatagacatccgagcttatacgacattctctacatcttatatccatacatctcgtagcattaaaatttcacaccccatactaaaaaagtgaccccttccggagtcacttttttaaattttgtctttctctgtaactagctgttccatagttaattacaaccatcctgttggattagacaatgcaaagatagaaaattgtaggcaaatcacaacaggtcactatgtaccccgacgacgaaacagttggattagacaatgcaaagatagaaaattgtaggcaaatcacaactaatcgcatggttgcacaatatcgacattagttggattagacaatgcaaagatagaaaattgtaggcaaatcacaacaacaatggctttatcacctctggcactctcgttggattagacaatgcaaagatagaaaattgtaggcaaatcacaactgactacttgggagggcttggcgtcacccggttggattagacaatgcaaagatagaaaattgtaggcaaatcacaacagccgactacaacgccaaactgcaacgtctgttggattagacaatgcaaagatagaaaattgtaggcaaatcacaacttgtcgcagttgacaatcttgaactgcaccgttggattagacaatgcaaagatagaaaattgtaggcaaatcacaacgtgagatgtccgaacttgcgctgtcccggtgttggattagacaatgcaaagatagaaaattgtaggcaaatcacaaca

SEQ ID NO: 3356 - DNA, 11937 bp, synthetic construct
  misc_feature 1..11937: note = Synthetic
  source 1..11937: mol_type = other DNA
gaagcgttcatccacctcatcgcccacttcaaggccatactggcgcgcggtggcgggcatgaactgccatatgcctcctgccttggccgacgatatggcccgtgggttgagcgagctttcgatgcaggcgagatagagcatgtcggcgggcacgccgttctgtttcaatatgggcgctatcacgggaaacagcttgttggcgcgttttatcaccaacatggtgttgccgtgcgtgtaggccatggatgtgagttcgcggtcgaggcgttcatacatgtcggtgcggtcgaggtccaccttttttccgcacaaagtcatcgaagcgggaatatcgggattgaccacacgtgaaaacaccttgcttgatgtgggtgcctgggccgcggccggcagcgctacagcgcaggcagccgatagaagtatgatatgggcgaaagtgatgttcatttttttcttgcggggtttggtagttgttaggagagagaatggaatgtcagtcggagcccgacgcgccataggcatcgtcatcgcgggctcctattatgttgatgtcgccgctgaggttgtaagccttgccatcggcgcctctggcgcgtatcacataataataaacacctggcgaggccttttttcctccgatggtgccgtcccatccctgcgacgggtcggtcagtgtgattatcttgctgccccagcggttgaatatctcgcagtgaaactctacaatcgactgatagctcacgcgccactcatcgttgacgcccgggcttgtgtgtggcgtgaacgcattggggcacagcagtttcgattctcctatcgaaacctcgtatgtctcgcccgtgtagctgcaggctcccgtagcgtcggccgctgtgaagcgcacatagaaagtgccgttctcgacaaacgtataggaaaattcatcctgattgtagctgttttcgagaatgtcgaaatcgggcgtgcgtgatatctgccattcgcggtaggccacagcatcggtcacatcggccgcgaacgttatctcgcagggagccgatcctcccaatgatccggtggccgggttctgctcgttttcggcatcgcgttcggtctgcacggctgtggtgacagcctgcacggccacggcggcatatgtgtcgcttctcgccgatgcctcctgctgccatgccctcaggaaacggtcgccctccacgccgaactgtgtgtcgcacagcggcgcggccacatagcttgacggcgttatgtaaggcatcgatacgttggtttctgcctggacatagcgtcccgcctctttgtcggccacgagagtggtgtacaccaccgagatatcacggtcgagagtgatggcccgcccgttgatgctgtagaattgtatgggcgctccgtcgccctcaaatcccagaaccacattgtcgcaaggatactcgccccccgacgggtgcagtcccgctatcgtgaagcggtggccggaatagtcggtgatccagtagcagtgttgccgtccggcgtcctctatcaggatgccggtgtcgcctcccctgagggtgacaaccgacgatgttccctccacgcgtgcggccaccggttcggcaaatgccgcgccggccgctccgaagaggctccatgaagccgtgggcgaagggtaggacacctcgacaccggcagccgccggcagcacatacaccgcggcgaggcttccggcaccacctcgacgggtgtgtcggcgctaccgcggaaatcaagagccgacgccggacaggcggcagcaatcccgaggcacagaatgagagatatgtggcgtgagagataatacattgcagggtgtttagcctacaaaattacaaaatatcccatatatatgcaaacatcccgctatcctgggtctaattgccgcaacggcggtactccccgggcgacatccctgtgttctgccggaaatagcggccgaaaaacgattggttcgggaaatgcagggcgcacgccacctcctttatgcttgtatcgggattcgacagcagagtcttggcctccgctatcacgaaacgcgctatccagccgccgggcgacattcccgacttctcgcgtatgatagtggcgaagtagcgtggagtgagattcagccgcgatgcgtagaaactcacctcgcgctgctcgcggaagtgggtggacagttccgacagaaaccgcatgaacaccgtgtcggcgcggctcggctgctgagcctcggccggagtatgcgacacgtaggcatccattatctcaaacatcagcgtctgcgtgagcgccagcacgatgcggtcggcaaacactgacgcctccgtgcggcggctgcgcaccagctcaaccatgcgcagcacacgcgcaaactgttcggcagtgagcgagaagcaagggttggcgcgtatctgggtgaggcgttgagtatggctcacagcctccagagccttcagcaccaattcgaaatcggccatgccgcccacgccctgcagattgggcgtgcatgagctcaccgtgatatgcgccagggtggggtatatgaataaatcaccgggatgcagcacatacttgctatggtccatctccaacgtcacggagcccgccgtgcacagcatgaaagcgttctggctcggatgcacggtgctcaggcgcgccgttatggatgtagcgtctacgtcgaaaatgtctactaccggtggtttcatctgatttttttattgcgattttaatatgcaaaaatagcaaaattgcagttatttcacgcgattatttttcaatattcctaaaaacatcccaaacggccacgtaattggtgcttttggatagtgtgggacatgtcgctgaatttggattatgggtgtgaatatgctatatttgcaaccgtaaacatcaacaaaactctataaaaagcgtcagattatgagcgaaaagaaaaaacgatatatgctgtccgaggacgatatcccgcgccgctggtacaacatccaggcggaaatgccggtgaaaccgatgccaccgctcaatcctgccacaaaagagcccctgaaagcagaggacctttatcctatatttgccgaagaactctgccgccaggaactgaaccagaaggatgcatggatcgacatccccgaggaagtgcgcgagatgtacaaatactatcgctcaacgcccctcgtgcgggcctacggattggaaaaagccctcggcacgcctgcccacatatactttaaaaacgagagcgtaagccccatgggctcccacaaactcaactccgcgattccgcaggcctactactgccgcgaggaaggcgtcaccaatgtgaccaccgagaccggagccgggcaatggggcgcctcgctggcctacgccgcgcgcctgttcggcctggaagcagccgtgtatcaggtgaaaatcagctatgaacagaaaccctaccgccgcagcatgatgcagaccttcggggcgcaggtgacaccttcgccatccatgtccacgcgcgccggcaaggatattctcaccgccaaccccaatcatcagggctcactcggcacagccatctcagaagccgtggaactcgcccgcaccactcccggctgcaaatacactctcggctccgtactgagccacgtcactctgcatcagaccgtcatcggcctggaagcggaaaagcagatggctatggccggcgaatatcccgatgtggtgatagcatgcttcggtggcggctccaactttggcggcatcgcatttccgttcatgcgccacaatttcaccggcgagcgccacacacgcttcgtggctgccgaaccggcatcatgtcccaaactcacccgcggcgaattccgctacgacttcggcgacgaagcaggctacacacccctcctgcccatgttcacactcggccacgacttcatgccgccgaacgtgcatgccggaggactgcgctaccatggcgcaggcgtcatcgtatcgcaactgctgaaagacggcctcatggaagctgtcgacatcgagcagatagaatccttcgacgccggagtgctcttcgcccgcgccgagggcatcatccctgcgcccgaatcgtgccatgccatagccgccaccgtgcgcgaagccctcgaatgcaaaaagaccggcgaagaaaaagtaatactcttcaacctctccggccacggcctgatagacatggcgtcctacgacaagtatctcgccggcgacctcgtaaactacgaatacaagcccaaaaaggcctgaaaagcctgatacccgaaaaccgtacagacacaacgtaggccgttcctcacagcaggggcggcctacatgtcatccagatcctccgccgtgcgctccataaggctcgccgccagcgagtcggcagtatggattatagacaccaacggatacagcttccgcgccgtgtcgtagctgcgcgtgtcctccaggctgttcatgtttatgccccaggcgcccatgtgccagcgtatagccagcatctcatcgtcgttcagcgccaggcccgcgcacagcagccatatcacactcttctcgccgtgtcccatcggaaaattcttgtagctcaccttgtagccctcgctgtccacccagttgcccagttggtcgcgccgtttcttcacactacgcttgtaaatatcggctttgcacacatcgtgcagcagcgcggctatagccacactctcctgtttcacctccccctccagtgcaggctcaagcgccttcatgctctcaagcacagccatggcggcatgataggtgttcagagagtggcgaaccagtccacccgccgtgttcagatgatgtcccgccgatgccggagcctcataaaatcccagcttctccagatcctccagcacatagtccataccctcgcggcccgtcgccttcagcagcgccacaaactcctccttatctttcgttctatccatactcatctcttgatttttctgcaaatttcgccaaaatttccgaatccgcaatgttttcccgaaacatagatatttatcagatatttttcgtaaatttacggcgtagctttataaggaatgcaaaaaaagaaagagccacccgacgggcagcctctttctgaatgttttcacaacggataaaatccttattgtgatttgccttttcttatttgctgtgcaaagataatacaaatgtagctcatcgcaaaaatattttgcaagattatgaaaaaaatacttggccttgatctcggagttggctctgtgggctggagcgcgatagaaatagacgacgacaacaatgcgcgcagattgctgggcatggggtcgcgcatcgtacctctgacagtcgatgaaaccacaggcttcaccaaaggaaaaggcgaaagtgtgtgccatgctcgcaccatgaaaagaagtatgcgccgcaatctcgaccgttttcagcagaggcgcaagcgtatcggcattgttctcggcaatcttggtatgaaatttgccgacgacttgctgaaactcagcccgatggagctgtggagcctgcgtgcatcagccgctgaaggccgaaaacttacactttccgaaatcgggcgtgtggtattccatataaattcccgtcgtggctaccgttcctctaaagaagaagctgccggcgataaaaagcaatccgattatctcgcagctataggcgcacgtgcaaaggaagctgacggcaaggggcagacccccggacagtattttgccgaacgcctgaaacagtctgagaccatcaccgccggcggtaaagtatatagctacagaatcaaggaaaaggtatttccgcgcaaggcctatgaaaaagagctgcacacaattctgaaggcgcagcaagcccactacccagatattcttaccgatgagaacattgccgaaattgaagatgcggtattctatcagcgcccgctcaagtcgtgtaaacatcttgtgtcgctgtgcgaatttgagtcgcgcgagataaccgactccgatggcaagaagcacctcgtggggccgcgtgtggctcccgtgtcgtcgccgctgtttcaggtagagcgtttgtgggaggcggtcaacaatattgtgcttgtaaacagtcgcaaccgccgtcgtaagaacgccgacatcgcgctttcccttttcggagatgcaagaaaagaagcttatgaatatcgcctcacgcacgacgaacgtttgcgtgtgtttgaattcctcaatacacacgcccaaatgaaaggttccgaccttctcaagattctcggactaaagaaagacgatggtttcgccgtgcccgcaaacatagcgcggcatgaaaggcaacactacccgtgcggcaatcgaaaaagcccttgccggtatgcgtggggctgaagacttgttgagatttgacctgcgctttgaagaaagcggttctgtggacgaagaaaccggcgaggtgctaatgcgcgtaagttccgactatctgcgcgaaccactatatcgcctgtggcacacactctattctatctctgaccgcgatgaactcggaaaggtacttgccgagaaattcggtatagcagatgcagccgttgccgacaatctgttccgcctgaatttccgtgaagccggctatggcaataaatccgccaaattcatgtgcaagctcatcccctacatggagcgtgagggtctctgctatgccgacgcctgcgagcgcgtaggcacgcgccattccgaaagccttaccaagggggaaaacgatagccgcgagctgcttgctctgattcctcagctcaaaaaaggagagttgcgtcagcctgtagttgagaagatactcaaccaaaccatcagtctggtaaatgctgccatcagtgaattcggcagcttcgatgaaatacacgttgaacttgcccgcgaactgaaaagaagcgccgacgagcgcagctccgactacgagcgcaacaacaagcgcgagaaagagaataaagcctgcatcgaggccatcgttgagttgggattgcgtccgagcgccaaccgagtgcgcaaataccgcatgtggaaagaatcagaacaagtgtgcatgtattgtggacaaccggtgggcgtaaaggacttcctcctcggcattgatgcggaaaaggagcatgtgattccgcgctcgatattcttcgacgacagtttctccaacaaagtgtgcgcgtgccgcaaatgcaaccatgacaaggggcaggctaccggctatgatttcatggcagcccagggcgaggaaaaattgcagcaatacatcgaccgtgttgagaaactgcacgaaatgtacaagtcatcgaaaggcgagcgtggcatttccaagaccaagcacgaccgtctgctcacatcgcgtgaaaacattccgcaggatttcatagcgcgtgacctgcgcctcacacagtacatcgcgcgcaaggccatggagattctccgtcaggtgtgtcgcgatgtattccccaccaccggtgcagttacggatttcttccgccatgcctggggctacgacgagattctgcataacatcaatcggccacgctattctgaagccgggcagaccgatatgatagagcgcaacaaccgaaaggaggagcgaatagaggggtggaacaagcgtctcgaccatcgccaccatgccatcgatgctctgaccatagcgcttacccgccacagccatgtgcagcgcctgaacactcttaatgccggcggagcagaacttggcaatctcgacaaatgggcagccgctcagccgcatttctccgtggcagcggttgccgatgccgcaagacgcactgccgtgtcgttccgcgcaggcaagcgcgtgtccacgccatcacgccgctatatccgacgcggcggcaagcgtgtgcttgtgcaggatggcctgttcactcccaagggggcgctcacggaagaatctgtgtatggcataaaccgcacgcgtttgcacgcctgtccgctgaaatcaatgtttgccgcgcctgccttgatatgcgatgagcaagttcggaaagccgtggagctgcgcttggcagaatgtgcctacgatgtaaaagcagcagtgaaatcgtgtaagaaatcgcctctgacactccaaggcaccaagaccgtggtcgaggtctgtgacatgtggaaagaagactatgtgattagatacaatgtggaatcaatcacctataagaatatcaacgatgttgtcgataatgctatccggagcattatagccgaccgctttgcagaggttggcaacaacgacaaggccttccaaaaaagccttgctgagcgtcccctgctttctcccggaggtcagcctgtgcgaaaagtgcgctgtttaaccggcctgaaacccgattcgatgaccgtagtccgtcgttcagatgatggcaaccccattggattctccaagtatggcaacaaccatcatgtggctctgtacatcgctcccgatggctctttggaagaatccatcgtgccatttgccgttgccgtagagcgccgccgtctcgggcttccagtcgtggtcactaatcctgaagcgctttgggatactatcaacaatcgccgcgatgaactgcccgatgagttgctttcccgctttccgctgcccgaccgcaagttcctcacctccatgcaggtgaatgagatgttcatcatcggtctgtcggacgatgaaatcaacacggctatcgccgcagggcgcacagagctgttgacagagcacttgtatagggtgcaaaggctctcttctggggattatatatttagacgacatacttgcactattgctgataccacaaaagagcagacggctaataaaaactacatacgcatccaaagtgccgataaatacaaggagctgaatcccataaaagtaactgtcgaccgcctcggacgcattcaccgtcaaatctgaatacgcatgatcaagaaaactctctatttcggcaatccggcacgcctgagcgtggcgcatagccagctgcgcatagtgcagcctccgcgaccgcccgaccaatcggaaaccgagcgaaccattccgctcgaggatatcggccttgtggtcatagactctcagcaagtagtaatcaccgccgctgttctgcaaggccttatggagagcggtgctgcggtggtggtgtgcgacagccgccacttgccatccggcctgatgctgaacatggagggtcactccgagcaggcagagcgcttccgggcgcacctcgcggcaagcgtgccgctcaaaaagcaattatggcagcagacagtagccgctaaaattcgcaaccaatgtgcggtactggaggaatacaccggcgagcgcgccggtaacatgcgggcatgggccgaacaggtgcgcagcggcgattccgacaatctcgaagcccgcgccgccgtatactattggcgccgcatgttcgagcgtacgcatgccactaagcgcgaccgcaatggccccgaacccaattccctgctcaattatggctatgccatagtccgcgccatcgtggctcgtgctcttgtttctgccggcctgcatcccactcttggcatcttccaccgcaacaaatacaacgcctattgccttgccgacgacatcatggaaccctatcgcccgtatgtcgaccgtctcgttactcttctgttggctgaaaacaaggatgccacaataaaagatatggccgtcaagcggcaactcttgtccattcccactcttgaggtgcgcatcgagggcacacgccatcctctcatggtggctgctacagtcacagcggcttctgtctataagtgctttgccggcgaagcgcgcaaaatcaaatatcccgacatgcagccatgaaaagtgtggccgaccggttcagcgagtacagaatcatgtggctgatagtctttttcgatatgcccaccgagaccaaggcgcagcgcaaggcctatgccgattttcgcaagcgcttgctcaccgatggtttcaccatgtttcagttttcgctctacatccgtcattgtccctcatgggaaagcgccgagatgcaccgcaagcgcgtcaaggccatagtaccgcaatggggcgagattggcgttctcaccgtcaccgacaagcaattcgcgcagatggagctttaccggggcatcaagcgccccgcgccacctcccgtttcagtccagttggaactgttttagaattattcgcaaaacttggcacaatccgctccaagtaggcacaaaagtacaagaaagcagaagagataaaagagtgataatcaataaaatagttatctttattctgtctttttgtccttttgcatcctcgctatatcgggtaatatcggcacgagtcttttttcgggtgtacaaacaaaaagaattacactcattgatgtagggatgcaccccggtgcatcctaaaaatcagcatattaggataggatactccggggagcatccctacaatcatggtacatttgttatagatgcaccgtaaattcggcttgttcccaaattttgggtgcatttgcgcgagattccatccacaatgtacgaaacatcgctttgcgatgtattgggagaaagcggctcaatccatgaggcttggtttcagtattttgcacaaaaaaacagaagcgattgaaaatctctcctgtttttttatttctaaaaccacttgtaacgcattgtggctcagataatactgcacatccgttggattctacagtgcaaagataagaaaaagtaggcaaatcacaacctcttttcaggaaacttcgacacctgatttgttggattctacagtgcaaagataagaaaaagtaggcaaatcacaacaaatgttatgtttgatgatgcaaagatagggttggattctacagtgcaaagataagaaaaagtaggcaaatcacaacatgtgttatgtttgatgtttgatgttgcaagttggattctacagtgcaaagataagaaaaagtaggcaaatcacaacaagcggggctatttcaacggccttaggcccgttggattctacagtgcaaagataagaaaaagtaggcaaatcacaacacctttgttggaatattctgatatagaacagttggattctacagtgcaaagataagaaaaagtaggcaaatcacaacagaacaacaagtccgaaaaatagctgatacgttggattctacagtgcaaagataagaaaagtaggcaaatcacaacaaggacaatgcaattcagcctacaccgccgccatcgcaggagccatcgccatcactcgatgagtttccgccatcgctgcttcctccaatgccaagtcctgcagcaagtccgattccgaaagctatcgcatcggctgcgtcgcttcctccatagctgtttttataatattcgtcggccccggcctcatcatcatcatcatagtgcgcacggtcgtaaagagaccagtccggagcttcgggatcgtaaagcggatcatcctcctttacatacggcgcaccatcagccgagaggcgataaatatccggatactgcagcatatgatccatttgagctttataccatgcccggaaaacctcccagtttttcaactcccattgaggataattccgaaaaatctcgttaagttctttaagattttcctcaactccatgatactgcatgataaaaagcatgtgctcttttagcttttcttcattcgtttctaaagtcgcgaataaatccacaccattgtcatgtcgccatttaatttgatagatgcagggaacaatcagagccaatgccccggaaacgatacaagccataaaaaacgcctgaacaggagtagacggatcaatactataaaaataaagcgaaagaatgcatgtggctacaataaacaccacccatgtcaaaattttcttcatcgttcaagccctttcgttaaaaattcggtaatgagttgagaggtcgaaac

SEQ ID NO: 3357 - DNA, 8874 bp, synthetic construct
  misc_feature 1..8874: note = Synthetic
  source 1..8874: mol_type = other DNA
caccggcaggggatgaacgccatgcgcgtgcgtctgttcgtcaatcccgccaagtataaggagctgcatccgaacgacgccaatcccgataccaggtatgacccgaacgcctgccaggacctggagtacatcaagccgttgtgcaagcgcatagtggacagcggcatggacctgatgctggacttccattacagcgacacgtgggcggatccggccaagcagtggacgcccgttgactgggaaggtctgaccgacgagcagctgtatcagaagatctacgactacacccgggatgtgctgacgcagctgaaggattacggcgtggttccgaggttcatccagcccggcaacgagatcagctacggcatgctgtggggacccgcaggaacgcccagtccgaagaaggccctgatgggcagtgacgccaactgggcgaggttcggcaatctgctgaagcaggccgtcaaggcatgccatgcggtctgccccgatgcgaagatcataatgcacaccgagcgagtggcgcaggttgacatgctgaagaatttctacgacaagatgatggaactgggcgttccgtacgacataatcggcctgagttattatccatatttccacggcggcttgaatgtcctggacaaggccttgcagtcgatgcaaaacaatttcctgtccaagaatgtcatgatagttgagacgggttacagttacaaatgggaactacccggcaccaatcacgacaacacgcagacatggccctacagcgaggccggtcaggccaagttcgtcaccgacctggtgacagacctggagaagtacgaccaagtcgacggactgttctggtggtggctggagtacaacgcctacggtacgtcgctgagcggctggtacaacgccccgctgttcgactccaccacgggccgtgccacggccgcgctcagcgccctctgcagctacgccacttccggcatagtcaccctccatccggacgacctcgacccctccggtttatctgactctgattcctggtacactatcgccggccgttgcctctccgccgctcctacaacccccggcctctacatccgcaatcacaggaaggtaatggtgcaataaccaaaaacaagtactatataagtccggattgaacgccctggagcaaatgttcaatccggactcattgttaaatatttcgttatggaaatatttattcttgaaaaatgcaaaatttcaataaaaatgtattatctttgtgaaataatggatttcatttgaaattgaatgtgcaggaatctcagacgaatgaagactcgtaatgtttccatatataaaagaaagagagcataaccaataggcgatgctcctctttccaaatgttttcacaacggaatataatccttattgtgatttgtctgaaatttctttgcgatgcaaatttaatgaaatttttgtaacgaacaaaataagtgcgattaattaacattcatgaaacgtatacttggactggatttaggtgtagcatcaattgggtgggctgttatagaccttccaaatagatggtgaagcagatgccatgagaatatgtggattaggctccaggatcataccgttgactaatgatgaagagacaggattccgtaaaggcaacagcgagacggtttgcaagagtcgaaccttaaagcgcggttacagacgaggtcttgatcgatatcagcaacggcgtaagatgctgggacagatattggctggagttaatatgacttttgataaaagccttaagaatttgccacctgtggatttatggggtttgcgagccaaggctgccacaggagaacgactaactcttccggaaatcggaagagtaatatatcacataaatcaacggagaggttataagcattcaaaaagcgatgttgccggtgatgacaagaaacaatctgattacttgtcttcaatcaaaagtcgtgatgatgaagcccgagagaataaccagactccaggtcagtatttttatcaaagacttgttgaatctgtatacgagacttcaaaaggtggcgctgcatgtacttacagggtgaaaaatcaggtgtttcccagaaaggcatatgaagaggaactgaaacaaattttgatgacacagggtaaacattatccggatgtgctgacaaatgaagttcaggaaacgatttttaattatgtgttctatcagcgcccgttgaagagctgcaagcatcttgtatcactttgtgagttcgagagcagggaaattgtcgacgagaagactggtcgggttatcttgaagggaccgaaggtggcacccgtgtcatctccgttgtttcagttgtgtcgcatttgggaagtcgtgaacaacatagaactgcataatccaaagaatagaagaaagataaaggaccgattaattcgtcgtttgccgatgacagaaaatatgagccaacgttttacttgaacctgaaggaaaaacggcaagttgtatcccatttgcttcataacgagaaactttccgagcgagatctgttgaagatccttggattgaaaaaggatgatggttttgcagtggataagaatgtcgccaagggaatcaaagggagtgatacctatgtacagttgcgcaatgctcttggcgattatcctaaagcacttgaacttcttagattcgaagtccatattgagacggataatgttgtagatcctgaaaccggggaggtgacggaggtgctacatatttccgattcgtatttaagagagcctctctatcagttgtggcatacagtttactccataaatgataaagatgaactggcacatgcgctccggcataagtttggcatcacggacggtgatgttttaagtcgaatgttcaacatcgatttcagcgggaaaggatatggcaataaatcatcaaaatttatgtgcaggattcttccatatctgatggatgggtatcattacagtgaagcatgcgaatatgtcggtgtaaaccatagtgacagcattaccaaggaggagaatgaggctcgagaactggcttcgagtctgcaattgctgaaaaggggagaattgcgtcaaccggttgttgagaagattctcaatcagatggttcatcaggtaaacgcaattctggaggcgtatggtccaattgatgagattcatatagaaatggcacgaactttaaaacaaagtaaggagaagcgtgccgctgataatttacgaatcaatgcaagagaaaaagagaatagtataatagcaagccggattcaggacgaatacaagttgcgtccttctcgtaacagaatccagaaataccggatgtggcttgaatccgagcattgttgcatgtattgtggcaagcctatcggtgttaatgagttccttgccggaactgaggttgagaaggagcatgtaatacccaggtcgctgttctttgacgacagtttctcaaataaggtatgcgcctgtcgtgagtgtaaccgtcaaaagggacaaatgacgggctacgactttatggcatgcaaaggtcagtctgcattggatacctatatagacagagtggagcgtctgtatgatgcatacaagaaaacgaaaggggtatctggaatatccaagaccaagcatgaccgcttgttgactccgtatgaggatataccgacagagttcctgaatcgcgatttggtgcagactcagtatattgcccgcaaggctatagggatgcttaagacagtatgtcgtaatgtatattcctccacgggatctgtgactgatttcttccgtcatgcatggggttatgacgagatattgcatgaccttaatcttccggcatataaagagggtggtcaaacggaaattgtcgaggtgcgacataaaggtcagacccatcaagaagaaaggataactggttggaccaagcgctgggaccaccgtcatcatgctattgacgctctggtcatcgcattggtatcgcaggcgcatattcagcgtctgaataatctcaatacacttaaggatactgagggaagtggcgcttatgagcgacaggcacgcaatcttgacagatgggctgaaagtcagccacatttcagttatgcggacacaagtactgtggtctccggcatcgcggtatcgtttaagtctgggaaaaaggctacgactcccggtaaacgagtcgtttataagaaaggaaaacgcgtagtggcgcaagaaggactgttaattccaagaggtgccttgacagaagggtatgtttatggaattgtgagggtcttgaatccaaagcgaaaactaaaggaaatattctcgaatccatcgctgatagttgataagatgattcgagaatcagttaacgaacgacttgtcagattcgaccaagatgtgaagcgcgctgttgcatcatgcaagaaggaacccctaggaaaagataaggatggcaatccagtttctgagttcgattgttgggaattgagggtggttaagagatatggaattgagactgtgcagtgcaagaatattgcgaaagttgtcgatccgcatatcaggaatcttatatctgacaggtacgagactctgcgattgacattagggaatcctgcagacggcaaacttgtcaaggcttatcaggaaagtttaacgactgatccattgtacagcgatgaggctaaacatcacaagattgtcacagtgaggatgtttgctgatataaatcaggataatatgatggttgttcagagaaatgctgatggtaagggcatcggcttctccaaacttgggagtaaccatcatattgcgttgtatcgtacgccagatggtgacattgaggagtgtgttgttccatttgcccatgcggttatgcgcaagaatctcggaattcctgtcatcattcaggatccggatactgcatggactctgattgacaatttaaaggaggatgtagatgaatcgttgctgatgaatattccattgcccggatggaaatttctgttttcgatgcagcagaatgagatgttccttatcggattgtcggaggatgaggttaaggatatgaataagatgcagttgtcgaatcatttgtatcgcgcacaggctttatcttctaagtactatattttcaaaagacatacatgctccttgtcggataaaggaccggaaatgcttgccaacaagcaatgtatcaatataagaagttttggaattattcaggagcgggaaatatggaaagtccgtattgatcgcctcgggaattcaatcatattgcctacatatgattaagcagacattatactttggcaatccggccaagttgagtgtagagaattgtcagctccggattgccgtaggctccactcggcagggagaagtaagggttgttactcgacctctggaggatataggggtagtcataattgactgtccacagattcttcttacggctccagtaatgcagggattgatgcaacatggggcggcaatggttgtatgtgatgacaggcatatgccaacgggacttttgttgaacatggagggaagtgctgtgcaaagcgaacgtttccggatacatctttcggcatctcagcctttgaaaaagcagctttggcagcaaacggttgtggcaaagatcaagaatcaagccgctgcaatggcaatcattgccaatgagaatccactcgctttgatacgaatggcaaataaggtaaagagtggagattctggcaatgtagaggctcaagcagcatcatattactggaaggttttatttgataggttcggaggtataaagaggtcgagagatggagaggacccgaatacgatgcttaactatggatatgccattgttcgtgcaatgatggctcgaagcctcgtggctgccggaatgcatccttcattgggaatttttcatcgaaacaaatacaacgcttattgtctggcagacgatataatggagccttatcgtccatatgtagacatacttgtgatggaaatctgtgagcgatatggtgttcagggaatcgataatcgagagataaaggcggcgatattgggaatcgtaagcaaggaaactgttcttaatggtcttcggtatccgctgatgactgccatatcagagactgctgtatcgttgtttaagtgtttcaatggtgaatctcgaaagataaagtatccggaaattccaataccatgatagtgacgaaaataaaaggacgtaagcataaagaagtcgcacatgacataaatgaatacaaggtaatgtggttattggtgttctttgatatgccaacagaaacaggtgaacagcggagggcatatactgactttaggaaacgtttgttgaatgatggctttaccatgttccagttctctatttatgtcagacattgcgcatcctgggaaaatgcggaggtccaccgtaaacgggtccgtggattcatcaaagaatatggagaagtaggaatcttgacaataacggataaacaatttgattcgatggaacttttccatggagtgaagaagcagaagacagaaccccgagccatacaactggaattgttctaaaaaataaaaagctgataggaaatatcagcttttttaaattctggcattctgtttaaatgtctgaatgccaatgtgaaatcagacctgaggtgtgattcacagtgcaaagataagaattttcagacaaatcacaacaagtatcttgaaattgccgttggcggtcacggtgtgattcacagtgcaaagataagaattttcagacaaatcacaacgaaaacgagacggcggaaaaaggcaaggttggtgtgattcacagtgcaaagataagaattttcagacaaatcacaacatagatgttttggagattgatatattctttggtgtgattcacagtgcaaagataagaattttcagacaaatcacaactatgtatattatttgcggtatgcaaataatggtgtgattcacagtgcaaagataagaattttcagacaaatcacaacaacgggatgtaaaaaactctaacgagtccgggtgtgattcacagtgcaaagataagaattttcagacaaatcacaactgattgcagccacggcaatagcctttttgtggtgtgattcacagtgcaaagataagaattttcagacaaatcacaaccttaaccgatggcgcaaaggactagctccaaggtgtgattcacagtgcaaagataagaattttcagacaaatcacaactattaccgcgttcaacttttgcccctcaagggtgtgattcacagtgcaaagataagaattttcagacaaatcacaacttgccgtttagagcaccgttagacgtaattggtgtgattcacagtgcaaagataagaattttcagacaaatcacaaccttgattatacgtttgagcgcattgatgaggtgtgattcacagtgcaaagataagaattttcagacaaatcacaacacttccctcgatgatgttccgtcgcatttggggtgtgattcacagtgcaaagataagaattttcagacaaatcacaactgaggccgagtgtggccgtgatgagtggaaggtgtgattcacagtgcaaagataagaattttcagacaaatcacaaccaacgtggccattcttattatccgaaataaggtgtgattcacagtgcaaagataagaattttcagacaaatcacaacgttgctttaggttaaacacatcgaccatatggtgtgattcacagtgcaaagataagaattttcagacaaatcacaactggagccgttgaagtccacctgccatgcgtggtgtgattcgcggtgcaaagataagaattttcagacaaatcacaaccggccaaatggtctcctctgtatcataccgggtgtgattcgcggtgcaaggataagaattttcagacaaatcacaactcattgccggagagaactatatcttcccaagatgttattcacgaccaaacataaggattcaaatggttggatacatggattgtgaagcaaacatggcgaagccatgtcctatagttaagcatgtttggtacatgcaataggagaggagattaaatggcgtcaagattcccggattccttgattcagacggagattattgattggccgaaaaatccagataccatggcgagtgttgagacggtggcacctgaatgactgtttcccgatatctgtttttatggctttcatggcttcctgaacactcgttttgcgaagtagtggctgatgtagtcgtgtaggccatcgggggtctggggacagaggcatttggtgaagaaatccagattgatgatgccgtctttgcggatcatgcggttggggatgatgtataatcgttcgggatccgatggtgtgccgccgagtccgagcgctataaacaactcacggccgggttgcgcggatgtcatccggcggtagcgttcgagttgagaacttatgtcaagtttcccttccggtagcgatgagcggtatttacattccatgaagtattcgatcttgcactcgtcaagtttatgaagtatatgcaggtcgggcataagggtgtctagggaatagatgccatcggcgtatttgtcgctggaccagttgaggattgagtaacgtgagtggtcggccatcaacttgacgatgaattcctcgaacatacggcctttcatcgtggagtggtcgacgaattcaacctcgggaatgtctatctgattggctatggcataggccatgcggtaaagcgacttgacatctatgccgtatgtctccgaaaattcccgcatcagtttgcgttccgacggtgtaatcactccatcagtagccgccatcgccgccatccatcagatcggaagagcggtt

SEQ ID NO: 3358 - DNA, 23246 bp, synthetic construct
  misc_feature 1..23246: note = Synthetic
  source 1..23246: mol_type = other DNA
cgaagtccagggtgacggtggcgtccggcccgatcatgcgctcgaccgaggagtgggagatgtcgcgctcgtgccagagcgccacgttctccatcgccggcagcgcgtagctgcgcaccatgcgcgccaggccggtcaggttctcggtcagcaccgggttgcgcttgtgcggcatcgccgaggagcccttctgcccggccgagaagaactcctcggcctcgcgcacctcggtgcgctgcaggtggcgcacctcggtcgccaggttctccacacaggaggcgatcacccccagggtcgcgaagaaggcggcgtggcgatcgcgcgggatcacctgggtggagaccggctccggcgtcaggccgagcttgtcggcgacgtgcgcctcgaccgccgggtcgatgttggcgaaggtgccgacggcaccggagatggcgcaggtggcgatctcggcgcgtgccgcctccaaccgcgcccggccgcgcgcgaaggcggcgtagtggccggccagcttcaggccgaaggtggtcggctcggcatggacgccgtggctgcggccgatgcagaccgtgtgcttgtgctcctcggcccgcgccttcaacgccgccagcaggcggtccaggtcggccagcaggatgtcggccgcctgggcgagttggacggccagcgtggtgtccagcaggtcggaggaggtcatgccctggtggacgaagcgcgcctcctcgcccaccgcctgggccaggtaggtcaggaaggcgatgacgtcgtgcctggtctccgcctcgatggcgtcgaccttcgcggtgtcggcttcgctccagccctcgatcagcggcgtgccccgctgccagaccgtctcggccgccgccttggggatgacgcccaactcggccagggcgtcgcaggcgtgcgcctcgacctcgaaccagatgcggaacttgttggccggagcccagatggcggccatctccggacggctgtagcgcggaatcattcggcggcgggctccggcaggacgaggtgatgggcgaaggcgcgctgccaggcctccggccagaggtggttggtgtcgatgtaaagctgaccctgcgcctggccgccgcgctcgctcgccgcgcgcaggtcgagcagcggcaggccgagccggtcggcggcctggcgcaaggtgccgacgaagcgccggttcgccgccgcgaagcgcaggcgcacgtcttcgggcaagagcgagaggggcgcgttgctggccggtggcgtgaccaggatcggcagcgtcccgcgcaccttgccttcagcggcgacataggccgccagccgcgccgccagctcctgcaggcgcgcctgcagctcggtctcgctcaaggcgtgtgcgcgcgaaaacagcccctgggtcagccgcaagtcgagctcgccgaggcagacggccgggatcgcccctttcggcagccggtcccaggccgccgagagcgccgccttgagaggcgccgtctgtgcctccggcggttcggccagcagggcgctcggcgccgcctccagcaacacttccggcagcagcagcgccttgtggccctgccaggggaccacgaggtggccggcgctgagcacatggctgtcgccgatcaggccgacgatatgcgccacctcgccggcatacagctcaggcttctcctccggctggcgcagcagcgtggacagcagctcgcccagacttgcgaacatggcaacgccggaggtgccttcggtggcggcctctgcggcactgcgggcggccggtcgctccgcctcggcttgggcaagcgcgcggcgggcggcattggaattgttctcgcggtaggcggcaagggccagcagcacggcctcgctgtgccgttgcgctggcgtctgcgccatcggcagccgggcgagatcgcggttacgtccggcggcatagaggctgcgggccagcaggcaagccggatccgcctcggcgccctgacggcctgccgacaaacgcgctggcagcagggtctcgttgacggcagcgaagtcgccttgcccgtacgccagcgccgccagcagcgcgcgaccgccggcgacctgcggatcgaccgacagcgcgcgtcgagccagctccagggcgccggcagggtcgctcgcttcgagccgcagtcgagccagcatgagcagacccaccgcatcgtcggggcgcccatcgagcagcacctcgagacggcgctcggcctccgcggtgcgcccggcggcttgtagcgcctcagccagcccccagctcgccgccgcgttttccggcgcaagttcgacggcccggctgagggcggcgatggcggactcgcgctggttcattcggaacagcgccacgccgtagaggcgctgcgcctccgcatgctccggccgaatctgcagcaggttggcggcgcgctccgcggcgctgtgcacataaccgcgggtcagcagaccgagaatctcggcaatgtcggtatcgacgggcggcgcctcggcgcgaccgttgtcgggggtgtccgtggccatgaaggaatcgataggtgggtccagggcttcgggccgcaccatgcccaagccgcccgacccacgcaagccgtggcacatgcgcggccgtcggcgtggtttcaggccatgcggtcgtttcgaaaaacgtcaaaatttcccttgcgccggaagaactttatttctataattctagaaacatggaggacaccatgatccgcatttccatcctgatccgcgaactcgtcgccgcctatcgcgaagcgcgcgccatccgttcggccgcgcgcgagctctcggcgctcggcccggagattcttgccgacatcggcattcccgagcactgccgccacaggatcgccgccgagttggcgctgggccgggagcgcccggccgccacgccggcgccaggccgagtaatcgcctttccggcccctgcctgccggactgccgacgcaccaccgtcgtgctgcgccgcctgaggcgccccatcgagaaagctgcaaggaggtatccagccatgaagcgcatccacatcgggctctcggtcgccgacgtgcccgcatccgtggccttctacacgcgtctgttcggcgccgagccgacgctggtcaaggacgactatgccaagtggcagctcgaagacccgcgggtcaacttctcggtctccaagcgctgcgagcagcctggcgactatcacctgggcatccaggtcgagaccgcggcggagttggccgatatctccgaccgactgcgccaagcgggcgaaacgctgatggcggagggtccggccacctgctgctaccaccgctccgacaaggcgtgggtgagcgatccgcagaacgtgcgctgggagacattcctgacgcacggcgaggcgacggtctacggcgaggacagcttcacgccacaggtcgcggaagcgggccggggccgcaacgcggggtgctgcgactgagccatgccgagagcgggatggtgaccgtcccagagctggtctagcctttcggcgcacaacgcgaccggagcgccgaatgatcacccccgcgtacgtgcgcatcttcgcgcgctacaacgcctggcagaacgaaaacctgatcgcggcggcggacatgctcgacgcggtggcacggacggccgagcgcggtgccttcttcggctcgatcgaggccacattcaaccacctgctctgggccgaccgcatctggatgcaccggctcgccggcctgcccaggccaaacgcgcgctcgatcgccgagtcggtgcaggaagtgccggattggccagccttcgtcgccgccaggcgcagcatggacgcggaaatcgaggcgtgggccgagacgctgacggaggcagacgttgggggtgatctgatctggttctcgggctcggccggccgcgagctttcgaggtccactggcctcgtcgtggcgcacctcttcaatcaccagacccaccaccgcggccagctccacgcgatgctgaccgcggccggcgcgacgccgggcgataccgaccttgcgctgatgccttaggctggctcggcggccgcccagcctcagctgtcctgggcggtgctggcgttcggttcggactgcagcagcaggaagcgctccagacccatcttctcgatcaggccgagctgggtctccagccagtcgacgtgctcttcctcgttctccaggatcttctcgaagagctcgcgggtcacatagtcgcgtacctcctcgcagtgctggatggcgtcgcgcaagtcgggaatcgcggcctgctcgagcgccaggtcgcattcgaggatctctttcgtgtcctcgccgatccgcagcttgttcaggtcttgcaggttgggcaggccttcgaggaagaggatgcgctggatcagctcgtccgcgtgctccatctcctcgatggattccttgtattccttcgtggcgagctcggagatgccccagtcctgcagcatgcgcgagtgcaggaagtactggttgatggcggtcagttcgttgaccaggatcttgttgaggtgctcgatgacctttgtatcgcccttcacgtcgatctccccattggcgtcgccaagccggcggttcggctggaacctcgccccggtctaaatggccattctttttgctgaaatgagataaatcagtcgcgcttggtctgcactcgcagcatgcgcctactccgccgcgatcagcagcggctccatcgcccgaaccggctcggagcgctcccggccgaccagctcgcgcatcgtgtcgacacaacgcccgcacttcgggcgtacgccgtgatgcaggtagaccttggcgcaactcgacgcgccggcatcgaccgcctcgcgcaccttgcggcagttgatgttgtggcagacgcagacgatcacggcggatgcgggccctttacgattgcgaacgacttgcactcgcagatttgggcatctgagaacgaatgtcaattgcaattcggcttgacgccgaccgcgtccgaaggccgcgttgatgccctacatggggagttcctcttcgcccaggctcatcagcgaggcattgccgccggcggccgtggtgtcgatcgagaccacccgctcgacggcgaagcgcttcaggtagttggggccaccggccttgggccccgtccccgacagcccttcgccgccgaagggctgcacgccgacaatggcgccgatcatgttacgattgacgtaggcgttgccgaccttggcccgccgcaggatgaagtcggcggtggagtcgatgcggctgtggatccccagcgtcaggccgtagcggctctcgttgatcgcctcgaccaccttgtcgagtcggctcgcccggtagcggacgacatggacgatcggcccgaaattctcgcgctgcagacggccgagagactcgatctcgaagcaggccggggccacgaagcagccgtgtgcggtctgtggccccaggggtgagcgggcgaccaggcggcccgcggtggtcatcgccttgtcgtggccggccagcatgtcgcgcgcctcctcgtcgatcaccgggccaacgtcggtcgcgagatgggccggatcgccgacccgcagctcggccatggcgcccgagagcatcttcagggtgcgctcggcgatctcctcctgcaggtagaggacgcgcagcgcggagcagcgctggccggcggattggaagccggaaatcacgacgtccttgaccacctgctcgggcagcgcggtggaatcgacgatcatcgcattctgcccgccagtctcggcgatcagcggcaccatcggcccctcgcgcgccgcgagcgcccggttgatcgcctggcccgtctcgaccgacccggtgaaggcgaccccgccgacacgcccgtccttgaccagccgcccgccgatctcggccccgtcgccgggcagcaggtgcaacacgtcgccgggtacgccggcccgatgcatcagcttgaccgccgccgccgccatcaggccggtctgctcggccggcttggccaggaccgcgttgcccgccatcagcgccgcggcgatctgcccggtgaagatcgccagcgggaagttccagggactgatgcacaggaagacgccgcgtccggcgtagcgcagctcgttgcgctcgccggtcggccccggcatgcgctggggcatggcgaagacctcggcgccgcgcagggcgtagtagcggcagaagtcgaccgcttcgcgcacctcggccaaggcgtcgccgacggtcttgccggcttcgcgcacggcgatcgccatcagctccgcgcggttctcctcgtagaggtcggcgatccggctgagcaccttggcgcgggcttcggccggcgtacgatcccagggctcggcggcgcgtgcggcgcgcgccagcgcctgctcggcgatctccggcgtcgcccagaccgcctcgccgacctggcggcggcggtcggccgggtcgagcacgggacgcggccggccggactgctcgacgccgccgaccagcggcgtgcagcgccagggcgtcgccgcgtggcgggccatcgcctggccgagctcggcgacgacgagcgggtcggccaggtcaaggcccgcggagttccggcgcggctgcggggcctcgccgcggaagaggtcgcgcggcagcgggatctgcgggtgcgggatccgctccaggctctccaccctggcgacggggtcggcgacgatctcctcgatcggcaggtgctcgtcctggatgcggttgacgaaggagctgttggcgccgttctccaacaggcgccgcaccaggtaggccagcaggtcctcgtggctgccgaccggggcgtagatacggcacggcacccccagcttgtccggcccgacgatctgctcgtacagcgtctcgcccatgccgtggaggcgctggaactcgaagctgtcgccgggcggccggttaccggccatctccaggatcgccgccagcgtgtgggcgttgtgggtggcgaactgcggatagaaggcctgctcgtcggccagcagcttggctgcacaggccaggtaggagacgtcggtcgagacctttcgggtgaagaccgggtagccttccaacccgcgttcctgcgccagcttgatctcggtgtcccagtaggcgcccttgaccagccggacgttgaggcgccgcccggcccggcgcgacagctcggccagccagtcgaccagggccgcaccgcgcttctggtaggcctggatggcgaggccgaagccggtccagtccttgaggtcggggtcgcaggcgacctcggcgatcacgtcgagcgaaaggtccaggcggtccgcctcctcggcatcgatgcaaaagcccatgttctgctcggcggccatcaccgccagctctttgaggcgggggcgcagctccgccatcacccggtcgcgctgggcgaactcgtagcgcgggtgcagcgccgaaagcttgaccgagataccggggccctcgttgaccgccttgtcggcaccggccctgccgatcgcacggatcgccgcggcataggcttcgaagtagcgctcggcatcggccatggtgcgggcggcctcgccgagcatgtcgtaggagtagcggtagccctgaccctccagctcgcgcgcgcggctcaaagcctccttgatggtacggcccatgacgaactggcgcccgaggatgcgcatcgcctcgcgcaccgccgcgcggatcaccggctcgccggagcgatggatcatgcggcgcaggaagctgcccaggtcgacccgttcgccgtcgtcgaggcggacgacgcgcccggtcagcatcagcgcccaggtcgaggcgttgacgaagaccgactcgctcttgcccaggtgggtctcccactcggccgtaccgatcttgtcggcgatcagcttgtcgagggtgaaggcgtcgggcacccgcagcatggcctcggcgaggcacatcagcaccacgccttccttgctggacagctcgtattcgtgcaggaaggcgtcgatgccgccctggctgacgcgcgcggcgcgcaccgcctgaacgagctgccgcgcggtctccgccacccggtcgcgggcgggcgcgtccaggcgcgcaatctcggccaggcggcgcaccacgccagcctcgtccgccagggtgtcggcgcgcagcgcctggcgcagcgggctcgcctcggcgagcgccggatcgatcagcatgcaaaatccccgttcctgcgtgacatcggctcggtcgtcaggcgcagactagaccgaacgcgggtcgggatcagccccacgacatccagcctctggtgcgccatagcttcacggcggcccggcgggcgaagcccgcttgcccgccgccggcccgcccgccagcatgtcgggcaccgagaaccggaggagacgagaggatgctgcaggccgaggtcgcagggctgagggtgatcgtcaccgccggcggcgccggcatcggccgcgccatggtggagagcttcgccgcccagggcgcccaggtcttcacctgcgacatcgacggcgcggcgctggaggagctggggcgggcgtgcccgcaggtcggccgcgaaatcgccgacgtggccaaccccgatgcggtcgccgctctgttcgacgcggcccttggccggctcggcgggctcgacgtgctgatcaacaacgccggaatcgccggcccgacggcgccggtcgaggagatcgcgccggaagactggcggcgcacccaggcggtcaatctggacggcctgttccattgcctgcagcagggcgtgccggccctcaaggcggccggcggcggctgcatcgtcaacctctcctcggccgccggcgtgcgcggctatcccctgcgcacggcctatgtcgccagcaagtgggcggtggtggggatcaccaagtcgctggccatggagctggggcgcttcggcatccgcgtgaacgcgctctgccccggtcccgtggagggagagcggatcgaccgggtgatcgccgccaaggccgcggcgcgcggcatccccgaggccgagatgcgggcgatcatgacccaggacacctcgctgaaaagcttcgtgacggcgcaggacatcgccgacatggcgctctacctggccagcccctccggcgcacgcctgtccggccaggcgctcagcatcgacggcaacatcgaggtgctgcggtaggcggtcgctctaaaaggggatccagaggttcagcgccaccatctccgtcccgggattgacgtcgccgaagagctcgccgtggctcatgtgatggaagctggcgccgagccgccaaccgccctcggagcggtagccgacttcgaaaccgctgcgcagcacggcgacgctgccaaggtccttgccgccgccttcgaaatagagggccgggccggtctcgaaccagacgtagaacatctcatagggcagcacgaagtcgtggccgatggcgccatagacgatggcaccgccgtcgctcgtccccgccgcgccgatcaccggccgaaagcggtagaaatgccagtcgggcagatattcgacacggccctcgatggcggtgtcctcgtcgtcgaccaggtcgaaggcgccgatgccggcgcgcacgtactggcgatccttgtcggcctgcggcgtgtcgtagatgacgccgagggcgaccgaagcgacggcgacgccggtgatccagccgaccgccgggtcggccgccgcgcgctgcggcgcggcgaggccggcaagcagggccaccgcggccaagattgaggctaggcgcttcacggaaacgatccccccttcccccgggtttgcccccgtatagccgaagccaagggcagcccgcaatggcgggcggcggagacgaggagggtcggcgggaggcggcgtctctcgccagccaccgtcgatcgagcgctggcgcgggccgcttgccgacgctctgtcgtcgaagtgcaaggggccggcacagtgtccggccccgctcttgtgagtcacaacggctcttgttaaccgctggaccgcaattcctcagatgtccattcatcttgcacgttctcccgggcacacgcaatctggaattgcgcgcaccaccatcgggagaagtgccttgcgctatcggctcggcctcgacctcggggcgaactcgcttggatggacggtcctcttgctcggccgggaaggggcgccgaacggtctcgtcgccgcaggcgtccatctcttcaccgacggccgcgatccccagaccaaggaaacgctggccgccgagcggcgagcccaccgggcaatgcgccggcgccgcgaccgctacctgcgccgtcgcttgcgcctgctcgccgcgctgcgccaagcggggctgatgccgtccgacccggcggcggcgaaagcgctggagcgcgaagacccgctcactctgcgcaaggtcgggctggagcgccgattgacaccgcacgaattggggcgcgcgctgttccacctgaaccagcggcggggcttcaagtcgaaccggcagaccgatcaggacgacaaggacgccggcctgatccaaaggggcgcgagcgccctggaggcggccatgcgggagagcggctgccgcacggtcggggagtacctctacgtgcgccgttcgcggggcgagtgggtgcgcgcccggcccaccggcacgggcaaggagcggacctatcccttctatccgcagcgccggatgctggaggcggagttccgcgccctctgggagacccaggcgaagcaccatccggagctattgagcgatgcgctgcgcgaagagttgtttcggatcgtgttccagcagcgcgcgctgaagcccgtcgacccagggcgatgcagccagtttccggacgagaagcgcgcaccctgggcgcaaccgctggcccagcgcttccgtttgctgcaggagctggccaacctgcgcgtcatcgatgccgagcaatgcgcccggcccttgacgcttcgcgagcgcgaccgcgtgctcgcagagctgaccggccagggcaaggatcgcaagccgaaggccaagatgggcttcgaccggctccgcaaactgctgtctctgccgccgtacccggagagccgcttcagcctggaggacgagcggcgccgcgagctgaagggcgacgaggtcggcaccgccctggcgcggccgacgcatctcggcccggcggtctgggcagggctgaaggaggagcgccgggccgccttggtgacggcgctgctggagaccgaggacgaggaagagttggtcgcctggctgatggccgagcacgccctgagcgaggagcgtgcgcgccacatcgcccgaaagtccccgctgcccgggagccactgccgctactccctgaaggccctggcgcaactggtgacgatcctcgagcgcgaggcgcgtcccgacgagatctccgggcagccgcgaccgatccgctacgacgaggccacgcagcttgccggctggcaccacagcgaccggcgcaccggcgagatccacgaccggatgccgtactacgcagcggtactgccgaccgctgtggtcgacgcgccggcgacggcggaacccgaggcggtgcggcacggttgggtcgccaaccccaccgtgcacatcgcgctcaaccagcttcgcaaggtggtgaacgccctgatcgcgcgctacgggcacccgcacgagatcgtcgtcgagctcgggcgcgagctcaagctcaacaaggagcagcgcaagcggatcaactcggagatccaggagaacacacgcagacgcgagcgatggcgcacgcgtctggcccaggaactggacatggccaaaccgcgcggcggcgacttcctgaagatgcggctgtgggaggagatgccgccggagcggcggatctgcgtactctccgggcagcagatctcgctcggccagctcttctccgacgagatcgaggtcgagcacatcctgccctactcgcgctcgctcgacgacggcttcatgaacaagatgctgtgcttccgggattggaaccgcacgaagggcaaccgcaccccctacgaggccttcggcagcacggcgcagtggccggagatcgcgcagcgcatccgggtcctctcgaaggccaagcaggaccgcttccgcgccgacgccatcgccgagccgggggagttcctggcccgccacctgaacgacacgcgctacctcagccgcctggcgacccactacctgcgcaccgtctgccacccggaccgggtctggtgcgtgcccggccgcctgaccgccatgctgcgcgcccggtgggggctgaacgccgtcctcaccgacgccaacttcaaggaccggaccgaccagcggcaccacgccatcgacgccttcgtcgtcgccatgaccgaccgcggcctgctgaaccggattgcccggctggcgggccaggccgaggaggcggggttggaccgcctgctggaggagctgccgccgccctggcccggcttctcgctttcggacttccgaagccgtatccgcaagatcgttgtcagctaccggccgaatcgcagccacgcagggtcgatgcacaacgacaccgcctacggcctgtgcggcgagcccgacgcgaagggccggcgtcgggtacggcaccgcgtcccgctcgcctctctgaagagccgcagcgaggtcgagggcctgtgcgatccggccttgcgcgcgcgcctgctggcctacctcgacgcgcccgagcgccgtgacgagaagctcgccgccgtcctcgaggccttcggcgccgagacgggcgtccggcgcgtgcgcctctacgacagcatgacggtgatcccgatcctcgatcgcacgggccgcgcctacaagggctacaagggcgacaacaactggtgctgggtgatcttcgagacgccgaggggcacctggagcgggcgcccgatcagcgtcttcgaggcctaccgcgaaatggccggcaagcccccggaggcgccgcccggccccgaggtcatgcggctgttcaaggacgaccccatcgcgatcgacgatccgtccggcgacgccaggcgcctcgtcctgcgcgtggtgaagttcagcggcaacgccttggtgaccgccgagcatcacgagggcggcaagctgcaacaaaggaacgcctcggccgacgaccccttcaagtggttcgagaagtctgccgagtggtaccggcagcacaacatgcgccaggtgcgggtcagcccgatcggtcgcgtccacgacttcggccgccccccgaggcctcgggcgcgtctggaggaccggcggtgacggtcggccgcgtggtcgaagtgcagcaggacgggcgccacctcgcattgcaccgcggctttctggtggtcaaggacggcggcaccgaactggggcgcatcgcgctcgaccagatcgccgccgtggtcggcaacgcgcacggcctgacctggtctagcaacctggccctagccctggccgagcgcggcatccccctggtgctgtgcggcacgaaccacacgccggccgccgtcgtctggccgctggacagccaccatgcgcaggccgggcgtgtccgcgcccaggtcgaggcgggcaagccgctggtcaagcgcctttggcgcgacatcgtccggctcaagctgcgcggccaggcagacgcgctggaactcgccggcgccggcggcggccccgccctgcgcagcctggccggccgcgtgcgctcgggcgacccagataacctggaggcgcaggctgcgcgccgctactggccggccctgttcggcccagccttccgccgcgaccgcgctgccggcggcgtgaacggcatgctcaactacggctacgcgatcctgcggtcgggcgtcgcgcgcgccgtcatggcggccggcctgcacccctcgatcgggctgcaccacagcaaccgctacaatcccatgtgcctggtcgacgacctgctggagcccttccggccgctggcggacctggcggtgcatggcctggcggcgcgcggcgtgcaagaggtcgacggcgaggtcaagcgcaccctcgccgcgctgatggtggccgatgtccggaccgaggccggcgtcagcccgctgatgacggtgcagcagcgcttcggccagtcgctcgcggcctgcctcgaaggcgacgccaggggcctgacgctgcctgggctgatcgatcccggccagcccttgttcgccgccgcgcggcgcgcgcaatgcggcgacgcggacgatcccgagcccgaaacgcggactcccccatgctgagcggttatcgactgatgtggatgctggtgatgttcgaccttccggtgatgacggagggtcagcgcaagtccgcgacgaagttccgacagttcctgctcgaccagggcttcgagatggcccagtactccgtctacatgcgatactgcgccggcaaggagcaggtggaagcacaggtccggagcatccggcgcaacctgccgcggcacggacagatctcgatcctcagcttcacggacaagcagtatgagcagatggtccacttcgacggcgccgccgcgcatcgccggaaaatgccggatcagctcgccctgttctgaccgtcgccgccgaaccttcggcgaacggagccgccaaaagcgccgtcaattcaacgggctatggcggctccgagtttagccactgaggaattgcggtccagcggcaacatgggctcgactggcaaggcgttctttgttagtttagccactgaggaattgcggtccagcggcaacatgatcacgcggccggcgccagggatggtcagtttagccactgaggaattgcggtccagcggcaaccggctacggctatgccgccatccgtaccgcgagtttagccactgaggaattgcggtccagcggcaacgcgaggcgatccgctgccgacgcgtggatgagtttagccactgaggaattgcggtccagcggcaactgatccggctgtcctcgtggaaggccgcccggagtttagccactgaggaattgcggtccagcggcaacggaaggccgcagactacgccgaacggctgaagtttagccactgaggaattgcggtccagcggcaacgtgcaacaggcaatagctctcgaccgggatagtttagccactgaggaattgcggtccagcggcaaccggcgacgctatggatacggtcggcaaggcgagtttagccactgaggaattgcggtccagcggcaactgcacgtccacgttcttgaacgcgccagtcagtttagccactgaggaattgcggtccagcggcaacgacctgcttggccttgccctcgctcacgccagtttagccactgaggaattgcggtccagcggcaacgagatcggcgcgctgccgaccgggcgcggcagtttagccactgaggaattgcggtccagcggcaactacgccggcgagctggtctggaaccgcgtgagtttagccactgaggaattgcggtccagcggcaaccagaccttgcggatgacgccgagggcggcgagtttagccactgaggaattgcggtccagcggcaactagatcgcgaccgggtgcgtgtgcgcaatcagtttagccactgaggaattgcggtccagcggcaacgcaggaggcgaagaacgagtacgtcgacctagtttagccactgaggaattgcggtccagcggcaacaactttgcgacgatcgactcggcgaccaggagtttagccactgaggaattgcggtccagcggcaaccaaggcgacggccgacaacacgggcgcggcagtttagccactgaggaattgcggtccagcggcaacggcaagcacgtcgtctcgaccttcaccgccagtttagccgctgaggaattgcggtccagcggcaacatcggaaccagggtcttcacgctggcgagcagtttagccactgaggaattgcggtccagcggcaacggcgaaggccgggtcagctcttccaggatcagtttagccactgaggaattgcggtccagcggcaaccggccaggcgcgcttcgagaaccgcacgctagtttagccactgaggaattgcggtccagcggcaaccccggtcgtcgggtccttcaccatgcgcacagtttagccactgaggaattgcggtccagcggcaaccagttccttcatggcggtgcggatgtcgcagtttagccactgaggaattgcggtccagcggtcagacgaaacgcgggagccgcgtcggcggctcccgcgttcgcttcctctgccgaaacgccgcgccgctcggcgcggagcggatcagcgcgagtagaactcgatgaccagcttcggctccatctgcaccgggtagggcacgtcggtcagcttggggccgcgcacgaagcgcgcgctcatcttctggtggtcgacctcgacgtagtcggggatgtcgcgctcggccgaggcggtggcctccagcacgatggggatctcgcgcgacttctcgcgcacctcgaccacgtcgccgtcgcgcaggcgatagctcgggatggtcacgcgctggccgttgacggcgatgtggccgtggttgacgaactggcgggcggcgaagacggtcggcacgaacttggcgcggtagaccacggcgtccaggcggcgctccagcagctcgatcaggttctcgccggtgtcgcccttgcggcgggtggcttccccgaagtagcggcggaactgcttctcgccgatgttgccgtagtagcccttcagcttctgcttggcgaagagctggatgccgaagtcggtcggcttcttgcggcgctgaccgtgctggcccgggccgtactcgcggcgattgaccggcgacttcggccggccccagaggttttcgcccaggcggcggttgatcttgtacttggactgcaggcgcttgcccatggtgtcaggctccgttggttcgggtcgtcttgtcccggtagtcccgcgaaagcgccacaacggcgctccgcaggcggggcgcggccttctacgccgaggccggcccgcattcccgggaaggaaaggcgcgtggttatagccattcgcgcgccgctgtcaaatgcgccgcaggagggctaggatcaagtccttccgtgtgtttcctttcccggacggatgccatgcccagccacttgaccgacgcgcagcgtcgcagcttcgccgagcgcggctatgcgatcgcgcaaggcgggatctcgccgcagaccctggccgacctgcgcgggcagctcgacgcctggatcgaggagagccgcggccacgcccggaactacggcgagacggagatcggcaagaagcgcttcgacctggaggaggggcacagcgccgaggcgccgcgcctgcgccgggtgatgaacccctgcgacgtctccgaagtctacgagtcggcgatccgcaacgcgcccttcgtcgacatggtggccgacctgatcggcccgaacgtgaagttccaccactgcaagctcaacatcaagctgccgggcatggcgacgcgggtcgactaccacagcgaccatgctttcgagccgcacaccaacaccgacatggtgaccgtgctgctgctgctcgacgacatgagcgaggcgaacggctgcctgcgcatcgtccccggcagccatcgccggttctacgaccacttccgcgacggcgaattcgtcggcgccatcgacccggcgctggccgaggagctggcgccgcacgcggcgccggtcgagggcaaggccggcgatgtctgcctgatgcattcgatggcgctgcatggctccggccccaatctcgggaccgccccacgccgcctgctgatcgcggaatacctggccgccgacgcctggccgctgacccgcagcaacgtcaagtcgcgcttcaccggcgagatcgtgcgcggcagcccgagcgagacctgccggctggaggccggcgtcttcaagctgccgccctactacgaagaggattccttcttctccgtccagggccagaagacggcggccgcgcagtagcgcccggatgagcggaggcggcggcgcaagcacacacctgaagggcatggccatcgccgcgctgggggtgctggttctctcgccggacaccctgctgctgcgggtcatcgaagccgacgcctacaccatcgccttctggcgcaacctgctggtcggcaccaacgtcctggtgctctacgcggtctccgaggggcgtggctggttcgccaggctgcgccacttcggctgggccggcgcgctggcggcgctgctgttctcgatcaaccagatcggcttcgttttcgccgtcgccaacaccggcgtcgccaacgtgctgctgatcgtcgccaccgcgccgctgttcgccgccctcttttcccgcctgttcctgggcgaggccaccgcactgcgcacctggctggcgatcgccggcgcggcggccggcatggcgctgatcttcgccggggaggccgggctgttcggcgccggcgccggcgccacggtcgggccggacccgctgttcggcaatctctgcgcgctggcggtcgcggtctgcctgggcggcgccttcacggtggtgcgccaccggcgcgaagtcacctccctgccctccatggtcgtcgccggctacctctccgcgctgatcatggtctggttcgccgagccctttgccatggacccggtcagcttcggctggcaggtgacgatgggcctggtggtcgcctgcgccttcgcgctgatcaccacggcgccgcgcttcgcgccctcgccggtggtcagcctgatgctcttgctggaggctgtgctcggcccgctgctggtctgggccgtgctcgccgagttgcccagccgctgggcgctgatcggcggggcgctggtgatggccgccctgttgggccacggtctggccgagctgctggcctggcggcgcgcccggcgccgcacgctcttgcgcccgacgcccggatcggcaaactcgcgaatcggatacgagcccggggagtgacgcgaccatgagccagttcgccgagatcgccgacaacggcgacgaagacggccgcaacccgacgatcgagcagccgatctctccggacggccgcgccgagccgggcaagcgctacgccgtgcccgcccgccacggccgcgcggtgcgcctggacaagggccagcgcatcaagatcgtcaatacccacggcagccaggtctgcgacacctgggggttttccgtcgccgacccctccgagttcctctcgatggagcacatgcgcgcctggatcggtcgcctggtcccacggcccggcgacgaactggcgagcaaccggcgccgtccgatcctggtgctggaggaggacagctcgcccggcgtgcacgacacgctgatcgccgcctgcgacctcttccgctacaggaccctgggcgtcgaaggctatcacgacaactgcgccgacaacctgcgcatggcgaccaaggcgatcggcctgcgcgtgcgcgaggtgccgagcccgctgaacctctggatgaacatcccgatcctggccaacggcggcgtcggcttctaccccaccgtcagcaagccgggcgattacgtgatcctgcgcgccgagatggattgcgtcgtcgccatgtcctcctgcccgcaggacatcatcccgatcaacggccaggcctgcaccccggtcgagatccacttcgaggtgctgtaggcggccgcgcttcaaccgcggccgggcatgcgccatattggcagcttgaggagggcaccgcccatgaccaagctgctcgaccgcgccctggccgaactgcaggaactgccggacgtcctgcaggacgagatcgccgtccgcctgctcgaccggatcgactatgagaagcgcaagctggcattcctggcgcagcgcaagactgaaatcgaatccgacgcgcgccccgatgtagcccacaaggatgtcgaagcttggctaagaacctggggcacagcgaatgagggcgatccaccgatctgaccgaaatgcgacgcaggatcgcttggacagcaagggcgctcgacgatctgtctggagtacgcgcctacattgctcgggagaacccctcagccgcaaaacggacagaccagcgcatcgtgcaatcctgcgcacccctgcagcggtttcccgagttgggccgcgaatccgagctaccggggctgcgcgaccttgtcgtgcccggaacgccttatctcgtcttctacagcttctacagcgtgacgggacagaccgtgcggatcgacgtggtctgggacggacgccgcggtatgcggccatacgactgacgtggacgccgctggcgggtcgttccggcgctgcagcgaagcgggagcgcctgcaccgggcgcggccggtcatgggttccgcgccagggccaggttcaccccgagcgcgaccagcacaccgccgccgaaccgctgtagcgcgatgaagatgcgttccgacgcgcgcagcctgctggcgagcgcatgcgacgtctcgatcagcacgatgtccgtcacgctgaacatcgcgttcacgatcacgccgaggacgacgatctgcgcccagaccggcaagtcggctccgggatcggtgaactgcggcaggaaggcgaggtaaaacagtgccgtcttggggttcagcgcctcgacgaagaggctgtcgcgcagggccttgcgcgccgtcggtgcggccgtcgcgcgcgacggcgaggccaagggcttggcgcccctcaggtacttcaggccgagccagatcaggtaggccgcgccgacgagcttcatcgccgtgaagagctgcggcacgacggcgagcagggccgagacgccgaaggcggcggccccgatgtgcccgagcccggcgaggtggaacccggcgcccgaccaccacccggccctgcgaccgagggcgagcgtctgggcagcggcgtagagcatccccggacccggcacgcaggcgaagacggcggaggccaggaagaagggaatcaggatctccgcggacggcatgggcgcacctccctcgcatgtgcgcccagtgtcgccgacccggcgcgatccgcgagggcggcgaatggtcacccgtgacgtcgctgcaagctcttcggcacccgaggatgcccgccggctctatgcctcctcgtccgcccgctgcttctccgccagcgcctcggtgccgcgcttgagcttggcgccgagcagagccgagagaatgccgtgcagggtgcgcacctcctgctcgctcggccgggcgcgctggaacagggcgtggacgttgcggcgcatgccggggcgcttttccggcggatagtagaagccgagccggtcgagcagctcgtcgagccggtcgaggaaaccgaacagggtggtcttgtcggccggccggccgccgccgtagtcgagctggcggtcgggcgtgcctttgccggcgatccaccactcgtagccgaccagcaggacgcactgcgccaggttcagcgaactgtagccgggattgagcggcgccgtgacgatcgcgtcggccagcgcgatgtcgtcgttctccagcccggtgcgctccggcccgaacagcaggccgcagcccagccccgcgtccatctcggcccgcagcgtggcggcggtcgcacggggcgtcatcacctccttgaccaggccgcgcggccgggcggtggtggcatagacgcgctccaggtcggcgatggcgtcgcgcgtggtctcgaacacgcgggcagcctccagcacccggtcggcgccggaggcggcggccgtcgccttggggttcggccagccctgcttgggcgccaccagccgcaggtcggtcaggccgcagttcagcatcgcacgggcggtcatgccgatgttctcgccgagctgcggcgccaccagaattaccgccggacccggcggcaagtcctggatctcgcgcgaattggtgccagccatcagccgacccccggctcgcgtacgccttcgcgccgcagcttccagacgatggcgtcgagcagcgcgttgcaggaggcgtcgatgacgttggtggacacgcccacggtggtccagcggccgttgcgcccggcgctttcgatcatcacccgggtcaccgcctcggtgccggcctgaggcgtcaggatgcgcaccttgtagtcggtcagccgcatggtctcgagctgcgggtaggtcggcagcagagccttgcgcagcgccttgtcgagcgcatcgaccgggccgttgccgttggccacggtcatcatctgggtgccggccacctccagggtgaccgtcgcctcggactcggtgaccagctcgccgcgggcgttccagcggcggtcgtccatcacgcggaagcgctgcagctcgaagtagtcgggcacctggccaagggcgcggcgcgccagcaactcgaaggaggcctcggcaccgtcgtaggcgaagccctggaactcgcgcgccttcacctcctcgaccagggcggcgatcttcgggtcgtcggcatcgaccgcgaccccgatctcggcgaagcgcgccaggatgttggcgcgcccggcctggtcggagaccacgatgtgccgccggttgccgaccagcgccgggtcgatgtgctcgtaggtccgcgggtccttggcgacggccgagacgtgcagcccgcctttgtgcgcgaaggcgcggctgccgacgtagggcgcgccggcgtcgggcgcgcggttcagccgctcgtcgagcaggcgcgagacgccggtcagcaacgccagggtttcgtgcgagacgccgacctcgtagccggtcttcagcgcgaaggtcgggatcagcgcgcagagattggcgttgccgcagcgctcgccgaggccattcagggtgccctgtacctggcgcgcgccggcgtccaccgcggccagggagttggcgacggcgttgccggtatcgtcgtggcagtggatgcccaggtcggcctcgggcaaagccgccttcaccgccgccacgatctccgcgatctcgcgcggcaaggtgccgccgttggtgtcgcacagcaccagccagcgcgccccgccttcctgcgcggccttgaggcaggccagggcgtagtcgcgattgctcttgaagccgtcgaagaagtgctcggcgtcgaagtgcgcctcctccttgtggcgcgccatgtgcccgaggctgtcggcgatcagccgcaggttttcctcgcgcgggatctccagcgccaggtcgacgtggaagtcccaggccttgccgacgatgcaggcggccggcgtcttggcgtcgaccagggccgcaaggccggggtcgttctccaccgagcg

SEQ ID NO: 3359 - DNA, 24560 bp, synthetic construct
  source 1..24560: mol_type = other DNA
  misc_feature 1..24560: note = Synthetic
cttcgtatggatctttttatcttcgctgatgaaaatatcaacgcgaccctgaaaaacttcattaagaagccgcgagtcgttgatatcgttttcattggtatcgatttgagcggacacgacctgaacttcatccgcaagcggagcgatagttttcaagatggagtaactttgaagcttaatatttagcgtgttgcgcttcttctcgttttggtgtttttgaagttcgtcaacagagatcgggtggacacacttatcatatttcgccttatccaaccatttgaacagggttccgatgtcctgattgatcccggcaggggcttcgcgatgaataacaatattagtgtccagcaaggctctcatattaatttacacctacattaaggggagttgacattacccttttttgaagggcacctgctaccataagtcaaggtgccactcctatggaattagtgcaatatcaaacagggaaaagggtcggttatcggatttaagtatcgctgaaaggtgagcggaaaacgtgtgcgcggtcgccacgcgaagcgagcctttcaacagggtgggtccgtaaattttcggaagggtcagtcccgtaatctagtaatcgggctttgacgaaggggatatttgttccatccgccttcgcgaaggctacggcgtgactggaggtttggaattttccaatggtgaaccactccccgttggccgttatttcaccttcggtaaaaattatcgatcgctaacgcgtgcgggggaaacctttctgtgctcttcggcctcctccaccttccatgcaagaataatgccctgatcgggattggctgccaaccggaagcggtaggcatggacgctgggtgccgtttccagtttttggggtgcgctgccgtcccaatactggagcagctccgtcattttcccgtagctccagtaagaccgctttttcaccccccgcccaggatcatcgctgccgcggccctcatagattaatccggtgtagtcgaaaaagcagtcgtcgtgtttgaatccttccatcatgccccatgcccagaagattttttcaacgccgaggtagcgggccacggtgtagcgtttgagcagctcggcggcttgctcagattcggtttgcaggggttccctgccgtcgccgcgccggtcggtcgggcttcccgaataggtcccggtttcggtgatccagatcggcagatcgcgagggaagccgcagtcctcaagatcccggcgcacgcgatcgagagcatcggccatgttttgccagccgccgactttgccgaaatagtgtaaatcaagaatgtcgatagattgcccgttgagttcgcgcaggatcggcaattgggttcgttcccagtttttgagggatcgttcatctgcggggagttccagtccgccgagcagtacctgtgcagttggatcggcctctttgatggctgaatatgtgatgcgcacaaggtcggcgtagccctcgcgcctgcgcggcggttcgttgtcgacctgccagtatttgaccgggtttgccagcccgggcatatcatcggagccgtcgccgtcataccgctccacggcggcttgaacccaccggctgtaggcttcgctgtctgcggggcgataggtggtgccgtccaaatgtcgcgaaatatcgagcttccgacggttgtcctgcgattgatctgttctgcgatcggctaccttcaccatgctgttgtgggcgacggtgatattcttcatgacctgcattccggagggcacattatggaaatagaggtcgtagcccgcccagtcgtagatgccattcagatcaggctctgacaaaacccacatgaagtacttgcccgcgcgctcccagtctatcccgatttcatttgcactggcatagcccccgccaggcacggttgccggatggatgccgaacggggaattttccggctccaggccgcgctggccgggcaggttgccttcgatgatccagaccgggctgctgccgagcggccatcggaggacgccgtccggtaccgccacggtttcggtctcgaaaacgggggaggtgccggtttccgtctgcggcagagcggcaaccaccgagacgatcccggatgcgacgggaagagtttccgtttcgaaccccggattcttcggcagattggattctgctgcgccgcaacagaacggcacaagcagtgtgaatagatgcgtaaatgtgacatatctttttttcatatgtacctcattcaatgttccaatatgacgtttaaagcgtcgcagacattgtaatcgtaacatcgaaaaactgagtcgcatcttccaagcattggaaaaatctgcgtccagctgtcggaagggtcggcccgtgaatttagtaatcgggctttgacgaaggggatatttgttccaatgcgtggaatatctctttgctctccgtgccctccagcgcagcgggtggtgaaaaacggagaatcccttcacgggtaatccattgctgtgcaccgctgcgcggccgcagcatcagtatgaggggaggattggctacgctgcaaagatgcaattgattccttccgtaaatccacgctcgttcaatatggggcggattaattcgcggacgccacgcttgccaaccatcggcagcacgaagcaggttttgggatcagggatttccgagggctggatgaccggcgtgccgcagttgagttggcgggatttgatgtcgatgtattgcgtaatgcgtattccgtattgctccagaatggcgacccttttgcgggtgactctgcccgcgccccagacgatgacttcggggtggtgagggttgtggtgctccagccattggaaaaggtattcagccttggttttgtagaaggcgtcgatgctgtagcgctcgtcggtgcgcgaaaggcggccgggcggatcgttccaggtgacgagctgctgatcgatcttgccagccttcacgccgttggccatccagcgcagccacagctcgtagtcctccgggaacgggccgtcgcggtaggcgccgaactgctcgaacagctcgcgccggaacatgatcgacgggtgggcgaagggcgattcgataaagcggttgagcgcgatgtcgtccggctcgatcagcgaattgatccagtcgacgtaggccgcatagcccgcctgtttttcgcggtcgccgccaaacccgacgcggcacccggccattccgatgtcgggataagcgtcgagaaacgaagcctgctgctcgatgcgctccgggtggcaaaggtcgtcggcatccatgcgggcaatgtattcgccgctggcggaggccagcccgtcgttcagcgccgggacaatgccgcggtgcgaatggtcgagcagcttgatgtccggcagcgcccgcaggatatccagcgtcccgtcggtcgagccgtcgttgaccacaataatttccatggattggaatgtttgtgcgcgcaggctctccagagtttggagcaccgtgtcctcggcattgtacaccggcatgacgactgaaactttcatgtagggagtaaacccgaatcagggaggattaggcagaataatttggtggcagaatgatttttactgcggtggcgcggagtttttaggtttctagctgaaaagcgtatttataatctgtataagctaacgtggcttcgcagcagagattttaacaagactattgataacaggaccattttcatgctgcggtcaaaaaatagtcctgttatcactggttctgtcaactccctgatgaatagggcgtagaggatcatccgttaaggaacgcaaaatggatagaagtgagaatggaaggaactaatggggtcatcgtgtgcggggagagtagaatgattttgaggaaaaataaggcaaaagggtcagcctatgaatcttagaaaatggttcagtcgagaattttagaatttgggattaagccgagcgattccgggaaaaggaacacccattagatgggtggcattagtgtctattcgcgtccattcgtggtccaaaaaaggattgtgttatgagtgaaaacaacgaacgcaagctgaccactcgggatgaggtgacggacttcctgctttataccgcgccggatggacaggtgaaggttgaatgtgtcctgcacgacgagacggtctggatgccacaaaagctaattgctgcgcttttcggggtcggagtgccggcaatttccaagcatctcgcaaacatctttgagagcggtgagttggaggaaaaagtggttgtttccattttggaaacaaccactccgcacggagccattaaagggaaaacgcaggcacagaaaaccaagttttataatctggatgccattatttccgttggctaccgggttaactcctcccgcgccacccagttccgcatttgggcgacgcaactgcttaaagaatacattaccaagggctttgccatggatgatgagcgcctgaaaaacgggcgctacttcgggcaggactatttccgggagttgcttgagcgcatacggtccatccgtgccagcgagcgccgaatctatcagcagattaccgatatctttgccgagtgcagcatcgactatgatcccaagtcggaattgacccgccaattctacgcgcacgtgcaggataaattccactatgcgatcaccggacgcaccgcgtcggaaatcatctacctgagcgcagacgcggaaaaaccgttatgggcatgatgacctataagaacgcccctgatggacgcatacttaaatcagatgcgatcgtgggaaagaactatttatccgaagacgagatcaaaaagctggagcggacggtatccgccttttttgactatatcgaggggatcatcgagcgtcggaatacgttcaccatggagcgctttgcggatagcgtaaaccggtttctggagttcaatgaatacaaggttctggaggatttcggaacggtttcgcgtaagacagccgaggaaaaggccttcaccgaatatgaaaaatttaatacgacccagcgtatcgaatctgactttgaccgggttatgaaacaggttgagtcgtcgcgcgataaagatcgccacgaatgaacagcaaggaagacgaatctggtatttggccgcccgagcgccatggggtttaaccctatcacgggcgaatgggtggagaggaaatgtgctgagtgcaagaggccgtttgaattgtgctgaaaagtttgctgatgcggactataagctaaccggttcaatgcttacggggaaaagcgaaatgatgttgaggcataatacatccgtgcgggtgatttggtttctgtgtttggcggcggtcgcggtgcaggccgctccgtcggctgaacaggtgcgttctgcgtcgctggagtatgtgctggagagccggcaggcggagggcatcgaaaaaatggcggcctatttgagccagcagctgggcaaaacctcgcggatgggttcgcgcgatttggcgcaactggccgccacggcggaatgcattcgttttttgcagctttcgcaaaaggcggcggtgcctccggaaacagcgacgtggattctggggtcggggagccggctgcactcggtggtcgatgcgtttgcaccgcaggacaaggcggaggcgtgcatgaagctgctgacgcagctgcgcaagcatgatccggcggggtgtgatgaatattttgagctgatgctggcgatttcgctggtgctggaccatcccggaaagacgcgcatgcatggccagcaggggaaaaacctgctgccgtacaagcccgatccagttgcgctgtacgactatttcaaagcgctttattcaagcggccaggccaaaatcgattatgaaaatctgggtgtttcagagctggtgtttgtggtgcatgttccggcgccggtcagcgagctggagtgggcgcgtgcgaacgccgacggctcgctttcgcgctggggcgaaaaatacagtgaaattgcctacgaccatgcgcgcctgcaggggtcgcgcttttcgtgggacaagggcgtctatacgctgcagaatattcagcggcagggcgggatttgcgtcgatcaggcttattacgcggtgctgaccgcccgggcgcacggcattccggccatctatttccgcggttcgggcacaagcgccaaccacgcctggttttcctttatgaaggcgcccggcgactgggtgctcgatgtcggccgttatcaagggcagcaatacaccaccggatatgcggtcaaccctcagacgcgccggcagatgaccgaccacgacgttgaatatacctgcgagcattcgctgcattcgtccgatgcggcgcaggcgagcgcctacatctcggtggccgaggtgctcttgacgcgcgatccggcgaatgccctgcgttgcgcccgccgggccagagcgctgaccaaacgcgcgatgcgtccgtgggagatcgagcggcagctgctgatggcccagggggattatgccgggctggccgggttgttttatgaaatgaaggatgccttccggaaatatccggatattttggtggcctcggggaagcagatagagaagagcctgcgcaaggcgggccggaatgaagaggccgaccaattggtgcgcagcctcgccggggcggtggacgacgaccgcgacgacctctcccgctcctttgaaaaccagcggatcaagcagatcgtggctgcgggggattttaagaaggcgcgcaaggagttggagcagctgctcgacgaccagcaggatcagggcagcaaggttttcggaatgatccgcgactacatcaagctgacgaaacagtcggggcagaccaaggaagcggtccgttttcttgaagggtatgtcgatgatttgattaaaggctataatttccctcccgcctatgagcaagggctcctgaaactgctctccaccgcctacgagaacaatggcgacaccaaggacgccgaaaaacttaagacgcgcatcgagcggctgaattactaggaaaaacgccggtttcgccaccggaaacgggtttttttaattttttcctaccaatgggcaaatcaaccatatattgtgcatttgttttgggagagcactacatattgtgggtaattgcatccgccttttcctgaaaaccacggctgacaacggccaaaccacacttttacaaaagggaaatgatgccatggtaatcaaagtaaaaaagcgcgacgccgctagcgttgaatacgacgaaacaaaaatctacaaagccattgaaaaggctgtccaaagcgcgaccaaatccgagggcgacgtccagccgcacctgaaaacaatcattaacagcatcaccgagcgccttgacaacatcgtcaagggctatgcccaccgcgggcagaacgaagtggacgtggaggacattcaggacctcgtcgagcagcagctgatgggggccggcctctacgacgtggcccgcgcattcatcctctaccgcgaagagcacaaaaaggcccgcaaccagcgcctgcgtcccgatgcctccgccattcaggactacatgctggttagccgctatgcccgctaccttcaggaccttggtcgtcgcgaaaccttccccgaagccgttgtccgggtgcgcgacatgcacctgcgtcgctatccgaaagcctccgaagacatcaactgggcgttcgaacaggtgctggaaaggcgttgcctgccttcgatgcgctccatgcagtttgccggaccggccatcgaaaagaaccatgcccgcatgtacaactgcacgttcggcatctgcgaccgcattgaattcttccgcgatggcctcttcttgctgctctgcggaacgggcgtcggcttcagcgttgagttcgaacacgttgaaaagcttccggcgctggccgcctccgttgatgaaggcacggtgcgccacttcaacgttccggacaccattgagggctgggcggatgccatgcaggagctgatgctcagctatgtggatggctatctcgtcgagtttaactattcgcaaatccgccatcggggcagcttgctggccacttcgggcggccgcgcccccggccatgtgccgctgcgccgcgctttggagcgtgcccgcaacattctcgacattgcgatggggcggaagctcaagccgatcgaagcctacgacatcatgatgcatgcggccgacgccgtgattgccggcggcgttcgacgcagcgcgacaatctgcctcttctcggccgacgacggcgaaatgatgaacgccaaacgcggcaactggtttgaggaaaacccgcagcgcgggcgttccaacaactcggtgaagctgatccgcgacgaaacctctaaagcgcagttcctgcgcatcttcaccaaacagaaggagtggggcgagccgggcttctatttcgccaacgacctctcgcacggctgcaatccgtgctgcgagatcggccttaacccgcatcttgaagtgaaggacaaggaaggcaatgtaacgatcgagtccggttggcagttctgcaacctgaccgaaatcaacggcgcccgcctgcagtcggaagaggatttccgcattgcagtgcgcgccgccacgattatcggaacctgccaggccggatacaccgacttcccgtatttgggaagcactaccgaaaagctttgccgccgcgaggcgctcttgggcgtatcgatcaccggcatgatggactcgccggcgatcacgctggatccggtgatgcagcaaaagatggccaagtatgccattgaggtgaaccgtgaaatttcgctgaaactcggcaccgaacccgccgcccgtttgacctgtgtcaagccggctggatcgacttcgctgctgctcggtacggcttcgggcatccacccgcgccacgcgcgccgctatttccgccgcgtacaggccaacaaaaccgatccggtttatgtgcacttcaatgaacagaatccgcacatgtgcgaagagtcggtctggagcgcgaacaagaccgacgatgtcatcaccttctgcgttgaagcgccggatgaagcgattctgcgcagcgagatgtcggcgatggatttgctcggacatgtgcactccacgcagcaaaactgggtggtgccgggcacggcgcgtccggaaatgaatccgggcctttaccataatgtttccaacaccctgagcgtgcgcgaaggcgagtgggacgatgtggcggagtatatctgggaaaaccgggccgactttaccggcatcagcatgctggcgtcttccggcgacaaactctatcagcaggcaccgcacgaagaagtggtgacggcgcaggatgaaaccctgtggaatgagctgatcgcaaacttccgctcggtcgatttcacgctgatgaacgagcaggaagacagcaccaacccgcagggcgaaattgcttgcgccggcggggcctgcgaactggtgtagcacttccagtcagttggaatatgaaaaacgcgctcccggaaacgggaagcgcgttttttgtttgcccggcaaagccggcaaacccagtcgcctgaaagaaggcgataacaccccgtccgaggggaagtgaatccgaattgctggtaacggcggggtctgaaggaagcgataggaagtgagaggaacaaggctgagcttaatcactcagccttgcctactcgattctttgtgggtggcgtgattccctgtgattggacaccggcaacgcacgagatcttgagagaggagtagtttgtttgctctattgtgaagatagaaaaaaagacgaatcactcgccttttttaaataaatgcgtaagcattatacgtgttttgattgaatattgctgaagattggtggtaactgaaaaaaagaaaccccgccgaagcggggtaataggtcagagaccttcggcatatagccttattgtgaaatgacagttcttaatgcatttctagagactgtttaggtgttttcaggaaacgagtcaataggaaattggaaggagcataaaatgagcaagcgcattcttgggttggatttgggaacaaacagcattggttgggcggttattgacgaggtgcaggaaaagattgttgatgccggggtgcggatctttcccgaaggcgtggtgagcaagaccattggatctggcgataaggaggaaacgaaaaatgcgacgcgccggaaaaaccgtcaaacacgtcggcaattttatcggaaacgcatgcgcaaggcgaagctgctggaggttttgattgaacagggcatgtgcccgctgtcacttaaggagcttgatttgtggcggcgttgggacaaggagaagaaatcgcaaggccgaaaatttcctgccagtgatgagttcatgaagtggatacgcttgagtccttatgaattgcgtgcgcgggcggttgcgggaactgtatctgcacacgagctagggcgcgtgttctaccatatgatccagcgccggggttttctaagcagtcggaaaggcgaagcaaaggattcagaaaccttgtttgaaaagggaaaacccggtgttttgccgatcaatacgacagtgtccgaaatggcaaaaacaggaagtcagtcatttggacagtatttgaatgcggtggttccgaaaaccggcaagccatacgcgaaaagctgtgattccgagggaaatgagattcgagcccgcgggcgctatgctacccggcagatgtatatagaggagtttgagcaaatctggaaggcgcaggctgacaagctgggattggatgggcgcacggttgtttacaggaaggttcggaagcttcagggaggagaggactcggcacgcaatcaaaagaaggcggaaaagctgaggaagaaattcggggcggatcgggtctgctttgagcggaaaggaaagcatacctttttggtttcaactcaagacatgccgttcaaggaattgttggcgggcaaaatctgggaggaagatggccgactaaagttcaagagcaacgaaagcgtattgttttggcaacgtgacctgcgctcgcaaaaaggaacattgggcaattgtacgtttgaagacggactgcccgtgatccagttggatggcacggttcggcgcggcaaagacggcaagcctgtaacctacagcaagaaaccatgcccggtttcccatccggcgttcgagctgtttcgtgcacatcagttcatcaacaatatcaagtatggaaacgggcaacggctgacgagagagcaacgcgcgactgtgttggaactgatgaacagcaaggatcgggactttgatttcaaggaagtggtgaaaaagctggagctgttttcggagcagtttaattacgaaaaggattttaaggttcccgcgaacagcacgatttgcaagctaagcaagcttgataagggcaaggagtggcagagtgtgctggaggaacacttgccggaaatctggcattgtttctacacctatacagattccgatatgctctgtgagaagattgcccggacatacggcgttcggcttgacctaggcaaggtagataaggttcggtttaaggatgactattcccgggtctcattaaaagccatcgggaacattcttcctttcctcaaaaaaggactattttacagcacgtcggtcattttgggtggcgtgaaaaatgcctttggacggcgttgggatgactacctaacggatgaaacaaaggaaaaaattcaggctgacgtattggaggtcttaaaggaaaagaatggagaaggggatgttattgagaagatcaaggcatacctttccgatccggcaaaccgttatgctttttctgagaatgcccccgcttttggaaagctctaccaccatagtcaggatgttgagaggcgaaattcaaatgcggccaaactgtctcctgttaaagatgttcggaatcctatcgtgcagcaggcgttgcatgaaatgcggatggtggtgaatgcgctgatggccaagtatcgggaagacgatccaaacttcagattcgaattcatccacgttgaaatggggcgcgacctgaagaacggcaagaaacggcggagggaactgagcagggttattgacgaaaacaaaaagaagaacgatgaagctcgcgaatggttggcggagtatggtttgcggccttcccgcgaaaaccttcaaaaaatgcttttatttatggagcttgaaaagcgggcaggacgtgcgcaaagcccatacacagggaaaacgatcccgctatccaatttgttgggtgcgaataataccatacaaattgaacatatcatgccctacagcaagtcgttgaatgattcattcggcaataaaacgctctgcgagtcagaaatcaacggaatgaaaggtgacgagactccttatgagttctacctacgcaactccgatcctggtttgtggggcgcatccagttgggatgatgtggcaaggcgtgcatttgcattgcttccatatgagaaggcaaggcgtttcgcttcgaaggaacctgtcgatgctgagaagtttgtggtacgtcaactgaacgacacccgttacatcgcaaagaaagcggtggaggtgctgtcggaaatttgcagagatgtccatgtaatgcccgggcagctcacttccgagttgcgccacctttggggcctcaacaatgttctggaaagttctatcggcgcagatcggttgcttggtgatctggcagcatccgatgtgggggactattaccttgtgcttgatcaggacgggcaggcgatctcgttgtcgaagcggaagaacaatcagccggataccgatgcgaatgaaatcttgggggccggaggtgtggaaaaaagaaaattcgatgccaagcatctcgtattaaaactcgatgcacctgaagaagcggatggtaagtattgggcgcgattggttttaaaacccaatctaaagctgacgccaaagtatctagaacggccggatgagggagaggactacatcgttttcaagggcatgattcgaaaaggtaagttcaatcatgacagtatcccggtagttctggatgcggaacaagatgacggctcctgctgggtcaaactttttctgaaaagcaagcgtcccgtggatgctaaatcaaatccaaggacgacgaagaaggagataaagctgtttgggcaggtaaaggacggcgtgtttgaatgctatatctacaaatgcaagaccgatgcacccgacggaaagtattggttgattctggaacccgatttcgatgctccccagtttgtcagggcagtgaatccgcctccagagcatgccgatagtgaaatcataatgcagggaacagtggatgaatccggcatatttgtttcggatatcgaccgtgattttgttgcaaaaacagacaaggtgccaggtaagtattacgctgtcgccgaactcttcagccatacgccccgcttccatcttatggaaaacccggtgcctgacattgccaaggggcagagggtggttgagggaacggtgtggatcgacaaatattcagcagaaataaagtttgatcccaagaagaaccgcgaagaccaacggcaccacgccgttgatgccataactatcgcgctcacaaagcgtagctatttgaatgcattgagccgctttcgctcaaaggagcaccctgaagaatacaaacctgtcttcagtgcaccgtgggagggttttgaaaacgacgtgaagtccgccgtcgaaaaaattctcgtttcttatcgcaaggatgagcgggtggtcagcaaaggaaaaaaaggcacggctgtgcgcggtcagttgcataaggacaacgtatttggtgaatatgttaatcttactgatggatcgaaatcatatcatcgacgcaaagcgctgactgctttggaaacgcataaacaggcagaaaagattgtagatgagacgattaaaaaattggttttagaccatttgcgggataactgcgggattgatatcaaatcgaaaaagggggtgaaaatacctgctgatgcatttttcaaagatggcaagccacgattgtttttacctccgaatccgaagaaaaacggcagcccagttccgattaagaaagtccgtctggaagaaaccattaacaatgcccgtcagtggaaaaaaggaaaaaaccaatatgtgaatccccgaaataatcatcatgtgttggtttacaaggattcagaaggtgagttgaaggaacaaattgtctccttctgggatgcggtacagcgcactatgaaaaaacaggatgtttatgaattgcccgacgatgcggatgagcaggtgcttgtcttggagaagaacgatatggttgttctgggagctggtgacatcgagtttggagaaataagttgcgatccggcgttgttgagtcagaagctgtatagagttcagaaactctattctggagacgatgggtttgagtatgtttttcggtatcacttggcttcgaccctaaacaataaaaacgaagaggtgatgattaaaagcttcaaaaaattcaggggcgttaacccgatcaagataggaatatctgagctgggggagatagctcgatgttaaagcgaacagtctatttcgagtcggcggctcacctttcgttcaagaacggtcagttggtttacacgccgcgtcctgagggcgaagtgcggacggtgccggttgaggatattggatttgtggtattggataaccacagcattacgctgtcgcttcgcttgattgaggagttgaccgctaacaatgctgctgttgttttttgcgacaaactgcatcatccaaccgcgatgagtgttcctttcgatggcaatacaacccatgccgaaacgctggcatcgcagttggaaatgtcggagccgttgaaaaagcaactgtggaagcagacggtcgagataaaaatcaagaatcaggcggccatgctgcaacggacagagtccggcggggtggaggccttgttgcgacatgcagggagtgtcaagagcggcgacacggacaatcgcgagggtgcggctgcccggatctattggcaaaacttgtttggcgacgattttcgccgcgaacgttttggcggtgcgccgaaccatttgctgaactatgcctatgccatcctgcgcgcggcggttgcccggtcgctggtgggttcggggctttatccggccattggaattcatcatcacaataaatacaacgcctatgcgctggcggacgatattatggaaccgtaccgcccctatgcggatgaagtggtttatgaaatttgggcagcagccgaagcgcccatcgaggagctttccagggaacacaaacagcagttgctcaagctgctagccgcggatgttcatctaacgaacaccttgcggccattgatggttggtctgtcgtatacaacggcctcgttggcgcgttgcattggcggcgaacaaaagaaggtggactatcctgtaatgaaggcggtctcggatgtcggaggtgcggcttaacgcgtatcacatcatgtggttgtttgtatttttcgatctgccgacaaacacgaaaaaggagcgccacgatgcttccgtgttccgcaagcggttgttgaatgacggattcaccatgatgcagtattccgtatacacacggcactgcggcagtacagaaagcgccgatgtgcatacgaagagggtaaacaagctggttccctcaaaagggcagatcagtattcttcggattaccgataagcaatatggcaacataatcaatttctgggggaaggcgacaactcctcttccgccaaaaccgagccagctggaatttttctgactggtggttactgtaaagaaaggtagaatgcaaaaaatgaactgggaatgtacttcatggttggtgccatgccgattttctttgagacatgcaactgctagctccttggaaaacagagggttacggcggctatgttgtggattgacagttctttgaaatagaaagcaacgacgacctcgtgcagggtctgatcgacaccgttgtggattgacagttctttgaaatagaaagcaacgtcccgcgccagggccttcgtgcagacggcgttgtggattgacagttctttgaaatagaaagcaacatcgtccatcagctccgccgcccggaggctgttgtggattgacagttctttgaaatagaaagcaacggtgataggcggtgcgtttgctcatagggcgttgtggattgacagttctttgaaatagaaagcaaccatgataagggcttcctctttcgggatgccgttgtggattgacagttctttgaaatagaaagcaacgaaggctgtgatagcctttgctctggccatgttgtggattgacagttctttgaaatagaaagcaacacgcggaaaccgggctgcgcatcgagggcgttgtggattgacagttctttgaaatagaaagcaacggcacaacgcctgctccgacttcatccgcgttgtggattgacagttctttgaaatagaaagcaacctctactccggcatcatcgcgagcggcaacgttgtggattgacagttctttgaaatagaaagcaacattctccaccgccgttcgttggtcgtcgcagttgtggattgacagttctttgaaatagaaagcaacgattccggagcgaagtacgacgagtgggaggttgtggattgacagttctttgaaatagaaagcaacattccacagctgttcgatcagctcctgcacgttgtggattgacagttctttgaaatagaaagcaacgttgacccgtggaagctgtaccatgttgaggttgtggattgacagttctttgaaatagaaagcaacatggtttccggagactcgattaatcaccacgttgtggattgacagttctttgaaatagaaagcaacacgatgttgccgtaccgctccagcccctccgttgtggattgacagttctttgaaatagaaagcaacatctacagcaatcgggaatacggtccgggcgttgtggattgacagttctttgaaatagaaagcaacatcgcgccggcaaactccgcgctcttggtgttgtggattgacagttctttgaaatagaaagcaacgcggagcagttcgatattgaaacgctggcggttgtggattgacagttctttgaaatagaaagcaacctgatgatgacaatcgattacagccgcaccgttgtggattgacagttctttgaaatagaaagcaacgccggtgttataggtggtctccacaatcacgttgtggattgacagttctttgaaatagaaagcaacaagcttcattactgcgtgtgctgcaactatgttgtggattgacagttctttgaaatagaaagcaacgcggagcagttcgatattgaaacgctggcggttgtggattgacagttctttgaaatagaaagcaacgacgaagcggtcggcttcgattcgccagccgttgtggattgacagttctttgaaatagaaagcaacattaatagtggcgcccattccgctaaccttgttgtggattgacagttctttgaaatagaaagcaaccggtcgagcccccgaacaacaagcattggtgttgtggattgacagttctttgaaatagaaagcaaccagcgtattgaatcccatggcatccttcttgttgtggattgacagttctttgaaatagaaagcaactttaccacacggcaccgtcaccggccggcggttgtggattgacagttctttgaaatagaaagcaacttgctgatttttgcattttttgcactccgtgttgtggattgacagttctttgaaatagaaagcaactacgagttggaccacagcttaatgttggacgttgtggattgacagttctttgaaatagaaagcaacgatggttgtttcatacacatcgccaacgttgttgtggattgacagttctttgaaatagaaagcaactcgcctgtacatccgaatcgccaaccccgagttgtggattgacagttctttgaaatagaaagcaacaaagctgggcgacacccggttcaagggcgtgttgtggattgacagttctttgaaatagaaagcaaccgaatgggaaggatttaagatccgggaagtgttgtggattgacagttctttgaaatagaaagcaacgattgggatgatttgacgcctatcggctcgttgtggattgacagttctttgaaatagaaagcaacttccttcatcaagaccgcaagggtctttcagttgtggattgacagttctttgaaatagaaagcaaccaatttgaaaaatgccgcgcctgtagccctgttgtggattgacagttctttgaaatagaaagcaactaaaaagaaagcgttgatgcggtataattcgttgtggattgacagttctttgaaatagaaagcaacacagcaagtcctcttcccacaagcaaaggtgttgtggattgacagttctttgaaatagaaagcaacggggtctggtttttggggggttggctgtctgttgtggattgacagttctttgaaatagaaagcaactgtttccgaaatgacaaacaacgccgccagttgtggattgacagttctttgaaatagaaagcaaccctaaaaccgcactgcacaccgaatttcttagttgtggattgacagttctttgaaataggaagctctctccctccctcgccaaggctccgccggacaagtcgggaagcgcgcgctacacttctgaacgcgtgaagacgggcgcgtcgggtttggagagggcggcatcgcaacgatagccgtcggctgcaaagtccagcaggccatctgaatccttgatgcggttttcaatgatgtagcgcgccatgcggccccgcgctttttttgcgtagaagctgatgattttgagcttcccgtttttttcgtctttgaagaccggcgagacgatcgttttgttgagcgcgcgcttgtcgatggccttgaaatattcctgcgaagccagattgaccagcaggttgcctttggcggcgttcagctctgcggtgatcgtggttttccagaattcgtaaaggttttttgcgccgcgcgtttcgagcggacggcccatttcgaggcggtagggctgaatgaggtcgagcggcttgagcagtccgtagaggccggacaggatctgcagatgctcttgcgcaaaattgaggtcgcgttttttgagcgtgctggcgtcgagtccgtcgtagacgttgccggtgaaggccagcacggccggtttggcgttttccgtggtgaagggcggtttccagtccttgaagcgttggcggttaagttcagccagtttttcgctgatttccataaactccatcagctcggcgacggaaaacttccgggccttggagacgagtttcttggattgctcgatgaactgcggctgcgtgaaatcggccgctttcgccggttccatgtccatgctctttgagggggaaagtaaaacaatcatgacagctccaattattaaccacgaaggctcaaagggcacaaagctccacaaagcaggcctcttggtgttctttgtgccttagtgtttaagttttttccagcatgttgcggatgggctcggaatagagttcgggttcgagcaggaacgagtcgtggcccttttcggagtggacggtgatgtattccgatgcaatcccgttttcctgaagcttctgaaaaaggtattcctgttcatcgggataaaagcagcagtcggaatcgatgctgaacacgagatattcctgatgttcacatcccttgaatacttcggcatagtccttggtgccgaagtcgcgcgccagattatagttggtccagccggcgatgaggtagaggtaggtgttggcatcgaagcggcgcagaaacttccggccttgatgcagaatgtaggattccagcggcgtgcggattctgtaccacgaaaactcgtcgtgctcctgctcgcacttgtcgctcatccgcgcttccatgtcgagaagcgacacgaaggttttgtgcgaaatcatgcgggccagcgcgaggccgcgcagcgggcgcgggccgtcgtagtagtggccgttgcaaaagttcgggtcgttttcaattgcgaggatctgttcgaggttgtgcacccgcgtcagcgtggtggactcgaggccgcaggccaccgggatgatgcggttgacccgttccggatagcgcgaggcaaagttcatcaccagcatgccgcccagcgatgagccgaccgcggcgtggaaccgctcaatgcccagcgcgttgaacagcggaatctgggagtcgacaatgtcgccgaaggtgaaatgcgggaagtcgcctccgtatttcttgccggtttccggattgatggaggaggggccggtgctgccgtagcatccgccgaaatagttcacgcaaatgatgaagaagcggtcggtgtcgatggtttttcccggcccgacaaagccgtcccaccagccggtttggcactcggaattccagcggtcgcccgtgtttggaacttccgggttgaagccggccacatgctgcgaccccgaaagtgcgtggaagatcaggatcgcattgtccttggcttcgttgagtttcccgtaggcttcgtatgcgagtgtgacagggccaaaatcgcgcccgtcgtgcaacacgaggcgggatttttcgtcttctccgtaggtgtagaatttgcttcttgtttccatgataattcctgccgcctggcaggcggcggaagggtggatgaatggaagggtggatgaatgggcttaaagctccggcagagatgcccgttcatccaacaatccagttattccaatcttccagtctttcaatcttccgccagccgagggctggctacactttcgccaaagcttggttaatatcagacaggatatcgtcgatatgttcaagccctacagagaggcggatcagatccggcgtgatgcgtcccgccgcctgctgctcttcggagagctgcgagtgggtggtgctggccgggtgaatggccaggctgcgcgcatcgccgacgttggcgaggtgcgagaacaacccgaggctctcgatgaacttcttgcctgcttccgcgccgcccttgatgccgaagatgaccatgccgccggttccgttcggcaggtatttcttcgccagctcgttggacggatcgccttcgaggcccggctggcggacccactcgactttgtcgtggctctgcagatgcttggccacggccagtccgttttcggaatggcgctccatgcgcagactgagggtttcgatgccctgcaggaccatccaggagttgtcgggggaaatgcatccgccgaggttgcggagcggaatcaggcgcatgcgcaggatgtaggcgaggggggccaggtcgccgaggtcgttggcgaagctgacgttccagtagctcggttccgggtcggagagttgcgggtgcttgccggtggtccagtcaaacttgccggagtccacaacaatgccgccgatggcggtgccgtgtccgccgagccatttggtcagcgagtgcaccacgatgtcggcgccgtgttcaagcggacggcaaagggcgggggtggtgaaggtgctgtcgatgatcagcggcaggccgtgggcatgcgcgatgtcggcgatggcttggatgtcgatcacgtcgagcagcggattgccgacggactcggcatagacggccttggtcttttcggtgatggccgcttcaaagtttttcggatcggtgggatcgacgaacttaacggtgatgcccatcgacgggaggatgtcgttgaactgcgtgtaggtgccgccgtagaggttgttggccgcaacgatttcgtcgcccgattttgccaggttgatgatgctgtagaagatggcggtggtgcctgaagagacggccagggcggcggcgccgccttcgagtgcggccacacgctgctcgagcacatcggtggtcgggttcgtcaggcgggtgtagatgttgccgagctctttgagggtaaagaggttggcggcgtgttccgtgctgttgaaacggtaggccgcggtgcggtacagcggtacggcgtgcgagttggtggtggcttccacggtttcatatccggcgtggaggcattgggtttccagtttgctcatggtatttccttttcgtttaattttacgaaacgggcaaggaatactctgaggaaagacatcgaacattttctctttcgagaacacatcgttgctttgcgctgcaaagcctggccttggcaccttaactgtttccaggttgccgggcgatcatcgggccagttccctcacgccgctctcaatgttttaaatatgagaaatacggtagtgtattgtgctatttagtcaagagggttttttattatttttaatcttttgagtcaagcggtttacgatgattagagatgcttaggcgtatacaagcatcactttttatcgcttttgcttgcttcggagatagcctgtcgcagtatttttaattcagacggcttggcgcgacgccactcgccgggcttgaggttgtcgagccggatggggccaatggagatgcgcatcaggcggaagaccttcttttcgaagtggtccatcaagcggcggatgtggcggtttttgccttcgcccagcgtgatggtgtattctacgcccttgcgggtgtgctggccttcgtcgatgtcgagtacgcgcagggtttcgccctgattgggaatgccgcgcttcatcttctgcagctggtggaagccgatcggcgtgtcgatccacactttgtagactttttccacatggtagcgcggatgcatcagggcgtgggccagatcgccgtcattggttacaataatcaggccttcgctcataaagtcgagccggccgaccgtgtagacgcgctcggggaggtcttcgagcaaatccagcaccgtagtgcgcccttgcggatcgtcggaggtgcagataaccttggggggcttgttcaaaagcagggtgacgggcgggtcgatcatcgcgggctggccgttgcagaccactttttgctgggatggatcaatctttgtgccgagttcggtaacggtttttccgtcaaccttcacccggccggcggtgatcagtttttcgcaaaaccgccgcgagccaaggccgcaatcggccagatgtttttgtagtcgaacctgttcctgcatggtttgcacctaatcactaaaaaagcacccccggccaggcctggagtgctatgcaaatcaatccaatccgcgaattaagcttcgggcttggtcttgggcaggccaaaagcgcgatcgccgtctttccaacgaccatctttcttcaggctttcaacgcgctcaaagcgcttcagaacattgcgtttcgtgcggatcttggccgctcccttcaaactgctgtgcatcgacatggtatatcctccgtcgttattctcaaaaaatgatcgcgaaagttactcactatccctccggttgtcaaagactaaccgtgctctttttgcaaccttcgcaaacggcggggcgccctttgttccattacctggaacgcggttggttataggcccatgcggtggaattctccagtggattaatccggcaagttctgtatgcttcataatttatcagagggaacagaatgaaaaccatgttcaaagtgttggtgtcggtctttgcgcttggcatcgttattctggtggggctgcaccttttcctgcagtatggcctgaccaaggcgatgcgagaagtggtgctgccgcgtattgaagaagagaccggcattgccgccacggtcggcgggctttcgctgaatgccgcggccggcgaaatgcacctcaaagatgtagccgttaaaaatccagagggctttctgctcgaaaacctagcctccatcgaacggatcaatattgaggtcgatgttctctcgctccttaagccggggccgatgttggtgaagaacgtcgaggttgaaaacgcgatcgtaaacgttatccgcaacaaggacggcgaaatcaacctgaacaaactgcaggaagggcttccgcagcccgaacccgtcccgccggtgcagcggccgtctccgcgcccgggaaaacccgcgcctgaaagagtccccgtgccggagaggccggtgccgggaaggcccatgccgccgcctctcgaacccgaaccgctgccggagctgctgatcaatgcgctgcagtgcagcgccacggtgcgttatgtcgactttaagctcaaccagctcgatattgccctcgatttaagcctgatcggcaaaaacatttcgacgctccaggccgccaatgcgccgtggggcgaactggccgtgatcggctcgctcggcgaccggcgcaccagcttcgtcaccgaccttaggctcaagctggcgccggtaaccgatatggagaagccgtcgttcgacctcacgggcaagattcttgagattgatccaggcatcatggacgaaatctacagccggatgggcattcggaccgcgccgttcgggcttgatccgcagtttttctgccgcggaggccggttcgaggggtccgccgtgg

SEQ ID NO: 3360 - DNA, 23414 bp, synthetic construct
  misc_feature 1..23414: note = Synthetic
  source 1..23414: mol_type = other DNA
ctatcgtgtccggggcggcggccgaagtggcgaaggggctgtacctttacgggcacgctatcgggatggcctttcagatcaccgatgatcttttggatattacaggtgaaaaagtgaagttggggaagccggcggggaacgatattcggcagggggtggtgacactgccggtgatccgggcgctgaagatgagtccccatcgggaagagttggcggccatcctgcgggatcggcagatgtcggaagcgatggtggagcgcgcgctatccatcgtgcgggcgtccgacggcgtgacttttgcccgggcacgggcagaggtgcagattcagcgagcgaaggaggcgctgccgacctatattccggcagcgattcgggagacgtttatacaggcggcggattatatcagccggcgggatttttgaggaggagagtgttatgtttgggattggtgtgccagaattaatccttatcctgatcatcgggctggtggtatttggcccgggaaaattaccggaggtaggccgggccatcggcaagagccttaacgaatttaagcgggcgacctctggtgcaggggaggagcgtccagccccgcgggcgggggaagagaaaacgagccacgatgacaaagcgtaagggagcgtctgctcatggccgaagataaggaaaaggatgcgctgccggagggaagcgaagccgagataggtgcggcgcgttctcaggcgtcggaggaaccgccgccgaacgaggcggcggtttcttctccggcaggggaaaatgaggctgacgcagcggctcctttgccgtcggcggagaaaacggatggggtgcgggaggcggcgccggatttagggatgtcggaggaagatgagacggtagaaggcaatatgtctctcgtccgccatttggaggagcttcgtcagcggatcattcgctctttgatcgccatcggaatcggctccagcgtggcctattactacattgaagacatcatgggctacattacgatgcccacgggacgcctctattatctgcagccggcagaagccttctttacttatttgaagattgcgctggcggcggggttccttttggcgctgccggtggtgttttaccagctctggaaattcgtgctgccggccctgacgatccgggagcgcaccgtcgtcggggtcttggtgccctcatcggtgctgctgtttttcgctggactggctttcgctttctttttggcgctgccggcagccatcaaatttttcgtgggattcagcacggagaatttgcagccgatgttcacgctgcaccagtattttgatttcgttttatctttcgtattgcccttcggggcggttttcgagctgcccctgttcatcatcgtctttgccaagttaggcttcatcgggtcggattttttgcgccgtaagcagcggctggtcattttattatctttcgtggtgggggctatcgtgtcgcccacaccggatattttcaatcagtctatgatcgccgtgcccctcattgttctgtatgagatcagttacgtcacggtgcggttcatcatggggaaataagggggaagtcctgttggcgtacaaagatttgcgggaattcatcgccgccttggaagcgcgtggccagctccggcgcgtcaaggccgaggtggaggcggagctggagatcacggagatcactgatcgggtgtccaagatggccggatcggataacgtggcgctcctctttgaaaacgttcgggggtacgatatgcccgttctgatgaacgctttcgggagctacgagcggatggctttggccttgggcgtggagaaattggacgatattgccgaggaaattcgcgctctcatgcgccttccctatatttccttttcccataagatggatcttgtttccctcattcccatggcgcggaaggccatcaatttccccaaatatgtgagccacgccccctgtcaggaagtgatcgaaaaggatcatccgtcgctggatatcctgccgattttgaaatgctggccggaggacggcggacccttcgtgacgctgcctctggtctttacgaaaaatcccgagacagataagcgcaatgtgggcatgtaccggctgcaaaaatacgacgcgaccactacggggatgcactggcacattcataagaatggggcggagaactatcgggcggccaaggcgaagggcatgacccgcttggaggcggcggtggccatcggcacggatccggcggtgacgtacgcggcgacagcgcccctgccccgcgacatcgacgagatggtgttcgccggcttcctgcgccataagtcggtggagctgacgaaatgcgtgaccgttgaccttgaggttccggccaccagcgagatcgtgctggaaggctatgtggacatcgatgagcgccgccgggaaggccccttcggcgatcataccgggtactattctttagcggacgattatccggtgtttcacgtcacctgcgtgacccatcgccgccatcccatctacgccgctacggtggtgggccgtccccccatggaagactgctacctcgccaaggcgacagagcggatctttctccctcttttgcagcagatgatccccgagatcgtagacatcaatcttcccttggcgggggtgttccataactgcgccatggtgtccatcaaaaaatcgtatccccagcaggcgaaaaaggtcatgcaggccatctgggggatggggcagatgatgttcacgaaaatgatcatcgtggtggatgcccacgtcaacgtgcaggacgaaaaggaagtctggtggcgggtattcaataacatcgacgcccggcaggatttggtgctgacggacggaccgttggacgttttagatcattcctcccccatgccgaagtggggaacgaagcttggcatcgacgctacgcggacgtggccggaagagggacatgcccgggagtggccgaatgagatcaccatgaccgatgacatacgcgatcgggtcacccgacgctggaaggaactttttgcatgaggggaaaagttcaggcgcatatagaaaacatcgccctgcatcataccgtgtttgaccttccctttgcttacatgggggcttttttggcggcgaagggccaccccggctgggggacgcttctctggatcacgctggccgttacgggggcgcggagcgcagcgctggccattgataatttcgtcgatctcaaatacgataaggtgcatccccgctttacgaagcgccccatggtgaggggggcagtgacgaagggagaagcgctgcttctcatcgcgatgagcctggccctctgcctttacgcggtggccaagctgccgcccgtttgtttacgcctcttgccattggcggcgctgcccttcgtggtgtatcccttcatgaagcgcctgacgggcctctgccatgccgtcttgggcgtcgccatcgccatggcaccggcggggggctggatggcggcgggggggcaaattgatccccccatgctgctcttgtgctcggcggtgggcatttggatcggcgcttttgatgtgatttacggcgtgcaggacgaagcttttgaccgcacccatgggcttcattccttggccacggaagtgggggcagcacaggcggtggccttggcccggatcgggcacttcctttgtatcctttgcttcgccgccttaggagcgcttctgcacttggcgtttccctactacatcggggtgttccttgcggcggcgactctcctttatcagcacagcatcgtggatattcggcagtttcgctggctgacgcaaaggtatttcatgcgcaacgggattgttgccgtggcgatgttcctctgtacggcggccagcttttatttttgatttttccatcgagatgaaatggagtggcggatatgacggcaagaattttatcggggaaagaatttgcccagcgcattagggaagacgcgaaacggcaggcggaggcgctgatgcggcgtaccggagtccgcccgggcttggcggtcgtcattgtgggccatgatccggcctcggaggtgtatgtgcgcaataagcaccgcgcctgcgaagaattggggctgtattcggcagcggtggagctcccggcggagacaacgaaggaagagctgctggctaaaattgatgccctcaacgccgatgaccgggtgcatggcattttagttcagcttcccttgcccggggccttaactgcggcggaaccggaggttttgaatcgcattgccccggaaaaggacgtggacggctttcacccggtgaatgtggggcggttgtcgataggggagccgtctctggcgccctgcacgccggcggggtgccttcgcatgttggaattggcggacatccccatcgatggggcgcgggcggtgatcttaggccgcagcaatatcgtgggcaagcccatgatggtgctgctcttggcgaaaaatgccacggtcacggtttgccactctcatacgaaagatattgctgccatcgcccgggaagcggatattttggtggcggccataggaaggccgaattttgttactgctgatatggtgaagcccggcgctacagtgatcgacgtggggatcaaccgcgtcgcgccgaaaaagttagtgggcgacgtggattttgaggcggtgaaagaggtggcgggagccatcacgccggtgccggggggcgtggggcttttgaccatcgctatgctcatgcagaacacggtagcagcggcgcagcgtcaaatagagaaataggcgcggcatagatagaaaaaatatgtgaatagggactataggacgaggaggctgaaacatgaaatcggatgtggaaatcgctcaggaagcgacgatacagcccatcggagagatcgcggcagaactaggcttgacggaggatgagatcgagccttacggtcgttacaaagcgaaaattgcgtcagcggcgtgggaaagggtcaaagatcgccccaatgggaaattggtgctggtgacggccatcaatcccacccctgcgggggaaggcaagaccaccaccagcgtcggtttggcggacgctttccggcagcaggggaaaaagacggcggtggcgctgcgggagccgtccttagggccgtgctttggcctcaagggaggcgccgccggcggcggctacgcgcaggtcattcccatggaggacatcaatctgcatttcaccggagattttcatgcggtcaccacggcgcataatctcttggcagcggtggtggacaatcatttgcagcaggggaacgcgctccagattgacccgcggcgggtggtctggaagcgggttttggacctcaacgatcgggcgctgcgccatgtggtcatcgggttgggaggcaaagcccatggcgttcctcgtgagaccggctttgacatcaccgtggcctcggagatgatggccattctctgcctcgccgacgggttagaagatatgaagcggcgcttaggggagatcgtggtggcctataccttcgaagggcgggccgtccgggcgaaggaattaggcgttacgggcgccttggctctcctcttcaaggacgccatcaagccgaatctggtacagacgctggaaggcacgccggcatttatccacggcggccccttcgccaatatcgcccacggctgcaacagtatcatggcgacgaaattcgctttgaagttcgccgattacgtcgtcaccgaagcgggattcggcgcggacttgggagcggaaaagttcttggacatcaaatgccgcttcgccggattccatccggatgccgtggtcatcgtggctacggtgcgggcgctcaaaatgcacggcggcatgccgaaagaggcgctggcgcaggtcgatgaaaaggctctgcaaaggggaatggacaatctcttgaagcacattgagaatatccacgctttcgggcttcccaccgtggtggcggtgaatgtattccccacggatacgccggaggagttggccttcgtggagaaaaagtgtcaagctctcggcgcggcggtagccctctccgaagtttgggcgaaagggggaaaaggcggcctcttgctcgcggaaaaggtcgcggcggcaatggaaaagggcgcggatttccgccttctttatcaggtggaggaaagtatcccggcgaaaattgaaactattgcgcgaaagatttacggagcggaaggggtggactttaccgccgcggcgcgtcggacgatggaagagatcgaggggctggggatggataaactgcctgtctgtatggcgaaaacccaatattctctgtccgatgatccggcgaagttgggacgcccccaagggtttcggatcacggttcgggaactgcgcctctccgccggggcggggttcatcgtagcgctcaccggcgatattttgacgatgccgggactgccgaagcatccggcggcggaaaacatggacatcacagaagacggccggatcaccgggctcttttgaggaggcaagatcatgaaacgcatatcggtagagctggtgccgcgggacgctttgcgggaggaattggcggtgctcaaggagggcggctttgccatcgacctgatcaatatccccgacctcttgcggttccccacgcgcagttgggagggggcggcgctggcacagcaatattttccgacggcgatgccccatattcgggcgatggatgtggatttggaacggccgctctccatgggagagtatctgcgccaaaaccagatcaaagaagttctgatcatcgagggcgatcctccgcaggatatgacccataccgtttatccgacggtgacgacggatgtcattcggaaatttcgggaagaattgccggaaattcgggtgtatgccggaatcgatcagtatcggggcagtatgcagcaggagcagtatcggattcgtcgaaaattgcaggccggggcggcgggtttcttcacccagccgtttttcgatttgcggcttttggcgatgtacgccgatatgttagaggggctggaagtctattggggggtatcccccgtcgagtcggagcgggcgaaaagctattgggagctgaaaaatcatgtggtgttcccgaaaaattttgcggcgaccttggcgtggagcgttggtttcgcccgggaggtgcaggccttcgcccaaagccggggagacagcgtctatctcatgcccatccgaacggatttgacggcgtatttgacgggcgtttttgcgtaacgcgccgggcggcaaaaggaggcgatggcgcgatgtttacgatacagaaaaaagagtgtctgtcgtcggggatttaccgctatgagatcgaggcgccccggctggcacgaaagacgcagccggggcagtttgtcattttgcgcaccgatgaacggggagagcgcatcccgctgacggtagcggatttcgatcaggataaaggaagtatcaccttgatttttcaggtggtaggcgcttcgacggaacttttggcgcgcatggaagaaggggacgccctccttgatttggtggggccattgggacagccctcccacatcgccgccggaataggaaccgtcgtctgcgttggcggcggtatcggcatcgcaccggtgtatcccattgcccggggcatgaaggaggccgggaatcggatcatttccatcttgggggcaaaaagccgggaccttctcattatggaagaagaaatgcgggcggtcagtgacgaggtactcgttacgacaaacgacggttcctatgggatcgagggctttgttaccacggcgctgacgcaactctttgagcggggagaaaagatcgacctcctatacgccatcgggccggtggtcatgatgaaaaatgtggtggaaacggcgctgccatggggcgttaagaccatcgtcagcctgaatcccgtcatggtggacggaaccggcatgtgcggcggctgccgcgtcgaagtggggggcaaaacgaaatttgcctgcgtcgacgggccggagtttgacggcgccgtcgtggattttgcgcagctttccacgaggcaaggcatgtatcgggagatggaagcggcggctcgggcgcatgtctgccggatcgggctggggaggtgacgggtatggcgttgtccttgaagaaacatcccatgccggagcaggatccggcggttcgcgcccagaacttcgacgaggtggcgctgggctacgacgaagaaaccgccgtggccgaggccgggcgttgtctgcactgtaaggttcctttgtgccgtcagggatgtcccgtcggggtcgatattcccgggttcattgaccgaatcaaggcccgcgattacgcgggagccatcgccgtcatcaaggagacgaacgcgcttccggcggtctgcgggcgcgtctgtccccaggagaaccagtgcgaaaaaaactgcgtcttagcgaaacgcggcgaagccgtcgccattggacggctggaacgctttgccgccgattgggacttggcgcgggagaaaacgataccgccgataacgtacgcagacgacgcccagcgggtcgccgtcatcggggccgggccggcgggtctctcggcggcgggcgaattggcgcggcgaggctatcgcgtcaccgtttttgaggcgctgcacacggcggggggcgtactgtcctacggcatccccgaatttcgcctgcccaaggaagggattgtcgaaaaagagattgacgctctaaaagcgcttggggtcgatatcgagctgaacaccgtcgtggggcagctctacacggtggacgagcttttgacggaagaagggttcgacgccgtctttgtcggcaccggagcgggactgccgcacttcatgggcattcccggggaaaatttcaacggcgtttactccgccaatgaatttttgacccgctgcaacctcatgaaagcctatcgtttccccgagtacggcacgccccttcgggtggggcaaaatgtggcggtggtggggggcggcaacgtggccatggatgcggcccgcaccgcgctgcgcttaggagcggctaaggtctctatcgtctaccggcggggggaagaggagcttccggcgcggaaagaggaagtgcaccacgctaaagaagagggcatcgagtttcggctgctccataatcccgtggctgttcttggcgacggagagggatgggtgagggcgcttcaatgtgtccgcatggaattaggggagccggacgattcggggcgccgccgcccggtagctgtacccggatccgaagcggagcttccggcggataccgtcgtcatggccatcggccaaggccccaatcccatcgtcgcctccaccacgccgggcatggagacaaatccccggggcaacatcatcgccgatccccacacctgcgccaccactaaacccggcgtcttcgccggcggcgatatcgtcaccggcgcggccaccgtcatcttagctatgggagccgggaaaaaagccgccgcggcgattgacgactatttgcagagcaagcgaaaaacgcgtccccaatagcgtgggcggcgcagaatcggatcatcttgcgatcgtacagtacatagaaaacgctttctgttgtggggaaatacaacacaacggaaagcgtttttgtttgtgcgccgaaaaggccggaataacagatgtggccgtaacaaacctcttttgcaggagaatttcccggcgcggcgaaataaaattttaatagaaaatttataaacaaaaaaaccattgccgaaaggcaatggcgccatttacgaaggcggattatcgggttaccgccataccccacggcccgctgcccgaagacagagccttatcttagaacacgatggatattgataaacggatacgtttaccgagcctatacacactgatggatattgataagcggatatcatcacgtctaagttcttctctatcataaaggaaaatgatcaaaaaagcaagggggaaatgaaaaatgggagagcgaaaatttcgcattgggttggacattggaatcggctcggtgggatgggcggtcatatcgtatacgaaccgtgaggatgcccggattgaagatttcggttcgcggattttcgtatctggggaattgaataaaggaagagagcgcacaagccaggaacgccgagcctttcgcggcgtgcggcggttggagcggcggcgtaaatggcgcaaggagcgcttaaaggaatattttatcaaactggggcttttgacgcggcgagaaattgaggagatggggaaagcgccctgccaagatattttttcgttaaaggttcgggcgttggaggaaaaggtgcgcccgacggaacttttgcagatccttttgcatagtgcgaatcatcgtggctaccgtgatttttatgaggcagacagcgaggggttttccgatgcggatagtttggaggatgagaaagaaacgcgggtaaataaaaaagcggcgcaggactttgatcgggagtttgcagccagcggctgccgcaccatttcagaatatttatggaaacattgtcgtaatgctgccggccaagtggattttcgcaatcggcagcatcgggccgacctgcggctcattcgccgttgtcatgttgaggatgaaatgaaaaagattttggcgcagcaggggcggttttatcaggagttgtcggcgtcggtgcgggaaatcatttcgtccatcatttttgcacagcggttttttgaagatgggccgggcaataagaatgatccgacacgccgctatacgggttttttggataagttggggatgtgccccttctatccgacggaacgaagaggatttcgcaatacggtattggcggatatttatgcggtcacgaatgctttatcccagtatcggtatcaaggtaaggacgggcgttcgggacttccctccccggcggcgcgggagattgtggagaccacgcttcgggacgggaatatgaatcttacgatggccaaagccatcttgaaaaagcatcaagtatacttgttcaaaagcgcttatcttgacgaaacagcgctgggaaaagccattaaatttttgcgccctatgaaacggattgccgaaaaagcaggcattgcctggacgtccctgttgggagatgatcctttaagcatggaagatccgccgcttctccatcagattggagaagtgttggcaaaatacaaaacgccgcggtaccgagacgacgagcttaagaagctttttgccgggacgaccatagaggggaatcaaggtttccgtgaggaattgtccgctgcttctttcagtggggcttccgcttgctcctatcattacatgcatgatgcgattgaagcttttatggccggggagatatacggtgattttcaagcgcggcggataaaagaagaaaacgaaacttctgctccgcaaagagagcgttatgcacagcttccggcacggctgctggagaaagatgaggatatccgggacaatccggttgtgtatcgcgccatcaacgaggcgcgacgggtggtgaacgccattgtccgtctctatggtgcgccggaatatatcaatgtcgaagtgggtcgtgatttggggcgcagttttgcagatcgggagcggtggaaaaagcagaatgacgacaatcaaaagaaaagggataaggcggtggaagcgattgccgggcatttacactgcgcggcggataaggtcaagccgatacaggttgaacggtattggctctatcaggaacaggacgggaaatgcctctacagcggtgaggccattgatcttaaagacgcgctggatccgaacggcacttatgaaattgaccacatcatcccgtattcgttgattcttgataacacgctgaataataaggttttagtcaagtggggagaaaatcaacggaaaggacaacgtacaccgctgatgtacatggccgactcacaaaaggccgccttcctggaacgggtaaatggtatattcaataaaaaaggcagcccgtggagcaaaagaaaatatgactatctcttgcaagatactttggatacgactgagcctgaagtccgacagctaattgacgcgtggaagtcgcgcaatatcaatgatatgcgctatatcaccaagtatgtgtttaatttatttcagcgctatttacaatttgccgaagatgggaaaggggagaactccattcatgttcatgccattcgtggcgcgatcacggcaaaatttcgcaagacatggctgaatcctaaaacgtggggaggaaagaaagagcggaagagcaatcttcatcatgcggtggatgccgtggtactggcgaatttgacgccggcttatattgaaattgcttccgataatatgcggctgcagcagattttccgccggtatcataagaaggaaagtgcggaatatcttgattacatgaagcgatccgtccagaaaatgaaaacgtattatggtttttcggaggaatacacacgcttcctgctgcgttgtcatgaccgggttccgtcctttgtgcgccggttgagagaggaagtcgatattcgctttaatgatgaagacgcggagcgatttgccatccaaatgaaggaattttacggagatagcgcaaattttctcgtcccgccgcacatgccattgacttctcataaggcggaacgtcgttatcggggcgcgatcgcggatgccaatccgatcaaagtacgagagatcgacggcgtgccgcataagatctcgcgccagtcaatttttgccattcgtaagaaggatttgaatacactttactcttatgatcgcttattgaaagatacgctgcatcagattttggatggggaaaaagaaaattataccatagaaaaatacctgaaagagcaggggcgagccgtgtttaccttaccaaatggcacagtggtccataaagtttcggtgataagggaggccgttagtaatttttacaggaaacagatttcgacagagaattattccatgctgggaggattaaaatattattgtgtggagatataccaggacatcaaagggaaaacccgttgtcgaggcattcgctatattgatcttgtgaagagggataaaaagctgtacctaaaagagaaggagccgccgacacagtacgaaaagcacatcatgtacttgtttgccggagactatgttgaagcttttgataaggacggggtgtgttatttacaggggacatactgctcggtatacgcaatccaagcgcaacgcttttattttaagtgcagaaatgcagaggaaagtatcgatgttaaattaaaaacaaaaggcgtgatcaagaaatacagcgtagatttattggggcataaggggggcgaaatcacatgcagcgtacccttatcgtccataccggcgaacgattgattaagcgggcgaattggctcgtcctgcaacatgaggggacagaaaaacgtgttcccatcgatgaccttttttgcgtggtgattgacaaccctcaaatggtcatgagtaccgccctcatgacggctatcacgggggcaggcgggcatgtccttttttgcgacgaaaggcatctgcccgtggctatcctctgcccgcagtcaggctattaccgaccttaccgtattctggagcttcagcttttgattgacgaggattttcgcgaggcgctttgggctgaggtagtccgggccaagctgctcaatcaggccaaggccctgatgattgctaaatgtcaagataggaagcgcctgtatcgcctaagacaattagcgcagcaggtggaggcaggggataagggaaactgcgaagggatcggggctaaaatgttctttcgtttgatgtatggtgcggattttattcgtatgcacgatgatggcatcaatgcggccttaaattatggctataccattattcgctctacgttggcgaaattattggccgctcacggcttcaataccgtattggggattcatcatatcaatcgtgcaaattattttaatttggttgacgatatgatggagccctggcgcccattggcggacatgtggacggatctgcatcatgaggagttgttagatggaacgctgacaaaggaacagcggacagagctgattggtctactgaaccgtattgtgttatttggcgggagaaggatgaaggtgcgggctgctatggaccggtatgtggccagcttagtggcggccgtcgaaaagaaagatgtgcactgtctgcgattcccggaacttctaccccttgctatggagaaagaagatgaataatcggacgatgcgtatcctcgtattatttgatttacctacggcaacaccggcagagcgtcgggattatatgcagtttcgaaagtttctcattagggatggctatgatatgctgcaatactcggtgtacagccgcattactgccaatcacgacgatgccaactttcatttatctcatatccgttgtcatcttccgcccactggttctatccgcgccctcttggtcacggaaaaacaatatgcctcgatgtatattttattgggaaggaggactgccacggaaaaactcctaaaagataatgacattgttgaattttgatggttttctgctatactgaatttaaggttttagttcactgatggatattgataaacggatactcattttagcatcattagctgcataattccgttttagttcactgatggatattgataaacggatacactgccgtttttggtagagcatgatgttgagttttagttcactgatggatattgataaacggatacagtgatttcaaggaatttatggcggacagtgttttagttcactgatggatattgataaacggatacaatatgacgttaggatcgtggctcgtgacagttttagttcactgatggatattgataaacggatacattagataattcattaggcgtaatatcttgttttagttcactgatggatattgataaacggatacttgtaattttatctaagcattctgaagtacgttttagttcactgatggatattgataaacggatactgagatcatgatgaccgattcatcggctgagttttagttcactgatggatattgataaacggatacgcttcgccgtttcatccggcgcactgcttcgttttagttcactgatggatattgataaacggatacaaaaccttaaacatattcttccctccctatgttttagttcactgatggatattgataaacggatacaaagaagcgcagggggtcttaaaggactacgttttagttcactgatggatattgataaacggatacgaacaagtacaaggagctgatccactatgcgttttagttcactgatggatattgataaacggatactgggaaagtaacaactgaaccacgtcgccagttttagttcactgatggatattgataaacggatacattcatctgcgtaggctaattcttgaaattgttttagttcactgatggatattgataaacggatacattatcacggtatacgctactacatagcctgttttagttcactgatggatattgataaacggatacttaccatatgaccaatcagccatcttctgcgttttagttcactgatggatattgataaacggataccttccgccgtatccccttcgccatgcccaacgttttagttcactgatggatattgataaacggatactgaccatctgcaggtctggcgtcggcgttggttttagttcactgatggatattgataaacggatacataagagcttatcgacgagaacaactctcgttttagttcactgatggatattgataaacggatacgggacagtcgccggactcattcgagccacagttttagttcactgatggatattgataaacggatacagtaatacgttcctcaaagttgccaccggggttttagttcactgatggatattgataaacggatacgttattaaaaacgataacgcgatacacgccgttttagttcactgatggatattgataaacggatactacgtcgttgtagatgtatcccaaaagcgggttttagttcactgatggatattgataaacggatactaatcacaggcccagcaatcacggccttgtgttttaattcactgatggatcatcgaactgatctgtaaaatagaagccgttgcccacatcaccttctgcgctttcgtagctgcgatcaaaaacggcaaaacatccgcccgtagtcccgtggtacaccactagcggctccccgttttcatcgacgcttttggaggcggtattgacagaatcaaagaagtttgttaatttgtgatcgatacaagacgcctttctctcttcgcccggggcactaacccggatacgttgagagaaagcgccttttttattttcctggtagattcggatgtcactgattcctgtcgaatggagaattcgttttgtgcttggcttacccgtcaaaataatctcagccggaacaaggtcgcgaatctcacgcgccgccgcctcctcttcccaatccccaaaccacgccttaaatgccggtgtccgtaccgcgagccactgatcttccgtgaggttcgtcggctgcccgttaggcgctttcatccacatctccgtgccctcatactgacggcgcacggcttctttttgcgattctacggcttgagcaaagcgctgcgccgcttccttctcctgcgtttcctgccccgcgttagtcaaaagctccggcagggcgtccatggccgtgtagcccgcttctcccgcttcacgatggaaggagacaaggcgatccgtcatccgtgccgctacgagtgccgccgcccgggcgctcttttgtacttccttatttccctgctctaagccggacaagagatagctatacacctgtctcgcttccggagagagcgtcgctgctatgataacgtctccagggcgcacgtcccccagtacctttccaatcttgttcagcgtggacatttcttcgtcaagggcggataactgtttttccaccccggcgaagtattcctgcgcttctggcgtgccgtcattcgtcggatagtcagaatatggcgtcggtattggtttttaaggggcatactgtatgaaatttactttttaaacatataggtggatattgctaagggaatgtttcacgtgaaacattagaaaggaaatgggagggataatattttgggaaatgatgggaagaagaaagaaatagaaaagaagaatgttcattttcccagtgttggcgggactgatgacggaaaggggcgttttttcgttgtcgatagttcacgaaacgggaaaagtgtggtagaatagtaacgatttcatggaaatgattttgccgggcggaggggcggtatgcgaatcatcacgggaacggcccggggcgctcgcctgaaagcgcccaagggattggatacgcgtcctacggcggatcgtgtcaaggagtcgttgtttagtattttaggggaacgggtgcgaggagctcgggttcttgatcttttcgcgggaacgggcagcttgggcttggaggcgttgtctcgcggcgcggcgtcggcggtttttgttgatcgggcgacagtttccgtgattcgtgagaatgcggttcatacgcatcttttagcgagcgcgcagtttttgcggcaggatgttttgacggctttgccgcgattagtggcggcgggggagacgtttgatctggttttttgtgacccgccatacgagacaggtttgtggcagcgggtgctgctggcgctggatcgttttccgcttctttcccctgaggcattggtggtggtggagcgtggcgcggcggagaaggaactgccgccgttttccacactcgtttggcagcgaaccgtgcgatatgggcggacgacacagatcctcattttagagtcgcgcgaggcggagcaggaggcatagcgatggtcagggcggtgtgctcaggaagttttgatcccgttacctgcggccacattgatattttcgagcgggccagcaagatgttcgatgagatcatcgtcagcgtctttcataatatccgcaaagagccgtggctgccggtggaagagcgggtgaggctgattcgcgaggcgacgcgccatattaaaaaccttcgggcctgttctttttccgggctgttgacggatttcatgcgggatcagaaggccagcgtgatcgtgcgtggcctgcgctcagtaacggattttgagtacgagatgcaggaggcgcagacgctgaaacatcttgataagaatatagagacgatttttatcctgacaagtcaggagtattatttcgtcagttcttcggggatccgagagttggcgctctttaacgggaatgtacatgggttggttccggcttgcgtcgaggaagccattcgtgccaaagtaggcgcgaatggggatgggggcagccggttttaaggaagtacggataaaatgaagttcgtcagattgaggcagaatctatcggtgcttctttagccgcaggaaaaagcgaaacagaaagtgggctggtgagcgatgacggtaagcaatattttggatgatatcgaaaatctggtggtggacggcaggcatatcgtgttcacgaataagagtatcattgaggagccggagctgatccggctggtggatgatctgcgcaacgagttgccgctggagctgcagcgggcggagcaggttatgcaggagaaggatacgattctgtcggacgctcgggacgaagcgcagcgcatcgtggaacaggccaaggagtacgccaatcgcttggtggacgagagcagcgtggtgaagcagtcccaggagaaggcgacgctgattttaacacaggcgcaggcgcaggagaaagagatcatggagcgcactatgcagacggcgcagcagcggtgcgaccaggcgaatcaatatgccaaccaggtattcgatcacatgttggcccatttgggaaattccatgacgacgttggagcaggggctggataccttacagcaggccaaggccgcgctgaaccaggcgccggtggaaccggcggcgccgcagcaggcgatgacacctgccgaggaaacgctggagagttgagctgcgccttggcggccgattaattttataagacatcgggcagggggcttgatccattgggcgattcagcgccgtcgggattttcgacggcgggggcggcacgggtcagccctctgtatatttgtatgatttaaatctgggaagggaagtggcctccttgaatagagaccgtctccgacggcttttggaacgttgtcaaaagggggatgtatcgctggatgagggcgtggaatctctcatgaagctgacgggggaggagttaggctttgcccacattgaccaccagcgggaagcgcggcagggatttcctgaagtggtctacgcggcgggaaaaacggcggcgcaggtggcggccatcctctcgcgactcacggccgcttcccaggggagcgtcatggcaacacgagtgtcgccagagcaggcggcggtggtgcaggcggctttgccggaggctgtttacgatgaagtatcccgcatcgcttaccttcggcgccctatcgcgccggtggatgaggcgcggcgcatcctcgttttgacggcggggaccagcgatatccctgtggcggctgaagcggcattgacggcggagcttatggggaacgccgtggatacttgctacgatgtgggtgtggcggggatccatcgccttttcgctcatgcggaggaaattcgccgggcgaatgttctcattgtggcggcggggatggaaggcgcgctggccagtgtggtgggcggccttacggcgaaaccggtcatcgccgttcccaccagcgtcgggtatggggccagctttcatggattgtcggctctcttggccatgctcaattcctgcgctgccggcgtagcggtgatgaacattgacaacggctttggcgcgggggtcttggccagtcggatcaatcacatgaggtgagatcatgaaggcaatctatttggactgtttttccggcctcagcggcaatatgctcctgggggcgtttttagcggcgggagttccgctctcatatttggaaggagagctgcaaaaacttctcgggacggaaacgtttcggctgcatgtctcagcggtgaagcgcagcgggatcgcagcgacgtatgtagaagtggaggatatttccgcggcacatgctcatggggaacacggcactcatgatcacgccgggcaggggacgcatcctcatcgcaccatgagagaaatccgaaatcttttggcagcgtcgcctctagtggaagcggtgaaggaaaaggcgctagccgtgttttcctgcctcgccgaagcggaaggggaggttcacggactgccgccggaggaagtgcatttccatgaggtaggggcggtagattcgattgtcgatattgtgggaacggcgctggcccttgagtacctggcgatcgaaaaagtgtttgtttctcgggtcaatacgggaagcggctacgtggactgcgcccatgggcgcatgatggtgccggcccccgcgacggcggcgcttttgcgggggattcctttttaccataacgatgagcagcgcgaactgacgacgcctacgggggcggcggtggtacacgcgctggcggcatacgcaaattacctgccggcgggatttcagccggatcatatcgtctacggcgctgggacttgggaattggtaacgccgaatgtccttcgggtctatgtgggggaatacgaagaacggcaaacggtgaagcgatatattatagaaacgaatattgacgatatgaatccgcaaaattacgagtatgtttttgaccggctgttagcggcgggcgccttggatgtttggctgacccccatcatgatgaagaagagccgcccggcggcagcgctgtcggtattggtggaggaagcctgtcgggaacgctgcacggacatcctctttcgggagaccaccagcatcgggctgcgggtgatgccggtggccgagcgctgcgaggcagagcgccgaacagagaccgtcacgaccccttacggagcagtatcctgtaaaatcagtacctataaaggggaaatcgtgtctttgtcggcggaatatgaagattgccggcgcctggcaaaggaaaacgatgtgccgctgaaagaggtgcggcaggcagcgcttcaggaaatcagacgccgcttgggagaatgaagatatggatacggcggaggagtttttgcttcggctcaaaggatatcgacggctggccgttgctctttccggcggggtggatagcgcgaccttggctaaagcagcggctttggctttaggagatcatgcggtggcagtcaccgcggtgtcgccgttcacgtccgcagaggaacgaagagcggcccgcgaggtcgcgcaaaataccggccttcggcaggtggaaatcgaaacgcgggagatggaggatccccgcgtagcggctaacgatgaggaacgctgctaccattgtaagcgggatcgtttcgaacagcttgccgcttgggcggaagaagagggtttcgcgccggtggccgagggcagcaatcaagacgatcgcagcgattaccgtccgggcctgcgggccgtcgccgagctttttccccgagtggtctccccttttttagaggcgggatgggggaaagcggagattcgtcggcaggcaaagacctggggcctttcggtgtggaataagcccagcgcggcctgcctggcttcccgcgtggcctacggccttcccctgacgggggagcggttggccatggtggaggcggcggagcgggcggtacgcccttttgccgcgggacaattgcgtgtacggcatcacggttcgctggctcggattgaggccgaatcagaggcgctgccgtgtttgattgcgcatcgagaagaaattgcggcggcgcttcgggcggtgggattttcctatgtgacccttgatttagcgggctatcggacggggagtgccaatgaagtcttagcactttcggtgcggcggtagcgattttgccccgcgcattattttgcgtccagacagagcaacgaagcgtgagggagcagaaggcacgatttaggagcggcatacgaaagagaggagaatctatggaagaaaaagcagcagcggtctcaccaaaaatttttccggcgtcgtcccctaagcgtccaccgcgtaccctacggagccatttcggaaaatatctgacgatcgttgtgggcgctgttattgcctccgcagggttagagatatttctcattcccaatcagatcatcgacggcggcgtggtgggcgtttccatcatgatgtcggcggtcaccggcatgccgctgggtgttttcctggtagggctgaatcttccttttctctatattggctaccgacagcttggccggagcttcgtcgtggccacagcggtagcgatcctttgcctgtccctgtggtcggaggtctttgctccggtgccccggattaccgaagatttctttttggcggccattttcggcgggatcattgacggcattggggtggggcttatcatgcgggctggaggctccctcgatgggacagagatcgtggccattattttggaccgccggacggtgttttccgtgggggaagtggtcatgttcatcaatctgttcatcctttcggccgcgggatttctctttggctgggataaagccatgtattctctcgtggcctattttgtcatcgccaagatgatcgacgtggtgctgaaaggactggatgaatcctacgccgtcatgattgtcacgcatcataacgaagaagtggccgaggcccttcttcaccggctggggcgcggcgtgaccattctccatggcgcgggcggctattccggcgaggatcgggagatcctttactcggtggtcacccggctggaactggggaagctcaaagaagtaatcttagaagaagatccggaggctttcgtcaccatccatcagattcacgatatcgtgggcggtcgggtgcgaaaaaaagccattcattagacataggaaagctgtgggccaaggcgctgccatgccgacaaagtttcttgacaaggctgggggcggtcgctataatagattgaggttgatgccggatggggatgttgataaagcttagtggcgccttggcgcccttgggagcacaggcagagtttcactttcagacgacggccgacgcgctggatgcggcgccggaaaatgccgtcctcgcgggagagattgctgtgtctggaacatgcgtcaatacaggccggtcctatcgggtagaaggcgcggttcgtgttcttcgctccttcgtt

SEQ ID NO: 3361 - DNA, 23402 bp, synthetic construct
  misc_feature 1..23402: note = Synthetic
  source 1..23402: mol_type = other DNA
tcccgttgtcgctcccgtgggcgtgggggaaagcggggaaagctacaacatcaacgccgattatgtggcggcgaaggtcgccggggccctgcacgcggaaaagctgctgctccttacggacgtggaagggatatacaaaaattacgcggacaagtcgtcgtttatttcgtcgctcacggaagaggaggcgcggcgatatattgacgacggcgttatctccggcggcatgatcccgaaggtggaagcatgcctcggcgcgctgtcggaggggacgcgcaagacttcgatcatcgatgggcggctcccccactcgctccttttagagctgtttacggagcaggggatcggcacggaaatcgtacgctaggaggaatcgttttatgagagagaaggacgaacaaatctttgccaaggataaggcggcgtatcttccggtgttttcccggtatggtattgtcctcgaccacggcgagggtgcgtatgtctatgacagcagcggcaaaaaatacatcgactttttggcgggcatcgcggttaacgtgctgggacacgcgcaccctgcgctggtgcgagctgtgacggagcaggcgaagaagatgatccattgttcgaacctttactatacgcaggcgcaggctgacgcggcggcgcggctggcgaagctgagcggattgggaaaggtatttttcggcaattcaggagccgaggcgaacgagggcgcgatcaagctggcgagaaagcacgcctggcgaaaagatccggaaaaaatcgagatcatcaccgcctatcacagctttcacgggcggacgctggcgtcgctgaccgccacggggcagccgcattatcatgaaggattcggccccttgccgggtggtttttcttacgtcgattatggcgacggcgacgcgctggaaaagaaaatgagtgaaaaaacctgcgccgttatgctggagacgatccagggagagggcggcgtccatgttccgccgcccggctatctggaaagggcgcgcgagctctgcgataaatacgacgcctgcctgatcctggatgaaattcagtgcggcatggggcgtacggggacgttcttcgcctatgagcaatttggaatcaagccggacatcgtgacgctggcgaaagggctggccggaggcgtgcctataggatccttcatcgccagcgataaagtggcggcggcgtttgttcccggcgatcacggatcgaccttcggcggcaatccgctggcctgcgcggcggcgctggcggtgcttgacgagatggaaaagccagagtttttaccgcatgtcgctgaggtaggcgcgtatttccaggatcaactcggcgctttacgggaaaaatatccgcggctcattaccgaggtccgggggcggggcctcatgctgggcgcacagcttgcgcaaccggggcgagccatcgtcaatgactgcctcgccaaaggcgccatcatcaactgcacggccggcgacgtgctgcgtttcgtgccgccccttatcgtgacggaggaggaagtggacgagatgatcgcgatactggataaggttttatcctcgccgtcctgacaggcgccgggcagtttgtcgatgagaggtccttatagtataatgaaaaatagattagcgaatatcaaatgtttatttatggaggtcttattatgttgaagggacgcgatttgctgtcgattcatgatctgtccgtggaagagattgaggaaattctggcgctggcacaggagctgaaagcgaagcagcggggcggcagcgggtataagctgcttaagggaaaaaccttaggcatgattttcgagaaatcatccacccggacgcgcgtttccttcgagacgggcatgtatcagctcggcgggcaggcgctgttcctttccgatcgcgatctccagattggccggggcgagccgatccaggatacggcgcgcacgctgtcgcgctatctggacggcattatgcttcgcaccttcggccatgataatctggtggagttcgcacagtgggcgacggttccagtcatcaacggcctgacagaccttctgcatccatgccaggcattgaccgatatgctgacgattcgcgaatactgcggaaagaatctgcgcgggttgaagctcgcctacgtcggcgacggcaataatatggcgcattctctgatgtatgcctgcgccaagatggggattgatttcaccgctgcgacgcccgagggctatgagccggacgcgcagattattcagaacgcgcgggcggacgcgcataagctggggacgtttatttctttgacccacgacgcggcggaggcggtaaaggacgcggatattctttacacggatacttggatcagcatgggcaaagaaagcgaagcggataagcgccggcatgatttcaccggttatcaggtgaaccgggcgctgctccagctggcggcaaagcgggcgatcgtcatgcactgcctgccggcgagccgcggcgaagagatcacggcggatgtttttgaagagaacgcggacattatctttgaacaggcagaaaatcgcctgcatacgcagaaagccattctggcgctgacgatgggcgactgattaatttttactcgaatattggattaaggagctgtttaattttatggcgacaaaagtaaagaaagtagcgctggcttattccgggggattggatacgtcctgcatcatcccgtggctgaaagagaattacgatggctgcgacgtcatcgcggtctgcgccgatatcgggcagggggacgagctggacgtcgtgcgggagaaagcgctgaagtccggcgcgtcgcaggtgtttatcgccgatctcaccgaggagtttttgacggagtatgtctggccgactctcaaggcaggtgcggtttacgaagggaagtatctgctcggcacgtccttcgcccgtcccgttatcgccaaaaagctggtcgagatcgcccggcaggagggctgcgacgccatcgctcacggggcgacgggcaagggcaacgatcaggtgcgtttcgagctgtccgtcaaggcgctggcccccgatcttaaaatcatcacgccgtggcgggagtgggagcttaaatcccgggaagaggaaatcgaatacgcaaaacgccataatattcctatcgcggcggaaaacaagacgtacagcatggatcgcaatatctggcacctgagccacgaaggatcggatctcgaagatccgtggaatgcgccgcaggataatatgttcctcgttacccgcgttcccgagcaggcgcccgatgaggacgagcatattgtcattgattttgaggagggaattcctgtcgccgtcaacagcaagcggctgggtgctaaggcccttttgacgctcctcaatgagatcggcgcccggcacggcatcggtatcaccgacctctgcgaaaaccgcctcgtcggcatgaagtcgcgcggcgtttatgaaaatcccggcggcgcgatccttttttacgcgcatcgcgagctggagtatctttgcctcgaccgggcgacgttccactataaagaactggtcgcccatcgctacgcggagctggtttacgacggtatgtggttctcacagctgcgcgaggcgctcgacgctttcgtggacagcacgcaacgcacggtgaccggtacggtgaagctccgcttgtacaagggaaacatcatgtcggcgggggcgaagtcaaaatactccctctacaatcaggaatatgtcacctttgaggaggacgacgtttacaatcaggcggacggcacgggctttgtcaatctgttcgggctgccgctcaaggtgcgggcgctcatgcagaaaaagacgggtcttttgaaatgagcgagaagctctggggcggccgcttcaccaagacgacggatgagatgatcaacgagtttcaggcgtccatcggttttgataagcggatgtatcgcgaggatatcgcgggcagtattgcccacgcggcgatgttggaaaaatgcgggatcctttcggaggaagactgcgatcgtattattgccgggctgaaagagatagaaaagcagattgatagcggcgctttcctttttgacgtgggcctcgaagacattcacatgaatattgaaaagcgtctgaccgatgcgatcggcgaggcggggggacgcatccatacggcgcgcagccgcaacgatcaggtggcgttggatacgcacctttatgtccgccgggaaactgcggcggtgatggcgctcatcctcgatatgcagcgggcgctggtggaaacggcggaaaagtacggcgacgttatcatgccgggatacacgcatttgcaacgcgcgcagccgatcctcttttcgcaccatctcatggcgtatttcgctatgctgggacgagacttcgatcgcttcgccggggtgtacgcgcgcgctgatctcatgccgctgggcgcgggggcgctggcgggaacgacgttcccgattgaccgcgaatttgtagcgcgccagcttcatttcgagcggctctacacgaacagtctcgacgccgtaagcgaccgcgactatattatggaatttctcgcggcatcgtcgatccttatggtacatctttcccggctcagcgaggaaacgattctttggtgctcccgcgaattttccttcgtcgagctggacgacgcgcactgcaccggctccagcatgatgccgcagaagaagaaccctgacgtttccgagctggtgcgcggcaaaacggggcgcgtcgttgggcaccttatggcgatgctgacgacggtcaaggggctgccgctcgcctacaacaaggacctgcaggaggacaaggaagggatcttcgacgccattgacacggtgaaattcagcctgacggtctacgcccgtatccttcggggcatgaaggtgaaccgggcggtcatgaagcgggcggtcgaggaagatttctctaatgcgacggatttggcggattatctggcgaaaaagggattgccgtttcgcgaagcgcacgctgtcgccggacaggcggttcattactgtatcgaaaggaagaaatggctcgcggatctcacggtggaagagtttcagaaattctctccgctcttcgcggcggatattaaagacgtcattcgcccggaaaactgcgtagctaaccgcaactcttcaggcggcacgtcgccggcgcaggtgaaaaaccagatcgaggccgcgcggcagctcatggcggcggagcaaaaaaccgtcgaaacatgggaaaaaaagcagatcgatcatacttaagggagaggcgctttacacgctctatatcgcaggctttggagagagcggggaagggaagcttttcctttacaaacaacagggaacgtagtacaatatggttcgtcggggcgtagcccagcttggtagagcgcttccttggggtggaagaggccgtgggttcaaatcccgccgctccgaccagtttatgtcaagcgtggcttcgctgtttctcggcgaagctttttttactgcgcatgggaattacgcaggcatggggcttgtttttttcggcggataagatataatacagagagaggaacgccttttatctttccagggagggaaaatactgatggaaggccgacaagagatgatcattttatacctggcgagatgaggagggggattgcccgccctctttttgtcgtttaaaaaaggattttttcggcgggaggaaacgcctgccgtaccaaggaggtaaggtactgtgtttgaaggaattggaagacttcatgattatctgcggcgaaataatctgcagctgatggcaaatcagaaaatcgcgacggggcaggcctttgacctgaatcactcgcaggggaaaagcacgtttacgcagccgtcagtttcggtccgaggaacgcagaaatccgcatcatcggcggataaactgcggatggcggcgattcggcagaaactcaagaacggagataaactgtcgtcggcggatatgaaatatttgaaagaaaatgatacggcgctttatcgcaaggcgcgggtgatcgagtcggcgcgggaggaattggagcgcgatctaaagcaggcgcggacgaaaggcgaagcgcgcttggcgatggtgcgggcggcgatgaaggtatcgtcggaagcggcgatggccgacgcgaacgctgcacccggcgcgggaagcgccgcgccgaatggagctggagaaggagctgccgcaggcgtagctgcgcctaacggatccagtggcggagaagaaggaacaccggggcaggcgtcttcgaccggagtatcggagaaggcaaatgtcactgggagtggagaggcagcgggcgagacacaggccgctgcggcaaagcaaacggcggaaaatgcggaaaaagaagttcaagcggcgatcgcgtcggcgatgaaagccgcaagggacatcatgcagcagacggaaacggaaaatcaggaagcccagagtacgctggcgagcttcatggagcataaagatgcgggcgacgccggcgacaccatgctgccgacggagatgctcattatccgcgctttacagaaaacgtggatggcatacatcagctctgacgcatataaagatttgcccgatgatatgatagatgaagaacgggagaaggaaagcggcgtttatggggttaaggctgcccggcggaaaaggcagctggaggctgcgttctcctaccataaagcgcatacgatgctctacttcagggatgacgcgagccaggcaggcgaaagataaaggggaaataaaaacagcggatgctgaaatagcatccgctgtttacgttttaaaatatctataaaccaaatgcgcgtgttatttgtcgaaagcgtttcggcggcgattagcagggcaggaagcgtcagctgtcggcgttctcagaatcgtcgtggcgcgggttcttcgatacgatttcgacggctttggcgatctgttctacgacatcggagtcgtactcgatggacaacatgtcgatccgtgcgtaaaggttgcctttttccgttgagatgtagcgcggcgggaggtgattcagcgccaggctcataatgtcccggtagcatttctcacaggtacagcagtttgggtattttttgagaattcctgccaatttttgctgaacgatatcttccatataatttctaagttcgagcataatattccgcctctctcgataaaatcataatttaattatacgctttgccgtttctatatgcaataagtgaaaaatcttatcccatgggtattttgccggaggcggtcagtgatcggaagagagaatttacgcctttgtaatatggcgcgtgtagagagaaaacaaataatttcgaagtcggaaaatctccttgacaatttttaggacgcagtatatagatatagatagaaacatgttttgcagggcttttgccgacaggcgcgctgccttcggcaggctgatgggcgtcaaaaggaagcgaggtggaagagggatagcgacgccgatggccttattaaaagaaagcgtggtggaacaaatgaaatatatagaagacgtagaagcaatcgaagtgcttgacagccgcgggaatcccacggtacgcacgaaagtgaccttgagcgacgggacggtggcggacgcgactgtgccgagcggagcgagcactgggaaaagagaagcgctggagctgcgggataaagatgcgcgatttggtgggaaaggcgtattgaaggccgtcgccaatgtaaatacagcgattgccgaggcggtgatcgggaccgacgcctttgatcagaacgccatcgacgaggcgatgcgtagctgcgacggcacggataattactcaaaattaggcgcgaacgcggtccttggcgtatcgcttgccgccgcccgcgccgcggcaaaaagcctggatattccgctttaccgctacctcggcggagcgaacgcgcgcgtcctgccggtaccgatgtttaatattatcaacggcggcgcacacgcgaataacagcgttgattttcaggagtttatgatcatgcccttcgggttcaaaaaattctcggaagcgctgagggcggctacggaaatctatcacgccctgaaaggcatcctgaacgccgccgggcacagcaccgcggtgggcgatgaaggcggcttcgctcccaacctgaaggacaacgaggaaccgattaaaattattatggaagcgatcgccaaagcgggttataaaccgggcgagcaaatcgagctggcgcttgacgtggccgccagcgagctttacaaagatgggaagtacgagcttgaaggaaagaaattcagcgacgacgagatgattgcctattacgaagcgctttgccaaaaatatccgattttttctatcgaagatggtttgagcgaagatgattgggatggctgggcgaaattgacagcgaagttaggagataaaatccaactcgtgggagacgacctctttgtaacgaatgagaaaatcctgcgaaaagggataaacagctgtgtcgccaacgcggttttaataaagccgaaccagatcggaaccgtcagtcagactatgcagacgattcgcctggcgcagcgccgcggttaccgctgcatcatgagccatcgcagcggcgagagtgaggacagctttatcgcagatttcgcagtgggaatgaatacgggacagattaagacgggcgccacatcaaggagcgagcggaacgctaaatataatcggctgttggaaattgaaacggagacggacgagtttttaggtcatgaaatttaagctatggcgtatggctccgctatggcgtataactccgcttgctatgtgacgacgaaatgccgctggaatgtgagaattttccgaatgtctttttgaaagagaaggcgttaaatgtttcggaagcatctcccgctacgctcttttcggaaggcaagggatgaaacgttgacaggtgcaaaaacggtgggtataatatatctcatggctatcggggcgtagcgcagcttggcagcgcacctcgcttgggacgagggggtcgcaggttcaaatcctgtcgccccgaccatttttgcgcctgtagctcagttggatagagcaacggtcttctaaaccgtgggtcgtgcgttcgaatcgcgccaggcgcaccagaaaattaaacccgcaatcccttgccctgaaaaggattgcgggtttaataggtttaattaaaaattttaaatgcgcagaatggaaaggatatagtatgaaataaggggaattttgaggaagggggttaagcggcgcggtggaatggcgaagcattcatgaaatcgcataaggtttagcaaagagattcgaagggaatacgaaagggcgaattattgatgaggaaaattgaagcagtaatactgcctgacgaggtgccgcctccatgtggcgctaatgggaaaacggaatataaaaaatattgggagaaatccgctaaggcgcataagcgacttgaaaaaatgaaagagcacttacggaagcgttctaacagttcaacataaagtattgagaggcacttacgaacgtcgtgagtgcttttcttatgccctttcttaggaaacgacggcttgtctcattgaatagccttatcaaaataaataacgaacaagaagaagatatggagatcggcctttgcggcaaataagagtatagaagcaggaaaattacgttgaatagcgaaaatttctaataaagattttatgataataaaaagccaccgcaaaagcgatggcgttatcggcaaaggcggactgggtgggttaccgccgtaccctacggcccgctgcacgaatgcagagccttatcttagaacactgatggatattgataaactggtacgttcatcaagcttatgtttactgatggatattgataagccgatatcatcatgtctaagttctccttcattgtagatgaaaattaatgaaaaagcaagggggaaaataaaaaatgggagagagaaaatttcgaattgggttggatattggcattggctcggtggggtgggcggtaatatcctatacgagccaaaaggacgctcgcattgaggattttggctcgcgtattttcgtctcaggggaaatcaaggggagcgaccgggctagccagatccggcgcggattccgtggggtacggcgcttagagcgacgccgccgctggcgaaaggagcggttgaaggagtattttattaaacttggacttttgacgcggcaggaaatcgaggaagtggcgaaaacaccctgccaggatgtttttgcactgaaagtcagggcgctggatgaaaaagtcagtcccgaagaattgctccagatctttctgcacagcgcgaaccatcgcggctatcgtgatttctatgaaggcgaggcagacgacgaaacattcgaggacgaggaggcggcggaggagacgcgggttaataaaaaagcggcgcaagattttgaccgggactttgcggccagcggttgccggacaatctcggaatatctatgggaaaagtgccgcaatcccgcaggacagatcgactttcgcaaccgtaagcacagggagacgttacgtcttattcgacgccggtatgtggagaaagaggtttcgttggttttgacctgccagagtcggttttatcgggagctttccccggcagcttgcgagattatcccggcgattcttttcgcgcagcgtttctttgaggatggaccggggaataaaaatgatcctaatcggcgctatacgggatttttagataagttgggagcatgcccgttttatccccgcgaacggcggggatttcggaatacggtgctggccgatgtttatgccgtcgtcaatgcactttcacagtatcgatatcaggggcaggatggtcagtcggggcttcccgccgccccggcgcgggagattatcgagactcttttgcaagagggcagtatgaatataacgatggtcaaggctatcctgaaaaagcatcgggtgaagctgttcaaaagcgctggtcttgatgagaaagctttagaaaaagctaacaaatttttgcgcccgatcaaacggatcgctgaggcggcaggaataccctggaaggctcttttggaggatgaaccgctaagttatgagaatccgccgctgctccatcgactgggtgaagtgttagcgaaatacaaaacgccaaagtaccgaaatgatgaactgaaaaaagtggtcagcggaaccgtggcggatcatgaagacttttgtcggacactggcggaaaagccgttcagcggcgcttcgtcatgctcgtaccactatatgcacgacgcggttgaagcgtttatggcaggagagctttatggcgattttcaggcacggagaatcgaggaggaaacggcggcagctccccaagaaggacagcgcttcgctcagcttccagcgtctttattgaaagaagatgaagacattcgggataatccggtcgtatatcgggtgattaatgaagcgcgccgggtcgtgaacgcgattattcgcacttatggggcgccggagtgcatcaatgtggaggtcggccgtgatctggggcgcagctttttggagcggcaacagctagagaaaagcaagacggcgaacgaaagaaaaagagagcaggataaagagaaaatagccgaaattttgcagatagataaggaaaatgtgactgggggacaaattgagcgctacaggctgtacaaggaacaggatgggaagtgcctgtacagcgggaatccgattgacatcgaagcggcgctggacacgaagggagcctatgaagttgaccacattattccttattcgttgatccttgataatacgctgcataataaagtgcttgtcgaatgggatgaaaaccggcgcaaaggacagcgcacccccttgatgtatatgaacgaggagcagaaaacggcttttctagagcgggtgaatgggatattcagtaaaaagggcagtccgtggagtaagaaaaagtacgagtatctgctgcaggaatccttgtataccgatgaagcccgacagctcctcaccgcatggaaatcacgcaatatcaacgatatgcgttatattacgaaatatgtttttaatcttttccagcagcatttgcagttcgctccagacggaaagggggagcggtctatccatgtccatgcaattcgcggtgcgataacgtctcggtttagaagaacatggctgaatccaaagacgtgggggacagaagataaggaccgaaaaacttatttgaaccacgcggctgatgctgtcgttctggcgaatctgacgccggcgtatattgagatcgcatccgacaatatgcgcctgcagcaaatgttccgccgctatcataagagtgaaagtgcagagtataacgattatttggagcgtgctgtccgcaagatgaaaacgtattatggcttctcggaagaatacacgcgatcgttgcttcgctcccacgaccgggttccttcctttatcgggcagctggcgagggaagttgatattcgctttaatgacttggaagaagaacgattcgctgtccaaacccgtgaattttacggggagaatcccgattttattatcccgccgcatatgcctttaacttcgcataaggcggagcgtcgctatcgcggcatgattgctgacgcgaatccgatcaaggtgcgggtaatcaatggcgagccgtacaagatcatgcgcaaatctgttctgtcgattaaagccggcgatctggagaacctctatacgaatgaccgcttgttgaaagagacgctgcagcagatgctgggcggtcaggaaaagaaatataccgtagagaaatatcttaaagaacataatttatctgcgttttccctgccgaacgaaacctttgtttataaagtctcggtggttagcagcgttatcagtaatttttacaggaaagacattaccgacgggaattactctatgatgggaggcttgaaatattattgcgttgagatttatcaagatcataaaggaaaaaatcgttgccggggaatacgttttatcgacattgtgaggaaaaataagaaactttatctaaaggaggataagcgtccggaaaattataaacagcatgtgatgtatctttttgccggcgactatattgaagcctttgatgcaagaggcaaatgctatctgcgagggacatactgctctgtagattcgattcggcatcaacgtttttatttcaaatgcagtaatgcatcggaaactaaatcggtaacattaaaggcggaggggataataaagaaatacagcatagatttacttgggcataaggggggcgaagtcaaatgcagcgtacccttatcgtccatgccggcgaaagactgacgaagcgggataactggctcgtgctgcaaagtgaagaaacggaaaaacgtgtcccgatcgacgatcttttctgcgttgtcatcgacaatcctcgaatcgtgatgagcgccgcgcttttgacggctgtcactggcgtgggcgctcatgtcctgctctgcgatgagaagcatctgccagtctcgatcctgtgcccgcaagcaggttattatcgcccttatcgcatcctggagctccagctcttgatggatgaggattttcgcgatacattatgggcgcttatcgtacaggcgaagttgcaaaatcaagccaaagccctggcaatcgctcgctgtcaggacaagaaacggctacggcgtatcaaacagctggccgagcaggtacagccgggcgatagtggaaactgtgaaggcattggcgcaaaaatgtttttccgcctgatgtacggcgcaaactttatccgcatgcaggacgacgggatcaatgcggcgttaaattatggctatacaatcattcgctcgacgatggcaaagctgctgtgcgcgcatggtttgaatacggtactgggaatccatcatatcaatacggcaaattattttaatctggccgacgatatgatggagccgtggcgaccgttggccgatctctgggtggatcttcatcatgaggagctcctggagggaaggctgacgaaagagcaacggacagaacttattggattgatgaatcggatcgttttatttggtgggaaaagaatgaaagcgcggtcagcgatggaccgctgcgttgcttcgctggtcgcggcgattgaaaagaaagaacctgagtgcctgcggtttccagaacttttaccgctcgcaacggagaaagaagatgagtaatcgtattatgcgcctgctcgtattatttgatctccccacaggaactcccgaagaacggcgagattatatgcagtttcgcaagtttttaatcaaagacggctatgatatgctgcaatactcagtatatagccggattactgcaaatcacgatgatgccaatcttcatttggcacatattcgttgccatttaccgccagctggttcaattcgcgctctgttagttacggaaaaacaatatgcttccatgtatattttgctgggacaacggacagcaacggaaaatcttctgagagataatgatgtggttgagttctgaggattttgtggtatactaaatttaagttttagttcactgatggatattgataaactgataccgcgagttaaacaatataaattatctatttgttttagttcactgatggatattgataaactgatacataacatgattatgttattcattatagatgttttagttcactgatggatattgataaactgatactgacagacgaagaacttgaaatgtatcagggttttagttcactgatggatattgataaactgatacatggttgttctggttatgcccatgataagcgttttagttcactgatggatattgataaactgatactctgactatcttctacatcatagctctttggttttagttcactgatggatattgataaactgatacgtggtgcatttgatggtattgaaaaaattagttttagttcactgatggatattgataaactgatacttgtgtcaattcgttgtattgcgtccatttgttttagttcactgatggatattgataaactgatacgtcgatcttactcaaaacggaatatcttcgttttagttcactgatggatattgataaactgatacaaaatctgctacatctgtagcgaaattgggttttagttcactgatggatattgataaactgatacgaacgaaaatccgcgacgatacgcgatattgttttagttcactgatggatattgataaactgatacgcccgttgtgatgacggccgcacacacggagttttagttcactgatggatattgataaactgatacaagcggcatttcccagacgtgaaacaactcgttttagttcactgatggatattgataaactgatacgaaagatcaagccgtccgttaagaaacgccgttttagttcactgatggatattgataaactgatacacaataacataattgttatacagtagccgcggttttagttcactgatggatattgataaactgatacgcatgccttattacgctgttcgtactctttgttttagttcactgatggatattgataaactgatacctgaatatcagtatgtatctaaaaatgacagttttagttcactgatggatattgataaacggatacgtgaagcgtattaacatcgtcgggcgcggagttttagttcactgatggatattgataaacggatacagacccgccaatcgtaaagagcttttgcacgttttagttcactgatggatattgataaacggatacgcaatcgtcaggacagggatcacccctttggttttagttcactgatggatattgataaacggatacaccccgcaggcccgttctacagtagcgatgttttagttcactgatggatattgataaacggatactattccgaacaagaacgaatcagcctatctgttttagttcactgatggatattgataaacggatacttcatatccatcgacgtcatcgtattctaagttttagttcactgatggatattgataaacggatacatcgcggttaaagacgaactccactgctccgttttagttcactgatggatattgataaacggatactcgtgggccgtattccgacccacaaaatgagttttagttcactgatggatattgataaacggatacgcggacttccgaatctcggcatgcacgcgcgttttagttcactgatggatattgataaacggatacggatcgggcgcgggaatgtgctgcgcttgtgttttagttcactgatggatattgataaacggatactgtcgtatgttggtgccaagcgtagacgtcgttttagttcactgatggatattgataaacggataccaagacgaaaaaaatattgcgttagcccatgttttagttcactgatggatattgataaacggatacagcggtcgagctgagaaagggccaaggtcagttttagttcactgatggatattgataaacggataccgaagtgtttttgcattgagatacttataagttttagttcactgatggatattgataaacggatactaatcacaggcccagcaatcacggccttgtgttttaattcactgatggatcgtcaagctgatctgtaaaataaaagccgttgcccaatcattttctacggttccgtatctgcggtcaaaaacggcaaaacatccgcccgtagtcccgtggtacaccattagcggctccccgttttcattaacgaccttggaaacgttattggcagagtcaaagaattttgctaatctgtaatcaataaaagacgtctttctctcttcgcccgggccactaacccggatacgttgagaggaagcgtttttttattttcctggtagattcgaatatcactgattcctgtcgaatggagaattcgctttgcgcttggcttatccgtcaaaacaatctcagtcggaacaaggtcgcgaatctcacgcgcctcatcctgcttcccaatccccaaaccacgccttaaacgccggtgtccgtacagaaagccactgctcttccgttaggtttgtcggctgcccgttaggcgctttcatccacatctccgtgccctcgtactgacggcgcacggcttctttttgcgattctacggcttgagcaaagcgctgcgccgcttccttctcctgccccatctgccccgcgttagtcaaaagctccggcagggcgtccatggccgtgtagcccgcttctcccgcttcacgatggaaggagacaaggcgatccgtcatccgtgccgctacgagcgccgccgcccgggcgctcttttgtacttccttgttcccctgctccaagccggacaagagatagctatacacctgtctcgcttccggagagagcgtcgctgctatgataacgtctccatggcgcacgtcccccagtacctttccaatcttgttcagcgtggacatttctttgtcgagggcggataattgcttttccactccagcgaagtattcctgcgcttccggcgtaccgtcgttcgtcggatagtcagaatatggcgtcggtattggtttttaaggagcataatgtatgaaatttactttttaaacatatagatggatattgttaagggaatgtttcacgtgaaacattaaaaaggaaatgggagggataatattttgggaaatgatgggaagaagaaagaaatggaaaagaggaatgttcattttcccagcgttggcgggactgatgacggaaaggggcgttttttctttgtcgatagttcacgaaacgggaaaagtgtggtagaatagtaacgatttcatggaaatgattttgccgggcggaggggcggtatgcgaatcatcacgggaacggcccggggcgctcgcctgaaagcgcccaagggattggatacgcgtcctacggcggatcgtgtcaaggagtcgttgtttagtattttaggggaacgagtgcgaggagcccgggttcttgatcttttcgcgggaacgggcagcttgggcttggaggcgttgtctcgcggcgcggcgtcggcggtttttgtggatcgggcgacagtttccgtgattcgtgagaatgcggttcatacgcatcttttagcgagcgcgcagtttttgcggcaggatgttttgacggctttgccgcgattagcggcggcgggggagaagtttgatctggttttttgtgacccgccatacgagacaggtttgtggcagcgggtgctgctggcgctggatcgttttccgcttctttcccctgaggcattggtggtggtggagcgcggcgcggcggagaaggaactgccgccgttttccacactcgtttggcagcgaaccgtgcgatatgggcggacgacacagatcctcattttagagtcgcgcgaggcggagcaggaggcatagcgatggtcagggcggtgtgctcaggaagttttgatcccgttacctgcggccacattgatattttcgagcgggccagcaagatgttcgatgagatcatcgtcagcgtctttcataatatccgcaaagagccgtggctgccggtggaagagcgggtgaggctgattcgcgaggcgacgcgccatattaaaaaccttcgggcctgttctttttccgggctgttgacggatttcatgcgggatcagaaggccagcgtgatcgtgcgtggcctgcgctcagtaacggattttgagtacgagatgcaggaggcgcagacgctgaaacatcttgataagaatatagagacgatttttatcctgacaagtcaggagtattatttcgtcagttcttcggggatccgagagttggcgctctttaacgggaatgtacatgggttggttccggcttgcgtcgaggaagccattcgtgccaaagtaggcgcgaatggggatggggcagccggttttaaggaggcacggataaaatgaagtttgtccgattgaggcagaatctatcggtgcttctttagccgcaggaaaaagcgaaacagaaagtgggctggtgagcgatgacggtaagcaatattttggatgatatcgaaaatctggtggtggacggcaggcatatcgtgttcacgaataagagtatcattgaggagccggagctgatccggctggtggatgatctgcgcaacgagctgccgctggagctgcagcgggcggagcaggttatgcaggagaaggatacgattctgtcggacgctcgggacgaagcgcagcgcatcgtggaacaggccaaggagtacgctaatcgcttggtggacgagagcagcgtggtgaagcagtcccaggagaaggcgacgctgattttaacacaggcgcaggcgcaggagaaagagattatggagcgcactatgcagacggcgcagcagcggtgcgaccaggcgaatcaatatgccaaccaagtattcgatcacatgttggcccatttgggaaattccatgacgacgctggagcaggggctggataccttacagcaggccaaggccgcgctgaaccaggcgccggtggaaccggcggcgccgcagcaggcgatgacacctgccgaggaaacgctggagagttgagctgcgccttggcggccgattaattttataagatatcgggcagggggcttgatccattgggcgattcagcgccgtcggaattttcggcggcgggggcggcacgggtcagccctctgtatatttgtatgatttaaatctgggaagggaagtggcctccttggatagagacagtctccgacggcttttggaacgttgtcaaaagggggatgtatcgctggatgagggcgtggaatctctcatgaagctgacgggggaggagttaggctttgcccacattgaccaccagcgggaagcgcggcagggatttcctgaagtggtctacgcggtgggaaaaacggcggcgcaggtggcggccatcttatcgagactcgcggccgcttcccaggggagcgtcatggcaacgcgggtatcgccagagcaggcggcggtggtgcaggcggctttgccggaggctgtttacgatgaagtatcccgcatcgcttaccttcggcgccctatcgcgccggtggatgaggcgcggcgcatcctcgttttgacggcggggaccagcgatatccctgtggcggctgaagcggcattgacggcggagcttatggggaacgccgtggatacttgctacgatgtgggtgtggcggggatccatcgccttttcgctcatgcggaggaaattcgccgggcgaatgttctcatcgtggcggcggggatggaaggtgcgctggccagtgtggtaggcggccttacggcgaaaccggtcatcgccgttcccaccagcgtcgggtatggggccagctttcatggattgtcggctctcttggccatgctcaattcctgcgctgccggcgtagcggtgatgaacattgacaacggctttggcgcgggggtcttggccagtcggatcaatcacatgaggtgagatcatgaaggcaatctatttggactgtttttccggcctcagcggtaatatgctcctgggggcgtttttagcggcgggagttccgctctcatatttggaaggagagctgcaaaaacttttcgggacggcaacgtttcggctgcatgtctcagaggtgaagcgaagcgggatcgcagcgacgtatgtagaagtggaggatatttccgcggcacatgcccatggggaacacggcactcatgatcacgccgggcagggggcgcattctcaccgaaccatgggagaaatccgaaatcttttggcagcatcacccctgacggatgcggtgaaggaaagagcattgtctgtcttttcctgcctcgccgaagcggaaggggaggttcacggactgccgccggaggaagtgcatttccatgaggtaggggcggtagattcgattgtcgatattgtgggaacggcgctggcccttgagtacctagcgatcgaaaaagtgtttgtttcccgggtcaatacgggaagcggctacgtggactgtgcccatgggcgcatgatggtgccggcccccgcgacggcggcgcttttgcgggggattcctttttaccataacgatgagcagcgcgaactgacgacgcctacgggggcggcggtggtacacgcgctggcggcatacgcaaattacctgccggcgggatttcagccggataagatcgcctacggcgcggggacttgggaattggtgacgccgaatgtccttcgggtctatgtgggggaatacgaagaacggcaaacggtgaagcgatatgttatagaaacgaatattgacgatatgaatccgcaaaattacgagtatgtttttgaccggctgttagcggcgggggctttagatgtttggctgacccccatcatgatgaagaagagccgcccggcggcagcgctgtcggtattggtggaggaagccggccgggaacgctgcgcggacatcctctttcgggagaccaccagtatcgggctgcgggtgatgccggtggccgagcgctgcgaagcggaacgccgtacggagacagtcacgaccccttacggagcagtatcctgtaaaatcagtacctataaagggggaatcgtgtctttgtcggcggaatatgaagattgccgccgtctggcaaagaaaaacgatgtgccgctgaaagaggtgcggcaggcagcgcttcaggaaataagacgccgcttgggagaatgaagatatggatacggcggaggagtttttgcttcggctcaaaggatatcgacggctggccgttgctctttccggcggggtggacagcgcgaccttggctaaagcagcggctttggctttaggagatcacgcggtggcagtcaccgcggtgtcgccgttcacgtccgcagaggaacgaagggcggcccgtgaggttgcgcaaaataccggccttcggcaggtggaaatcgaaacgcgggagatggaggatccccgcgtagcggctaacgatgaggaacgctgctaccattgtaagcgggatcgtttcgaacagcttgccgcttgggcggaagaagagggtttcgcgccggtggccgagggcagcaatcaagacgatcgcagcgattaccgcccgggcctgcgggcggtcgccgagctttttccccgagtggtctccccgtttttagaggcgggatgggggaaagcggagattcgtcggcaggcaaagacctggggcctttcggtgtggaataagcccagcgcggcctgcctggcttcccgcgtggcctatggccttcccctgacggcggagcgattggccatggtggaggcggcggagcgggcggtacgcccttttgccgcgggacaattgcgtgtacggcatcacggttcgctggctcggattgaggccgaaccggaggcgctgccgtgtttgattgcgcatcgagaagaaattgcggcggcgcttcggacggtgggattttcctatgtgacccttgatttagcgggctatcggacggggagtgccaatgaagtcttagcactttcggtgcggcagtagcgattttgccccgcgcattattttgcgtccagacagagcaacgaagcgtgagggagcagaaggcacgatttaggagcggcatacgaaagagaggagaatctatggaagaaaaagcagcagcggtctcacccaaaatttttccggcgtcgtcccctaagcgtccaccgcgtaccctgcggagccatttcggaaaatatctgacgatcgttgtgggcgctgttattgcctccgcaggattagagatatttctcattcccaatcagatcatcgacggcggcgtggtgggcgtttccatcatgatgtcggcggtcaccggcatgccgctgggtgttttcctggtagggctgaatcttccctttctctatattggctaccggcagcttggtcggagcttcgtcgtggccacagcggtagcaatcctctgcctgtccctgtggtcagaggtctttgccccggtgcctcggattaccgaagatttctttttggcggccattttcggcgggatcattgacggcattggagtgggcctcattatgcgggctggaggctccctcgacgggacagagatcgtggccattattttggatcgccggacggtgttttccgtgggcgaagtggtcatgttcatcaatctgttcatcctttcggccgcgggatttctctttggctgggataaagccatgtattctctcgtggcctattttgtcatcgccaagatgatcgacgtggtgctgaaaggactggatgaatcctacgccgtcatgattgtcacgcatcataacgaagaagtgg

SEQ ID NO: 3362 - DNA, 12888 bp, synthetic construct
  source 1..12888: mol_type = other DNA
  misc_feature 1..12888: note = Synthetic
ggggctattgtgtccggggcggcggccgaagtggcgaaggggctgtacctttacgggcacgctatcgggatggcctttcagatcaccgatgatcttctggatattacgggggatgcggcaaagctgggaaagccggcggggaatgatattcggcaaggcgtggtaacgctgccggtgatccgggcgatcgaggtgagtccccagcgggaggaattggcggccatcctgcgggatcgcgagatgtccgaggcgatggtggcacgggcgctttccattgtgcgggcgtcggacggcgtagactttgcgcagagacgagcaaacgagcagatccaaaaggcgaaggcggcgctgccggaggagattccggcggcggtgcgagaggcgttcatgcaggcggcggattatatcagtcggcgggatttctgaggaggaaaacgttatgtttggtattggtgtgccagaattaatccttatcctgatcatcgggctggtggtatttggcccgggaaaattaccggaggtaggccgggccatcggcaagagccttaacgaatttaagcgggcgacctctggtgcaggggaggagcgtccagccccgcgggcgggggaagagaaaacgagccacgatgacaaagcgtaagggagcgtctgctcatggccgaagataaggaaaaggatgcgctgccggagggaagcgaagccgagataggtgcggcgcgttctcaggcgtcggaggaaccgccgccgaacgaggcggcggtttcttctccggcaggggaaaatgaggctgacgcagcggctcctttgccgtcggcggagaaaacggctggggtacgggaggcggcgccggatttagggatgtcggaggaaaatgagacggtagaaggcaatatgtctctcgtccgccatttggaggagctgcgtcagcggatcattcgctctttgatcgccatcggaatcggctccggcgtggcctattactacattgaagacatcatgggctacattactctgcctacgggacgcctctattatctgcagccggcagaagccttctttacctatttgaagattgcgctggcggcggggttccttttggcgctgccggtggtgttttaccagctctggaaattcgtgctgccggccctgacgatccgggagcgaaccgtcgtcggggtcttggtgccctcatcggtgttgctgtttttcgctggactggctttcgctttctttttggcgctgccggcagccatcaaatttttcgtgggattcagcacggagaatttgcagccgatgttcacgctgcaccagtattttgatttcgttttatctttcgtattgcccttcggggcggttttcgagctgcccctgttcatcatcgtctttgccaagttaggcttcatcgggtcggatttcttgcgccgcaagcagcggctggtcattttactctctttcgtggtgggggccattgtgtcgcccacaccggatattttcaatcagtctatgatcgccgtgcccctcattgttctgtatgagatcagttacgtcacggtgcggttcatcatggggaaataagggggaagtcctgttggcgtacaaagatttgcgggaattcatcgccgccttggaagcgcgcggccagctccggcgcgtcaaggccgaggtggaggcggagctggagatcacggagatcactgatcgggtgtccaagatggccggatcggataacgtggcgctcctctttgaaaacgttcgggggtacgatatgcccgttctgatgaacgctttcgggagctacgagcggatggctttggccttgggcgtggaaaaattagatgatatcgccgaggaaattcgcgctctcatgcgccttccctatatttccttctcccataagatggatcttgtttccctcattcctatggcgcggaaggccatcaatttccccaaatatgtgagccacgccccctgtcaggaagtgatcgaaaaagaccatccgtcgctggatatcctgccgattttgaaatgctggccggaggacggcggccccttcgtgacgctgcctctggtctttacgaaaaatcccgagacagataagcgtaatgtgggcatgtaccggctgcaaaaatacgacgcgaccactacggggatgcactggcacattcataagaatggggcggagaactatcgggcggccaaggcgaagggcatgacccggctggaggcggcggtggccatcggcacggatccggcggtgacgtacgcggcgacagcgcccctgccccgcgacatcgacgagatggtcttcgccggttttctgcgccataagtcggtggagctgacgaaatgcgtgaccgttgaccttgaagttccggccaccagcgagatcgtgctggaaggctatgtggatatcgatgagcgccgccgggaaggccccttcggcgatcataccgggtactattctttagcggacgattatccggtgtttcacgtcacctgcgtgacccatcgccgccatcccatctacgccgctacggtggtgggccgtccccccatggaagactgctacctcgccaaggcgacggagcggatcttcctgccccttttgcagcagatgatccccgagatcgtagacatcaatcttcctttggcgggggtgttccataactgcgccatggtatccatcaaaaaatcatatccccagcaggcgaaaaaggtcatgcaggccatctgggggatggggcagatgatgttcacgaaaatgatcatcgtggtggatgcccacgtcaacgtgcaggacgaaaaggaagtctggtggcgggtattcaataacatcgacgcccggcaggatttggtgctgacggacggaccgttggacgttttagatcattcctcccccatgccgaagtggggaacgaagcttggcatcgatgctacgcggacgtggccggaagagggacatgcccgggagtggccgaatgagatcaccatgaccgatgacatacgcgatcgggtcacccaacgctggaaggaactttttgcatgaggggaaaagttcaggcgcatatagaaaacatcgcccttcatcataccgtgtttgaccttccctttgcctacatgggggcttttttggcggcgaagggacaccccggctgggggacgcttctctggatcacgctggccgttacgggcgcgcggagcgcagcgctggccattgataatttcgtcgatctcaaatacgataaggtgcatccccgctttacgaagcgccccatggtgaggggggcagtgacgaagggagaggcgctgcttctcatcgcgatgagcctggccctctgcctttacgcggtgactaagctgccgcccgtttgtttgcgcctcttgccgttggcggcgctgcccttcgtagtgtatcccttcatgaagcgcctgacgggcctctgccatgccgtcttgggcgtcgccatcgccatggcaccggcggggggctggatggcggcggggggacaaattgatccccccatgctgctcttgtgctcggcggtgggcatttggatcggcgcttttgatgtgatttacggcgtgcaggacgaagcttttgaccgcactcatgggcttcattctttggccacggaagtgggggcggcgcaggcggtggccttggcccggatcgggcacttcctttgtatcctttgcttcgccgccttaggagcgcttctgcacttggcgttcccctactacatcggggtgttccttgcggcggcgacgcttttttatcagcacagcatcgtggatattcggcagtttcgctggctgacgcaaaggtatttcatgcgcaacgggattgtcgccgtggcgatgtttctctgtacggcggccagcttttatttttgatttttccatcgagatgaaatggagtggcggatatgacggcaagaattttatcggggaaagaatttgcccagcgcattagggaagatgcgaaacggcaggcggaggaactgatgcggcgtaccggcgtccgcccgggcttggcggttgtcattgtgggccatgatccggcctcggaggtgtatgtgcgcaataagcaccgcgcctgcgaagaattggggctgtattcggcggcggtggagctcccggcggagacaacgaaggaagagctgctggctaaaatcgatgccctcaacgccgatgaccgggtgcatggcattttagttcagcttcccttgcccggggccttaacagcggcggaaccggaggttttgaatcgcattgccccggaaaaggacgtggacggctttcacccggtgaatgtggggcggctgtcgataggggagccgtctctggcgccctgcacgccggcggggtgccttcgcatgttggaattggcggacattcccatcgatggggcgcgggcggtgatcttaggccgcagcaatatcgtgggcaagcccatgatggcgctgctcttggcgaaaaatgccacagtcacgatttgccactctcatacgaaagatattgctgccatcgcccgggaagcggatattttggtggcggctataggacggccgaattttgttaccgctgatatggtgaagcccggcgctacagtgatcgacgtagggatcaaccgcgtcgcgccgaaaaagttagtgggcgacgtggattttgaggcggtgaaagaggtggcaggagccatcacgccggtgccggggggcgtggggcttttgaccatcgccatgctcatgcagaacacggtagcagcggcgcagcgtcaaatagagaaataggcgcggcatagatagaaaaatgtgtgaatagggaatataggacgaggaggctgaaacatgaaatcggatgtggagatcgcccaggaagcgacgatgcagcccatcggagagatcgcggcaaaactaggcttgacggaggatgagatcgagccttacggccgttacaaagcgaaaattgcgtcagcggcgtgggaacgggtgaaagaccgccccaatgggaaattggtgctggtgacggccatcaatcccacccccgcgggggaaggaaagaccaccaccagcgtcggcttggcggacgctttccggcagcaggggaaaaagacggcggtggcgctgcgggagccgtccttagggccgtgctttggcctcaagggcggcgccgccggcggcggctacgcgcaggtggttcccatggaggacatcaatctgcatttcaccggggattttcatgcggtcaccacggcacataatctcttggcggcggtggtggacaatcatttgcagcaggggaacgcgctccagattgacccgcggcgggtggtctggaagcgggtactggatctcaacgatcgggcgctgcgccatgtggtcatcgggttgggaggcaaagcccatggcgttcctcgtgagaccggctttgacatcaccgtggcctcggagatgatggccattctctgcctcgccgacgggttagaagatatgaagcggcgcttaggggagatcgtggtggcctataccttcgaagggcgggccgtccgggcgaaggaattaggcgttacgggcgccttggctctcctcttcaaggacgccatcaagccgaatctggtacagacgctggaaggcacgccggcattcatccacggcggccccttcgccaatatcgcccacggctgcaacagtatcatggcgacgaaatttgctttgaagttcgccgattacgtcgtcaccgaagcgggattcggcgcggacttgggagcggaaaagttcttggatatcaaatgccgcttcgccggctttcatccggatgccgtggtcatcgtggctacggtgcgggcgctcaaaatgcacggcggcatgccgaaagaggcgctggcgcaggtcgatgaaaaggctctgcaaaggggaatggataatctcttgaagcacattgagaatatccacgctttcgggcttcccgccgtggtggcagtgaatgtattccctacggatacgccggaggaactggccttcgtggcgaaaaagtgtcaagctctcggcgcggcggtagccctctccgaagtttgggcgaaagggggaaaaggcggcctcttgctcgcggaaaaggtcgcggcggcaatggaaaagggcgcggatttccgccttctttatcaggtggaggaaagtatcccggcgaagattgaagcgattgcgcgaaagatttatggagcggaaggggtggactttaccgccgcggcgcgtcggacgatggaagagatcgaggggctggggatggataaactgcctgtctgtatggcgaaaactcaatattctctgtccgatgatccggcgaagttgggacgcccccaagggtttcggatcacggttcgggaactgcgcctctccgccggggcggggttcatcgtagcgctcaccggcgatattttgacgatgccgggactgccgaagcatccggcggcggaaaacatggacatcacagaagacggccggatcaccgggctcttttgaggaggcaagatcatgaaacgcatatcggtagagctggtaccgcgggacgctttgcgggaggaattggcggtgctcaaggagggcggctttgccatcgacctgatcaatatccccgacctcttgcggtttcccacgcgcagttgggagggggcggcgctggcacagcaatattttccaacggcgatgccccatattcgggcgatggatgtggatttggaacggccgctctccatgggagagtatctgcgccaaaaccagatcaaagaagttctgatcatcgagggcgatcctccgcaggatatgacccataccgtttatccgacggtgacgacggatgtcattcggaaatttcgggaagaattgccggaaattcgggtgtatgccggaatcgatcagtatcggggcagtatgcagcaggagcagtaccgcattcgccggaaattgcaggccggtgcggcgggcttcttcacccagccgtttttcgatctgcggcttttggcgatgtacgccgatatgttagaggggctggaagtctattggggggtatcccccgtcgagtcggagcgggcgaaaagctattgggagctgaaaaatcatgtggtgttcccgaaaaattttgcggcgaccttggcgtggagcgttgatttcgcccgggaggtgcaggccttcgcccaaagccggggagacagcgtctatctcatgcccatccgaacggatttgacggcgtatttgacgggcgtttttgcgtaacgcgccgggcggcaaaaggaggcgatggcgcgatgtttacgatacggaaaaaagagtgtctgtcgtcggggatttaccgctatgagatcgaggcgccccggctggcacgaaagacgcagccggggcagtttgtcattttgcgcaccgatgaacggggagagcgcatcccgctgacggtagcggatttcgatcaggataaaggaagtatcaccttgatttttcaggtggtaggcgcttcgacggaacttttggcgcgcatggaagaaggggacgccctccttgatttggtggggccattgggacagccctcccacatcgccgccggaataggaaccgtcgtctgcgttggcggcggtattggcatcgcgccggtgtaccccattgcccggggcatgaaggaggccgggaatcggatcatttccatcttgggggcaaaaagccgggacattctcattatggaagaagaaatgcgggcggtcagtgacgaggtactcgttacgacaaacgacggttcctatgggatcgagggctttgtcaccacggcgctgacgcagctattcgagcggggagaaaagatcgacctcatatacgccatcgggccggtggtcatgatgaaaaatgtggtggaaacggcgcggccatggggcgttaagaccatcgtcagcctgaatcccgtcatggtggacggaaccggcatgtgcggcggctgccgcgtcgaagtggggggcaaaacgaaatttgcctgcgtcgacgggccggagtttgacggcgccgtcgtggattttgcgcagctttccgcgaggcaaggcatgtatcgggagatggaagcggcggctcgggcgcatgtctgccggatcgggctggggaggtgacgggtatggcgttgtccttgaagaaacatcccatgccggagcaggatccggcggttcgcgcccacaacttcgccgaggtggcgctgggctacgacgaagaaaccgccgtggccgaggccgaacgctgtctgcactgtaaggttcctttgtgccgccagggatgtcccgtgggggtcgatattcccgggttcattgaccgaatcaaggtccgcgattacgcgggagccatcgccgtcatcaaggagacgaacgcgctcccggcggtctgcgggcgcgtctgtccgcaggagaaccagtgcgaaaaaaactgcgtcttagcgaagcgcggggaggccgtcgccattggacggctggaacgctttgtcgccgattgggatttggcgcgggaaaaaacgatgccacaggtgacgtacgcagaggacgcgaagcgggtcgccgtcatcggcgccgggccggcggggctgtcggcggcgggcgaattggcgcggcggggttatcgcgtcaccgtttttgaggcgctgcacacggcggggggcgtactgtcctatggcatccccgaatttcgcctgcccaaggaagggattgtcgaaaaagagattgacgctctaaaagcgcttggggtcgatatcgagctgaacaccgtcgtggggcagctctacacggtggacgagcttttgacggaagaagggttcgacgccgtctttgtcggcaccggggcgggactgccgcacttcatgggcattcccggggaaaacctcaacggcgtttactccgccaatgaatttttgacccgctgcaacctcatgaaagcctatcgctttcccgagtacggcacgccccttcgagtggggcaaaatgtggcggtggtggggggcggcaacgtggccatggatgcggcccgtaccgcgctgcgcttaggcgcggctaaggtctctatcgtctaccggcggggggaagaggagcttccggcgcggaaagaggaagtacaccacgccaaagaagagggcatcgagtttcggctgctccataatcccgtggccgtccttggcgacggagagggatgggtgcgggcgcttcaatgtgtccgcatggagttaggcgagccggacgattcggggcgccgccgcccggtagctgtacccggatccgaagcggagcttccggcggataccgtcgtcatggccatcggccaaggccccaatcccatcgtcgcctccaccacgccgggcatggagacaaatccccggggcaacatcatcgccgatccccacacctgcgccaccactaaacccggcgtcttcgccggcggcgacatcgtcaccggcgcggccaccgtcatcttagctatgggagccgggaaaaaagccgccgcggcgattgacgactatttgcagagcaagcgaaaaacgcgtccccgataggcgtgggtggcgcagaatcggatcatcttgcgatcgtacagtacatagaaaaacgctttctgttgtggggaaatacaacggaaagcgtttttgtttatgcgccgaaaaggccggaataacggatgtgcccgtaacaaaccttttttgcaggagaatttcccggcgcggcgaaataaaattttaatagaaaatttataaacaaagaagccattgcctctcggcaatggcgccatttacgaaggcggattaacgggttaccgccataccccacggcccgctgcccgaagacagagccttatcttagaacacgatggatattgataaacggatacgtttaccgagcctatacacactgatggatattgataagcggatatcatcacgtctaagttcttctctatcataagggaaaatgatcaaaaaagcaagggggaaatgaaaaatgggagagcggaaatttcgcattgggttggacattgggatcggctcggtggggtgggcggtcatctcgtatacgaaccgtgaagatgcccggattgaagatttcggttcgcggattttcgtatccggggaattgaatgacggacgagcgcgcacaagtcaggaacgccgagcctttcgcggcgtgcggcggctggagcggcggcgtaaatggcgcaaggaacgcctgaaggaatattttatcaaattagggcttttgacgcggcgagagattgaggagatgggaaaagcgccctgtcaagatgttttttcgttaaaggttcggtcgttggaggaaaaggtgcgtccaacggaacttttgcagatccttttgcatagtgcgaatcatcgtggctaccgtgatttttatgaggcagacagcgatgttttttccgatgcggatagtttggaagatgagaaagaaacgcgagtaaataaaaaagcggcgcaggactttgatcgggattttgccgccagcggctgccgcaccatttcagaatatttatggaaacattgccgtaatgatgctggccaagtggattttcgcaatcggtcgcaccgaggcgttctgcggctcattcgccgttgtcatgttgaggatgaaacgaaaaagattttggcgcagcaggggcgtttttatcaggagttgtcggcggcggtgcgggaaatcattccgtccatcatttttgcacagcggttttttgaagatgggccgggcaataagaatgattcgacacgacgctatacgggtttcttggataagttggggatgtgccccttctatccgacggaacgaagagggtttcgcaatacggtattggcggatatttatgcggtcacgaatgctttatcccagtatcggtatcaaggtaaggacgggcgttcgggacttccctccccggcggcgcgggagattgtggaaaccacgcttcgggacgggaatatgaatcttacgatggccaaagccatcttgaaaaagcatcaagtatacttgttcaaaagcgcttatcttgacgaaacagcgctgggaaaagccattaaatttttacgccctatgaaacggattgccgaaaaagcgggcatcgcctggacgtccctgttgggggataatcctttaagcatggaagatccgccgcttctccatcagattggggaagtgttggcaaaatacaaaacgccgcggtaccgagacgacgagctgaagaagctttttaccgggacgaccatagaggggaatcaaggtttccgtaaggaattggccggtacttctttcagcggggcttccgcttgctcctatcattacatgcatgatgcgattgaagcttttatggccggggagatatacggtgattttcaagcgcggcggataaaagaaggaaacgaaacttccgctccgcaaagagagcgttatgcacagcttccggcacggctgctggagaaagatgaggatatccgggacaatccggttgtgtatcgcgccatcaacgaggcgcgacgggtggtgaatgccattgtccgtctctatggtgcgccggaatatatcaatgtcgaagtgggtcgtgatttggggcgcagttttgcagatcgggagcggtggaaaaagcagaatgactacaatcaaaagaaaagggataaggcggtggaagcgattgccgggcatttacactgcgcggcggataaggtcaagccgatacaggttgaacggtatcggctctatcaggagcaggacgggaaatgcctctacagcggtgatgccattgatcttaaagacgcgctggatccgaacggcgcttatgaaattgaccacatcatcccgtattcgttgattcttgataacacgctgaataataaggttttagtcaagtggggagaaaatcaacggaaaggacaacgtacaccgctgatgtacatggccgactcacaaaaggccgctttcctggaacgggtgaacagtatattcaataaaaaaggcagtccgtggagcaaacgaaaatatgaatatctcttgcaagaggctttggatacgcctgaagcccggcagctcgttgacgcgtggaagtcgcgcaatatcaatgatatgcgctatatcaccaagtatgtgtttaatctgtttcaacgctatttacaatttgccgccgatgggaaaggggagaacgccattcatgttcatgccattcgtggcgctatcacggcaaaatttcgcaagacatggctgaacccaaaaacgtggggaggacagaaagagcgggagagcaatcttcatcatgcggtggatgccgtggtactggcgaatttgacgccggcttatattgaaattgcttccgataatatgcggctacagcagattttccgccgttatcataagaaggaaagtacggaatatcttgattacatgaagcgatccgtccagaaaatgaaaacgtattatggtttttcggaggaatacacacgcttcctgctgcgttgtcatgaccgggttccgtcctttgtgcgccggttgagtgaggaagtcgatattcgctttaatgatgaagacgcggagcgatttgccatccaaatgaaggaattttctcgtcccgccgcacctgccactgacttctcataaagcggaacgtcggtatcggggggcgatcgcagatgccaatccgatcaaagtacgagagatcgacggcgtgccgcataagatctcgcgccagtcaattttgggcattgagaaggaggatttcaatacactttattctcatgatcgcttattgaaagatacgctctttcagatcttggatggggagatggaaatatcttccataaagcaatatttgaaagagcaggggcggaccgtgtttaccttac

SEQ ID NO: 3363 - DNA, 24383 bp, synthetic construct
  misc_feature 1..24383: note = Synthetic
  source 1..24383: mol_type = other DNA
ttggtgtttattacacagccaaagccgtttatccgtttttgaaagaaaagggacagggtgacatcgtaaatgttgcttccacagcaggattgaaaggcggaccaaatatgtcggcttacgcagcttccaaagctgcagtggtttcactttcgcagtcgatgatggcggaatggagaaagcagaatatccgtgtgattacattgactccgagcactatagcttcagaaatgagtattaatggcggtttgacagatggtaatccggacaaagttcttcagccggaagattttgcagaatgggtgagagacatcctgaaaatgaaccgcagagcgatgattgccaacggttctattttctcgactaatccgtaaaataaaaattattagggcagcttaatccgccttccgctcccaatcttttttgcaaacgatttcagtttaaatagaacttgaagcacacgcaaaaaaggatttccgctcaagtcgggctgcagtttcgccatagaagaagagtatttttccaatataatatttgtcattccataggaatctaagcaacttttagatgccaatggaatgacatttttatttaatattaaatctggaaaattagccaaatcagcgtgatattaacagatcgcacctacggagctttaattttttataatacttctaaactattaacagttatgctcctgtggaagctgtatatagtctcaaagagacgttctgctaatagaaaaatatacacctcaaataacaaagctccgtaggagcgacctgttatttgatcccttaaacattaaattcttaatctgttttattctttttatcgggcaacaatgattgataatctttatctttatcagaatcaaatcaaagatatgaagagaaactcaattttagcaatgtctgctgttttctttgcagcacaaatcaccttagtcaacgctcaaaacaaatccgaagaaaaactcaatccaatcgttcaaagttttgttaatgaagccaatgataattcccagttggaaaatatggctttcgaacttttggacggcatcggaccgcgtcttgttggaacacctgagatgttggctgcaaacaattatacggctgataaactgaaatcttggggaatcgatgctaatcttcagcaattcggaacgtggaaaggttggcagcgtggaactacacacgtagatttggtttatccaagaaccaaaactttatctgcaacacaattggcgtggagtccagcaactaaaaaagcagtagaagcagaagtcgtaattcttccaaaagtatcttctaaagcggagtttgataaatggttgccttctgcaaaaggaaaaatagttttgatggcacaatatcagaaagtcggtcgttctgatgaacagattaaagaatttgcaacaccagaattatatgaaaaactgaaagctgaaaaagaacaggctaaaaaagatttcgcaaattatatcaaaacaatcggttatgataatataaccttgccggaagctctggaaaaagcaggagctgctggaattgccatttccaactggacaggaattcacagcaccaatcgtgtttttggagctaagaccaaatcaattccaatgttcgatatcgatttagaagattacggaatgttgtatagaatggctgaaaaaggggcaaaaccgagaatcaaagtagatgcacaatccaaggttctaccagaagctaaatcctttaacaccatcggaatgataaaaggttcggaaaaaccgaatgaatatgtgattctttctgctcatctcgattcttgggatggagcgcaaggtgcgactgacaacgggacaggaactttgacaatgctggaaacaatgagaatcctcaaaaaatattatcccaatccaaaacgtaccattgttgttggactttggggaagtgaggaacaaggtctgaatggttcaagaggttttgttgctgataatccggaaatcatcaaaggtgtgcaggcggttttcaatcaagataatggaacgggtagagtagtagatatcagtggacagggtttcaaagattcttatgcttatatcggaagatggctggatgcagcacctaaaaaagtgaaagaccaaatcaaaagtacttttccgggaatgccgggaggtggcggttccgaccacgcatcgtttgtggcagcaggagttccaggattttctttgagttcgcttaactggggttacttcggttacacttggcacacgaccaaagatacttatgacaaaatcgtttttgatgagttgaagaacaatgtgattctgactgccactttagcttatatggcttcggaagacccagagtttgtaagcagagaaaagcgtgtgatgccgaatgatgacaaaggaactgctgtgaaatggccggaagctagagaaccaaaaagaagcagtaaagattattaatctaaaagaaaattgatattggagtttagaaatagatttcaatcaaaaataaataagaaagcgacaatattttttgtcgctttttttgattttgaaatttagataggtagtaatggtcggaaatgtacatatacttttttctctcggatataataacagacaagcaaaaacaaaattgccatagaaaaccaaatcatcagagaataataatccataatagatcttagcagaatctgattgtccagctgtgctttgaatactttttgtgttactagtggaactgttttctcctccaaaccattagctccgagataagccttaatctgattgattttatccagatagtattgattgttataattgatgtaatctaagaatctgttgtaatgcagattgtagtggtaaactgtaaaaaatttagtcaaaaaagtactggctgtgtatcctaaaaatcttataaccagcccaaaagcagcggcagaaggcgcaagataataaggaacaatactgatgataaacaaaatcgtaggaaccattataagcccaacacccaatccgtgtgcaaatagcggaatactgtagtagctttcatttcctgcattatccagcatctgtgtcatacaaatatgataaatcatcaatgaaacaaaaccgcacatccagagccagatgacgttcgattgtttgatttgatgccaagccgccaaagccacaccaacgattattccgataagattgaagacaaacatataagaaatatgccttgggtccatatgaagcacacttttgtaaaaactcccgacataggtaaaagagaatcgctcgatgtacataaagaacaagagcattgcgccccacagatattgtttttgtttgaagatagaaagatcaatataaggtctttttaaagttaactgacggactacaaataataatattgctaacccaaccattaccgaaacctgaataattttaacactttcaaaccaataatattgttgtccatagacactcaaatagcccaatccaattaatattacagccagcaaaataaaactgctcatatccaactgaatcaacgtgtgtcgatgaaatactttggcagaagagatacaaaccaaaacaataatcacgcttacggcgaacatcaccatcgatagtttatagacaatgtcaaaattatattggtcgatgaggtctgctgtgataaggttgttaaaagatgtcgtacaaagcaacatcccgaaaaacaaactataagtaacttctttggctctgtaagatttcataaatctgatagccatcgacatatagagattcacggcactcgcaaaaagcatcccttgaacaaatctgacaatgaaaaccaccaacagaatctgagatgagaacagcagataacaacacagtagttggaacaactgaaactggataaagtattgcttagaagtgaagtaattatagaatctcctctccaaacagtagaatgatgcaaaccctgcatagtaaagagaaatcgtaaactggatgtcatttggttctatgccgtaataacccgcagcaacatcctcattggccattggcaggaagaacataatcatattgggcaacagcaatgtgaaaagaatcatttttgccagccagttcggaacccattctttgaataatgtcattttctatgttggattaatgatgaggaatggtgacagtcacattcattccggagagtattttggagcgccattctttgctaaggttaatgatttctatcttaacaggaatacgctggactatcttcacaaagttccctgtagcattatccggaggaagcaaagaaaaactagagcctgttgcgggagagaaagccaatatctttccttcgaatttctcatcaggataagcatctaccgtgatagaaacttggtcaccaattccaaaatgtgaaatctgagtttctttaaaattagccataatccatttaggattttcatcattcacgatgtagcagagatggtctccaatatcaatcatttgtcctttttctattttacgtttcccgagtcgtccgttgtacggagcagtaattacggtataacttacgtccagatttttgcgttgttttacctcattcaaccgtgatttttcggcacctatgatggctttttcttgattaaggtcttctgctttttcttgtgcaactctgtaatgttgttctgcttgtgataattcacttttatagatgttaagattagcttctatctgttccagtttttgtgcggtggcagatttttctttgtatagttgtttgtatctctcatattccagattttctttccatacttttattttggccgcttctatagcttgataagcttcttttgcttcggcttccagcgtttgtctttgctggttcaagacttgggtgttggcattttgtttctggagttctgcgcctacttggttagcatccagtttatattctcggctatcgatgatgaataatgtgtcgcctgctttcacttggtcataatcattgaaccgcacttctcttacatagccactcactcttgcaatcacaggattaatgtattctactacctgagcgtcattggtggtttcattatgaaggaagtgatagatagagatggcggcttttatcataacaaaaagcacaaaaatccacgccacagcagaggtgaatttcactaaggttttacgatgagatactttcattttatagggttccggtttcgtattttagagagtagtagcttttcaggacattcattttggattgttccagttcaaattgggcttgcacttgcaatagattagcatccaaaaggtctgtgataagagcggtctggttgaaataagcatttttcagaatcctcgcattttcattggcatattgcagattttgttcaaagactttttcgtgtttcagagattcgtcgtattcgtaataagctttgtagattcgggttcgtatgttatcattggtgaattgatgatgaagttgggcagaactcaattctattttagcttcctgaacttgatgcttgttgtggtagatactgctgatgtcataagaggcttgcagacctacaagccccaaactgtaccaattggggttgtagttataaagaaacacttgcggattggcaaattggaaagaacctatcagacctattttaggataataattacctttatcaagttttaattgagtttccgccacttgggtgtgttgttcagataattctgcgtcgtagcctttttccagagctatttcgatgtagtcatctactgataaagttgttgtttcttctttaatagacgctatttctggttcaatgatggttttgtcatcttcaccggttaagacattgatctgttgttgcaaaacgatgatgctattctcaatctctgtgagtgtcatttttcttttactaagttccagctcggtgcgcagaacatcactttccaggatgattccggctttgtagatgttttttatttcggaaagctgatgttctttttctgcaatatcgttttgcattgtgtttttccattggtattgcaaatgcaggtctataaaaagattggtggctttcagcttggtaaggctgatgagtttttctttatcagttaccgagatatcagaaagaatcttagccagtttgatttcgttttttagtttgaaaccatcaaagagattcatatacagattagtctctgtgttgtaaagggtgtggatgatgtcgtgctgagcaggtttgtgaagaataccattcacatagacaggcatattggaggcgtgtcttatagaacctgtgatacttaagcttgggagctgattagattgagcttgtttaattttggtttcggctaattgtagtttcagttgttccagtgcgatttctttgctgtgggcttcaactttactaaagagttgaggaagcgttagttgttgttcttgggctttcaggaaaggctgacacaaacaggtaaatagggctagaataagcctgtattttttacaaaacattttgcgtataattttaaaatgcaaaactaaaggcttttgtttgatgtaattttatacaaaatagactaatttttgcttgttcctgccatttttatttacctttgagtatgaaattattggatatccttcaagagatagatgactcacccaaagatgtttatctggtgcacgagcggtttgagcggcattatgatatgcatactcacaagcgtgaccagttgagttttgtagaaggtggtgtggcgtatgtcacgatagagaatgagtatctagtggttccggcaatgcactttttatggattcctgcaggggtccctcataagcttaatgtgtcacatcgcgccactcagttgcattctttttatttcaaaagttcagagaaggctttttacaaagatttgggaatctatcctgccaatcgactgattatcgaattgattaacttttcccaacgttggtctcatcagtttgtggactataatgagccttacgctgctgcacttttttctttgtatgacattcttcctttgatggcagagcagcaaatcaagcttcagcttcctacttccgaacatcccaagatagagcaggtcttgcagtatatccatcagaacttccatacgccgttgaccttgaatgaaatgactgagcagttctatatgagtgagcggagcttctgcagattattcaaaaaagagcttcatatttcttttattcagtatctcaagacatatcgcattatccagtcgattagttttttacagaagcggaaagattactctatcgagcagattgccaatgcaacgggctacgaatctctcgcggctttcagcaatgctttttacgaatatacagggatgcgaccgtcgcagatgcggaagatgattacttaaagctttggtagcagataaaaatagaaatgtcccaacaataggacattttatcatttaataaaagaagtattggcgctgggttttcatcagaaaaccatagtcagctggattctctttctggcttcatccacttccgtcactttgacctgcacgtgttggtgaagctttaccacttcattcacatccgagacaaaaccatctttcagttgtgagatgtgtaccagaccactttctttaatgcctaaatttacaaaacatccaaacgccgtaatgttattgacaatgccgggaagtatcatcccgattttgacgtctttgatggattttacattcgggtcaaattcaaacactttggcggcttttcttgggtctagtcccggtttttctaattcttttaagatgtccttaattccgagaattccaatatcattggtgacgtatttttcaggtttaattaaacttattttttctttattggcaatcaaatcagtgatttttatgcctaaatctttcgccatttgttctaccagtttataagcttccgggtgaaccgccgaattatccagaggatttttagcattatgaattctgacaaatgcagcagcctgctgataggctttctctccaagtctcggaacttttttcagttgtttccggtctataaatgcgccattttccgaacggtaattaacaatattttctgccatcttttccccgattcccgaaacatagctcaataaagacttgctggctgtattgaggtttattcccacggaattaacgcatttcattactgtagaatccagttcgtttttcagtaaggtttgatctacgtcgtgctgatattggccgactccgatagattttgcatcaatcttcactaactctgccaacggatcagaaagacgtcttccgatcgaaaccgcaccacgaacagtcacgtcatagcttggaaactcatccctggcaattttgcttgcagaataaaccgaagcgccggcttccgaaaccacaaaaacctgaatcggtttatcaaaagcgatctttttaatgaaaaattcagtttctctgctagctgtgccgtttccgatggaaattgcttgaatattgtacgcatttaccatagagcgtatctttttcattgccatgccgctctcattttgtggggcgtgcggatagatattttcattatgaagtaagtcgcctttctcatccagacaaaccactttgcagccactcttgaatccgggatcgattgccaaaattctcttttctcccaatggcggtgcaagaaggagctggcgaaggttttccgaaaatatttcaatggcttttttatccgctttctctttagcttcttgtaatgtttcgttggaaatagcaggttctaataatcgtttatatgcatcttttatagctatgataatctgtccggaacactcattattagatttgatgatggctttttcaataaaatcaatagcctcagctttctcaattacaatgttggtctttacaaaaccttctgcttcagctcgcagcattgccaagagacgatgtgagggaattctgctgaggttttcttcccaaccaaaatattgggaaaatttctgcgccgcttcatcatcttttttagttttcacaacttttgagctgataactgcttttctctgaaaaagacgtctgatatttttgcgaacatacatattttcattgatccattctgcaataatatctctagcgccttgcaatgcatcttcttcagaattaacattttgattaatgtattttgacgctaaaaactgtaagtcgtcagatctttggcccattataatttttgcgagaggctccaaacctttttccttagcagtgtctgcttttgttttttttctttttttaaaaggtaggtatagatcttcaatctcctgaagattaaagctgttttctattctttgttttagatcctctgttaaagaattttgttcttcgacagatttcagaatggtctcttttcttttaataatttcttcgaattgtctattcagcttagcaatctgctcaatctgagtttcgtccagatttcctgttgcatctttcctatagcgggaaataaatggaattgtgcaatcttctgaaagcagttttatggtggcagtaatactgttatcggagatgtttagatgttgctggatgaatgtggtcgaggtcattaactagaaatattaaataaaagaaggcgagttgccccgccttaaatgttttcacaacggaataatccttattgtgaattgctttcaaaattattgatacaaatatataaaaaaattctaatccaatcgtgttttttgtaatgatttctatgtaaatttattaatttaggaaactataataatacaaatatgaagagaattttaggactggatttggggacgaacagcattggttggacattgttggagatatatcaaaaataaacttacaatttaaaaaaaatggcaactacctgaagcagttacctagaaaacttttctacggcttatagccttgttgtgaattgtctttcgattacaaatgtataaaaatattttaataaacaaataacttatggcaaaaattggattagatataggaagttcctcattaggatggtttatcagtaaaaataaaaaaggcgttatcacttttgaaacgggtatgtccaaagggcaatctggtggatatacatcacctaccaaggaccgtagagaagctcgatctaaaagaaatttgattagagctagaaaatatagaaaatgggaattattgaaagttcttttgaatgaatatgttcctttaaatgaaaacgagttaaatgattggtgtcattaccaaaaaggaaaaagaagaaagtttcccgaaagtgacaaatttttaaaatggctagcttgtgattttacatatcaagatggtgtaaaatataaaaatccttatgaattgcgagtaaaagctttggatgaaactttgagtaagcacgagtttgggcgagctttgtaccacttagttcagagaagaggatataaggatattggcgagacagaccaagagaccgaaaagcaaaaagaaagaagaaaaacgggtggctttcaaaatgctttagatacaaacagaacaatcgcggaagcattgatagtagagtttttagataaaggcgatcgtgcaagaaatcaatatccctatagagaggaatataaaagtgaattggaacttatctgcaagtcgcaagggttttctgttataacaaatgaaaaaggagattactcagatgattttgtaagaaatctttggaaagcaattatctggcaacgacctttaaagagtcaaaaaggaaatattggaaaatgtactttagaaccgtcaaaactacgatgtccagtttcacatcctgcttttgaaatttttagggctttacagtttatcaatacaataaaatactttgatgcagataataaaaaacaaagtattgacaaggaattaagagataagctttttataaatgtattcttaaaaaaagattctaacttcatatttgaggatattaaagagtttttaaatatggaaactaaaacgattaaaaaatacaattatccgattaatcctaaaaataataagtatgatacttcaatagctggaatgccaatttgtaaaggtcttatttctttgcttggagatggaactcaacaagctttactggaaattgaaaattttaacattggcaatgcaccaaaaattaagaatggatattctatttatgatatatggcatattgtttttgattttgatgagcagcatttaggaaagtttgctgtagaaaagttaggaattgataatgtaattcgaaaaagaaaaggcgaagatatttctatatcgcctttagtagaattaaaaagaaaatttttgcaaggctattctgatgttagtctgaaagctatctgcaaaatcattccctttttaaaagagggatatttatacaatgaagctgtggtacttgctaaaattcctgaattaatgggtacaaattggcaatcatctcaacaaatgattttagatattctgaaagaaagtaataagatttatcaagagaagtcaatggttgcttctatatcaaataatttaattgataagcataaagggcagacaagatcaatgatagatggcagtgaagagcaagtatttgcttataaagatttctcttacacactcgcagaagatgatattgagcaagtaaaaatcgcttgcattaatcattttggtgataaaacttggaatgacatacaaaacaaagatgaaataattcagaaagtaggtttagaatatcaagagtatttctatgatgaaaaaagagcttacagaaagacagaaacgcttacagaaattttcaactctctattaaatgaaaaaaatatcatactcaatggtgagctttatcatcattctaacagagagaatttatacaataagaatttaaaggttaatttcaaaactggagagaaatatctgccaaagtacaaaaatacagaaaccgagattctgccgcttccttttattgatagtatcaaaaatccaatgttcaataagtcaatgagtattgtgagaaaacttttaaatgaattaattattaatggagatatagatcaggaaactgaagtgacagtagagcttgcaagagagctaaatgataataatgtacgagccgccattgaaagatatcaaaaagaaagaagagataaccgtgagaaaatccgaaaatttttagaacaatataaccaagaagagaaccgatcaattaacatagaagataatattcctttgtttgaactgtggacagagcagatttttgaagagactgaagacgaaagcaggaataaaattcagaacaaaaacagattagatatccttagagaaaaagaagatgtaaaacgttacgaactatggactgagcaaaaaggtcaatgtatgtacactggaaaaatgatttcgatttcgcaattattttcaaacgaaattgacatcgagcatactattccgagaagcattttaccagataatacattggcaaatcaaactgtcgcattttcaaaatacaaccgagatattaaaggtgcaaaaactcctttttattgtgaaaattattctaaagatactccgtatggaactagcatttcaccaaggcttgatagttggagaaagctgagagattattataaaagtcagtatgaatccagaagacgtgcaaagggagcagaagatgaaaacacgaaaaataaaagaattcaagataagcattactataaactacattttgactattggaacgataaagtaaatcgttttgaagccgaagaaataaaagagagttgggctagaagacagttggtggatactcaaatggtaagtaaatatgctagagaatatctaaagctttactttaaaaaagtggctgtacaaaagggtagtgtaacggcagatttcaggaaaatatttggcttccaagagcaggatgaaataaaaagcagaaataaacatacacatcacgctattgatgcagctgttctaactatgattcctaccaacagtagttatagggaagaaattctaaaagaatattatgcagcggtagaaaacaaagacaaacgtaaaattgatgaaataagaaagaaaatgattcctccttatttcaatgttcagtcattgataaatgaaatagaatctacaacgctgattgttaattatcaaaaagataaaattctgcagcaaaccagtaaaactgtaagaaaaagaggagcaattcaatatgtgaagaataagaatggcgaatttatattagatgaaaatggggataaaatcataaaaaaagcaaaaggagattcgataagaagttctttgtatgcacaaacttatttgggaaagatacgggatgttgaaagatatgccgataatcaacctcaaagagaaaataataactggaaatacaagcagggtaaggatgaatttatatttgttaaaagagaaaatatctcgaaagtaaaagaatccgataaacttattgaatccataattgatcctaacatacagcaattggttaaagatcagaaaagcaatgcggaaataaaagacttccaaggaaatataattcgtcacgtacgaataaaaaccagcactggtagagaagtaaaagaaagattaaattatcgatcaaagtatgattataaaaataagttttattctgaagcaggctctgttccttattctattttagcgcagaaaattcataatggtgcaatcaaaagagaattgattccaatttcatcttttgaaattgctaaagaatttaagaagtatgggaattttgttattgaaaattttatttccgaaaagtatcctgagtttgatcaatgggataaaaaacaacttctcaaaaccggtcaaaaagtaatagtgctaaatgaagatggcgattttgaaaaaagactaaatatagatttccagcaaaagagattatttgtaataagtcaactttccgaaggaagtatttggctgaattatcatttaaatgcactatcaaaagatgaagttaaaaaatcaattgcattcatcaaagatgaaaaattactagaatttgaaaaagagtataatttgccggatattattgaggatgtcaatattcaagataataaaaaacgtagggaagactttttgaatcgtaaatttagatttgatacgattggaaatagttacagattatcacgccttgttgaaacaataggtttggagaaaacaaatgaagtcaagaaagaattggataaatataaagcaattccgtcgacaattgagatagaaggagaaacaccactattaaaaatgggaaaggaaaaatggaattttctttttgaaggagaagattttgaaatttcacttgacggtaaaattaattgggaagctaatttatgatcactcgctccatctacataggcaatcccgcttatcttaagctcaaagatgaacaaatgtacatcttggatgccttatccaatgaggtaaagggcaaagtacccgttgaggatctcggcttgctaatgctggatcattttcagatcaccatttcgcatcagttgattcagaagatgatgggcaataatgttgttgttgtgagttgtgatgcgcatcatttgcctcacggaataatgcttccgttgtatggtcatacggagcattcggatagagtgaaagatcaattggaagccagcgagcctctgaaaaagcaattgtggaaacagacagtagaatgtaagatcgaaaaccagaaaaatgtactgatgaaactggggaattattacgaaccgatgattgaatatcagagaaatgtaaaatccggcgatataaccaatatggaagggattgcggcgcagcattactggaaatacctcatcagtctggattttttgagacagcgttttggagattcacccaatcagtttttcaattttggatatgccgtgctcagaagtattgtggcaagagccatcgtagaaacaggcttgcttccggtgttgggaattttccacaagaataaatacaatccgtattgccttgccgatgatttaatggaaccttatcgtccgtttgttgatttactcgttatgcagtggctgaaaattcatccggataccgaagaactgacgaaagaatttaaagcacatattctccagattgcaaccaaagatgtgcgtattgatgataaaacaagaccgttgctggttgctgtaaaaatgaccacctcatcgctttacaaatgctacacaggagaaaaacgacaggtttcttatccggaattgatgtaatttttttatggcagctttatccgcctgtagtttatcctgagcggagttgaaggattccactcaggtcgggctgcaaacgttatgacaaacaaacaatagtcaccaaaaatgaacgccgaaaggtttaatgcatatcgaattatgtgggttttagtattatatgacctcccgaccgaaacgaaagcgaatatgaaagatgcaaaccgtttccggaaagctttgattgatgacggatttactttattccagttttcgatgtatgtgcgtcattgtccgagccgcgaaaatgcagaagttcatatcaaaagagtaaaatttatgcttccgaaagccggaaaggttgccattatgtgcattaccgataaacagtttggagacatcgaaatcttttttgccagaaataaagaagaaccgccaccgaccttccaacaactcgaattattctgaattttaaatcctgagaacaaaaataatctactgaaaaccagtagattattttttttgaggttgtccttcatcacgaagataataatttttgaaagcaattcacaactgtgcttggatagaatcagctgacgggaccgttgtccttcatcacgaagataataatttttgaaagcaattcacaacgtaagatatagcatccataactgtgtttttgttgtccttcatcacgaagataataatttttgaaagcaattcacaaccggtgaagatgacgattataaaaagcgagagttgtccttcatcacgaagataataatttttgaaagcaattcacaacatagaatatcgtgtgagcctatcggtttctgttgtccttcatcacgaagataataatttttgaaagcaattcacaacgctttcagctctacgagcatttctctcagtgttgtccttcatcacgaagataataatttttgaaagcaattcacaaccttagccatttctaagtttattaagagcaagttgtccttcatcacgaagataataatttttgaaagcaattcacaactttctgacttcctacttttttggaatagatgttgtccttcatcacgaagataataatttttgaaagcaattcacaaccagaagtgcgtcacaacagagttcaaccaggttgtccttcatcacgaagataataatttttgaaagcaattcacaactctgcaatggtatggggcatcaacaggttggttgtccttcatcacgaagataataatttttgaaagcaattcacaacctaggtgtactctttttgtttaaatttgccgttgtccttcatcacgaagataataatttttgaaagcaattcacaacgttatttctggagtcacaatgtgaaaaagggttgtccttcatcacgaagataataatttttgaaagcaattcacaacttgaagttgtagatgggtttcaccgttacagttgtccttcatcacgaagataataatttttgaaagcaattcacaacgaacttttgcaaatgcgttttacaagggaagctgtccttcatcacgaagataataatttttgaaagcaattcacaaatggattgtaagttttgatgcggaaggaagttatatcatgtgaggaaggtagtaatgtttaaataaatgctaactattagccattaaaaataacttgaaatgattgaaaactgttttttgcggtattattcttttcattttatttaattaaatccaatgttaataaaatccataatcagccttgacttacataaaaaaacagcctgtacatatttacaagctgtttttattttttcagtggaaagaaaacttagtcaagaggttttctgccagagataatattaaacaataccactacaacagcgattaccaataatatatgaaccagataacctgtactcattcctggtactacgcccagcattcctaatagccatactacaatacaaatagcagcgactaaccataatagacttctcataattttattttttagtgtgattgatgagatactaccacatactgtgcctttttgtctcagttgtaaaaaaaatattttattgttgagaatattctaaaaggagagccaccggaaaatgatcactgtaaccaccgatatatcttgatccggagtaggttctcaaagggaattgactgtttttcctgtctttgttgcaaagtttggcgctattgaaaattagggctttgtgagagcctttttctatctcggaaatgagaatttggtcaaacaaaacgccttttttaccgtgaaatgtagaaaatacgttgtgatcaaaaagtatttcaaaaggattcttaactacagtattattttcatcgtctttgcagatttccttaattatattttggtcaggattttcgttgaagtctcccataataatgattttttcacctttcttatgtagttcaacaaagatcgaccttaattttttcaggatatgatttcggagatttttcttgatatcaagatttctttttgaaggaagatgcaatacaaatacttggaatttttcattactaaccattacctcagcctgcaaaacatctctggaatcgaactccggattatcatccagaggaaactttaaaaagctgaaacttcgcaaagtgcacttgtcaggatttagtaacaatgcaacgcttaaaccgcgagagtcgtcggatttttgataaataatttcatagctctgcaatggagaatgttccttggtcaaatcttccaaaacccgcaggccgccaatttcagctaagccaataattgcaggcaactgacctagatcgtcttttataaaacgaaaagcctgacttattttcctgaccttgagttcatacttataatcatcccaattgtaaagaacgggattctggctgtcattaggaggaaaaaaattctcgacattataaaacaggaatatttctttgttcatcagtgattgttaccattttttccggcgtgtgtagataaaggtaatcactacaatcagaaccattaaacccaaagtaaaataatagccgtttttatgatgcagttccggcatattgtcgaagttcatgccgtaaacgccagcaataaaggtaattggaaggaaataaacagaatagatagccaaaagtttcatcacctggttggctttctggtcagaaagagccagaaacatggaaattaggtttactgtctgcgcattcacgtggtcaaaatcagcaatcacatccttttgcttgtccagaagatccatcacttctacctcttctagatccagcgttttgaacttagagatccattctccggatatattcaggattcttgtgttgagtccagattttcttttcagcttataaaggcgtcttatctggttgctttggttggtgtttttaagaaaaatttcattctcgattgcatccataatttccagcagattgcggctttcatcatcaaaagttttgatgattttcagagccagcctcagcgccagatgatctctggatatgttctccggattttcttttttcaactcgtcgcaaacctcgtaaatgcttttgctttttgaccggtgtgtggtgatgattagtttaggaagcaggaaaatgcccagcttactactgatgtcgctgatgttgttcaccgttcttctttcaagatccgtagattcccttgccaggaaaaatttcacatcgcccacttcttcaaactttggaagatggttcggatctatcgtatcttccaataaaaggtaattaatatgataacgctcgtgcagaaaacggagatcttcatccgtaggcgcagtcacatcgatccattcccattgcgcagtcttatatttttgttcaattggcataaaacaaaactaaataaaatcttcctatcaattcaaatttttattggggcagctattccgtcctccattcccgcttttttcagttattgctaacatctttgtacattttgtagacattttatccatcgcaataacggaaaaagagctccattcaggccgggctgcgtacaattctgcctttttttataattcacattgtcagaaaataattactggtaatgagtgttttattcgtttgaattctctttggtctgcgatttattttagagagttatgtaataaataaaataattacttttgcggaaaattttaattcataaaaatgtttaaaagtgtgattgctggtgttgggcattatgtgccagaaaataccgttaccaatgatgatctttctaagctaatgacaaccaatgacgagtggattacggaaagaacgggtataaaagaacgaagacacaggaaaaaccgtatagactcggaagaaacaacgtctttctatggtttcaaagcgtctgaaattgctctgaaaaatgcaaatcttaccgctaaagatatagattatatcgtttttgcaacactctctccggactatttttttccttgttctggtgtgcttttgcaggaattgctaggatgtgatactattggcgctttagatgtaaggaatcaatgttctggatttgtctacgcaatgagtgttgcagacgcattcataaaatcaggattatataaaaatgtattggttgtaggagctgagattcattcgtttgggttggacttttcagatcgtgggcgcggcgtttccgttatttttggagatggcgctggtgcggttgtcctgtctgcaactgaaggcgatagtgcaagaggtatactgtctgtcaatatgcattccgaaggaaaatatgccgaagaactggcggttaaatttcccggaaccaaactcggctggagtgatgtactgattactaatccggattctatcgcagctgaagatatctatccagtaatgaatggaaattttgttttcaaacacgctgtaacacgcttcccggaaaccattatggaagcgctccaaaaagcaggaaaatcaattgaagatttagatttgctgattcctcatcaggccaatattagaatagcacaatatgttcagcaattattgaaattaccagatgaaaaagttttcgttaatatccaaaaatatggcaatacaacggctgcttctattccaattgctttgagcgaagcgattcaggaaggtagaatgaaacgtggcgatttggtttgtatgtcggctttcggaagtggtttcacttgggggagtgttttatttgagtattaactcgacaagaatatttttacatttatttaatagaaaaaatatctcgcagagtttgctgattaagcagattaatttctaaggatttatattcagctaaatctgtacaatcagcgagaaataaaaagagctattcgtttcggaatagctcttttcttattgattaattttctgaacaactttgtcagacaatgttttcaattgctccatttcttcgagattaagattcattgcttttgctaattcaattgggatgcaacttgcattttctttgagttttacacctttttcggttaaattaattttgacaacacgctcatcttccttgcttcgttttcgttccagataaccttttgattctaatcttttcaaaagtggtgtcaaagtaccgttgtccaattgtaaaatttccccaacttgattcaccgtcacatcatctttttcccaaagcgtcatcatcgtgatgtattgtggataagtcaacccaatatttttaagaataggacgataacactgcatgatttcgcgatgtaaaacataaacagaaaagcaaagttgtttgtctaattttaataaatcttccatattgagttttagattgaagtcctctattcaaagataaataattttgctccctttagtgttgggaaaacaagtttaatcgttgctcacagtcagcttaacttcgatatttcctcttgttgcattagaataaggacagacttgatgtgctttctcaatcaattcctgagcttgttccaaagaaaccccggggatattagcgtgcaattctgcttccagaccaaatccaccattctcgatttgaccaattccgactttggcagttacggttgtttcgccagtttcgattttgctttgtttgataaccaagttcaatgcgctgtcaaaacaagctgcatatcctgcagcaaaaagcatttcaggatttgcataatcatcatttgctccaccaagaccttttggcattctcacttccaaatccaaaattccgttatcgctttttacgtttccgtttcttcctcctttagctgtagcgccaattctgtacaatgttttcattttgttgatgttttaattattttttgatgagacaaatgtatggtgtaatattgtattgttcacaatataaattaaagtttacatcaaaatcaatcattgatgtaagctataaatgttttttttaaaactcaattttagataaaatcataatatctattatccattccaaggatttttggccattacatttattttgcaggaagttatccataaaatatatttgtcttttgcaaaaattttgaccattgaataaatcaagattgataaaatggcagtttttaatcttgacttaaatattttttttaaaattttaaataattgaaaattagaattttattgtttcttttgttagaaggatgaaacaaaatatttttttggcacggaatttacaatgtctcctgtgtaaaatttaaaatttaaaaatatgaaaactttaaagcaattggtattaggtctaggaattttggctggtggagtagtttcagctcaaagtgctgatatgaccaatatgttcaaagtaggacttaatggtggtgtatctacaggtggtaatacatctgcaaatctaggagtagatctttcttatcagaatctgattacaccaggttttggtcttggtatcgcaacgggttataaccattatttcggtaaaaacgctacaattaataacgtaaaagtagataataatgacttcggagtaattcctgttgcagcattgtttagagtttatcctaaacagacaggattttattttggtgcagatctaggttacggtttcatcgtaggtgatgataaggtagcaacaagttctaatgcagcttatgctaatgtagatagaccagacggtggattctatatcagaccagaagttggataccataatcgtgactggaacttctttgtacagtataacaaaactttcactggagacaaaggacaaatcgcagatcaagattacaatgctggagcaattggtgttggattcagctacaacattcctttaggaaaataatcatctgttgagaaaagcattctgctttttataatagagcaattaaactatgacttaattaacgcctgcattaacttgtgggcgttaattttttaaaaacttatcatacatcaataccaattgtagatgattctatttacatttgcattgttaaattaaaaaaatgaaaaaagcattattattaggcgttttgatcagtggattagcgtttggacagaccaaaaaactgataagttctgatgtacactggtggggttataaaattgcaaaaacagaagcatcttcacacgatggaactgtgaatgtaaaatctggaaatcttgttcttaaaaatggttctgtagtaggaggacaatttgtcttggatatgacaaccatcaacgcaacagatctttctggtgaatatcaaggaaaactgaatggtcacttgaaaaacggtgattttttcgaagttgaaaaatatcctacagctacttacaaaatcacttctgttaagaaaaacgcgagcaaagattacaatttcgttgtaaacgggaatcttacagtaaaaggaaaaacaaatccggtttctttccctgcaaaaattactgctaaaaacggtgtggtaactttggagtctgataagttttcttttgacagacaaaaattcgatgtggcttacaaatctacaatgcaagacgttttggtaaaagacgatgttgatttgaaagtgaaaatcagcgtaaaataattaccacagtaatacagaaataccaagagcagaattttttctgctcttttttttattttaaatttgaatgttatttcaagtcttggctaagttttacgtctttgcgaaccttaaaaatgttttcaattaattcaataaatctttgcggactttgcgttcaaaaatcaagttaatgaaactatacaccataagcgggctcggggctgatgagaaagttctggaaaaattgactttcaatccagaaatagaagtcgttcacattccctggctcattccggaagaaaatgaagattttcatcattatgttagtagaatggcagatacaattgatcattctgagccattttaccttttgggatattctttcggtgggatcatcgttcaagaaattcataaattaaaaccagcaaaaagaattgtcattttaggaagtatccgttgcgatgctgaaaaatcaaaactgattctcgcaggacaaaaaactaatgccgtaaaatatatcccactcagaattttcaatggaaatacaacattgttttattcattttttagaaaattatttgacccgaaaaatccaaaacttacccaatatttccgagtaaaagacccgtattatctcaaatggtctatggataaaattaccaagtggaaattcgataaattgccggatgtcattcagattatggcagataaagacattgttttccccatcaaaaattccaaaccagatttcgtgataaaaaatgccacacatctttttccagttaccaaatcgaaagaagtttccgagattttaaagaccatttttgtgtagaatttttatttgggcagcttaatccgccagtagtttgtcctgagcttgtcgaagggctcccgctattttttgccagaagtttacaattcaaaaagaaacggagtaatccgcaaacagtgagctccactcaaatcgaggaacgagattcatcgattcaaaaagggaaataaagaaaatgagataagtcgggctgcgcttcaccagaattaacattggtctcaatatcaggatttaacaaaataatatttcagatgtagataatttgtaaaaatcaattac

SEQ ID NO: 3364 - DNA, 24383 bp, synthetic construct
  misc_feature 1..24383: note = Synthetic
  source 1..24383: mol_type = other DNA
gcattttagacattgctactattttattttctttagtttcgtaataatatccttctttgggggtaacctttataaggctaacattggggtcgtctttgccttcaaaccatgcgttggcaaaatttgaccaatatttatctatcaaagttttatcttgagtagcaacagcatttcctttcaccattatatattcatattttgaattgttcataaagtacaattccacatgattgtcgtgttcaatttcttgatttttgtccgacgtaatatcactcagaaaccaaagatttccttgctcatctactgattgtaaggccattggtctgctcgaagaattttcaccaattaaggttgtgaagaagcatgtacctgccccctctgcaatgtctttaattttactgatagccttagttccgctaagattttctgttggagattgtgcatttcccatattgttaattttcattttaccctacaattactatgcctttagtaatttaaattattaatatttaaattatgtttttgttaacaaaaaatcattttttcggcacattaattgatgttttatgataataaagatgttttgtattccattaattccactgtgtattccacagtttcgtcataaattaaacttttaaatgataattatgaaagtaaccaagaagtccatatctaatgggaaaaaatcgccttctaaaatcaacctcaaaaatagcagctaagaaagatgccgctacaactttggatgatctttttgaaagttgtctgaaagatgcactattggcagagaatgccttgtacaaaaccttacccaaaatgtctaaaaatgcaacctcaacccatctgaaaaaagcactcgatgaccatcgaaaggaaactgctgaacacataaaaatattaaaagcagtattcaaatctattggaggagtaaaagatgaagaagaaaaatgcgatgccatggcaggtattatagaagagggtaaaggtgttttagaagaaacacagcttggagcagtgcgtgatgcaggtattatagctgcttgtcaaaaagccgaacactatgaaattgcatcgtatggaactatgatttcttatgcgggattactaaaacatacggaagccaaaaaattgcttaattctatcttaaagcaagaaaaaaatgcggacaaattactttcgaaattagctacttctgaaattaatattaaagctaaataacacacgcacacacaacactaaaatcttaattatggaaaaaaatacaggtaaaaataatataaaaactaatcagctagaggagcatctgactgataatatagggaagatattaaccaccaatgacggcgttcctatttatgacaataacaactctttgaaggttggtaatagaggaccgtctttgcaacaggatcatatctatttcgataaaatgatgcattttgatcgcgaaagaattccggaacgtgtggtacatgcgagaggaagtgcagctcatggcgttttcgagatgaaagccgatatttcgcaatatactactgcacagttccttcaaatgggagtgaaaacaccagtgttcgtaagattttcaacggttgcaggtttcaaagggtctacagatttagcgagagatgtaagaggattttcggtaaaattttataccgaggaaggcaattatgatttggtaggaaacaacattcctgtgttttttatacaggatgccatgaattttccagacttagtacatgctgtaaaaccagagcccaataaggaaattcctcaggcggcttccgcacatgatacgttttgggattttatttctttaattccagaatctgcgcacatgattatgtggataatgtcggaccgtgcaataccacgttctctaagaatgatggaaggtttcggagttcacagttttaaattggtgaataaagaaggaaaaggcacttttgtgaaattccattggaaacccaaattgggagttcatggcgtagcttggaatgaggcccaaaaaatttcgggctacaattcagattttcatcgcgaagaattgtgggaaaatatcgacaaggctaactttccacaatgggatttgggcgtacaattgattccagaagaggatgaattaaaatattccttcgatatcttggatcctacaaaattggtgcccgaagaattggttcctgtaacaattttaggaaccatgacgttgaataaaaatccagaaaatttcttcgcagaaacggagcaggcagcctttgatccaggcagattggttccaggaatagatgtttctaatgatcctctattgcaaggaagaattttttcttatatggacacgcaaaattatcgtttgggtggtaatttccacgaaattccaatcaatagatctgtaaaccaaaaatccaacaatcagaaagatggaagttctaggatagatatcttgaaaggaaatgtttcttatttccccaacagccaagcttcgggatgtccttatcatgctatgttaaaaggtgaaacgggttttcagtcgcatcaggaaaaaataaatgctagaaaagtgcgtgagcgttcagattctttcgcagaccatttttctcaggcgaggttgttttttaattctcaatcggaaattgaacaattgcacatcattaaagctttatcatttgaattgtctaaagtaaaagataccaaaattcgagaaagacaagtcgctattcttaatcaaattgatcccaaattagcgtcagaggtcggaaagaatttaaacattacgccgccaaaagatttagatgaattgacattgcaatttgctcgtcagaatcaccctaattatcctattgaaggcaaaaagctagaggttgaaaaatctgaagcgcttagcatgaaagtgaaagacggtgaggggagtatcgcaactagaaaagtagcttttttggtagcagacggagtttcgaaaaaaagtatagatgctttgaaaacaattttagaaaatcaaggggctgaagctgtactcattggagaaaaagtgggggctttaaaatttgaagaaggagaaactaccactatcaaaaacacgtataaaactgatgcatctgtactgtatgacgcattgtacacgcctaatggaccatccgttgatacgctttataataatcctgattattttgaatggttaaaagatgcatttatgcactgcaaggccattgcttttgcttcaggaactgaaaaattaatagaaaagtctgatataaaagtggataaaggaattattcaagaaaaagatgctaaagaatggaccacacagttgattgatctcatgaaaaaacaccgttattggcaacgtgagctagatatggaaaaataacaattaaaaacacaagtgatgatttatcattttttgtctagggaaattaatctctgattgacttggaaattttgcgaaaaaatctgaaacctatatcagtaaaaaatgttttcgcttttcctttaaattcctgttttctctaaacttagtctccgatgcagaatctaaaataaagctactgagatatagtaaaggcgtataaaagtagcataagattaagctgctgcaagagttttctttctaaatttgtattgaaatttcgtcgtggcgcacgtcgatggataaaggcttaggtattttttattgataatatagaaattgtatttgttctattttttatttctatatttctgtaaattaaatatatagcagtttctagtcttaacgataatcattgatagatttcacatgtacatgctaaattttgcctatttatttttagtttatttccttaaaaacagcatttgtgaaaatttagtgaagtttctatattcaaaatacatgataaaacaatcaataatttggaattgagcattttagatttgaaattatcttttaaaactttattcttgcataattatttacttgactaatattttcatgatcgatttttccatcttgtttatattacaattttcggcacggtaaaaaataaaattactaaaacaaccgaagctaaagtgtagtcatgtatcagacgattatccaaaggtttttggcaaaccacgaaagaaaaaaacaaactggccagctttacggtattttttcttttatatccatacttaataaacttattccgaaataaagtacaaaataaatcaaatcttaaatggaaaaggcctatccaatagcagtaaaaaatattcgggagatacacagccattttttgaccgttgaatatgctcgtataatacatttcgcctataattaaggttctaaaatagctattccgttccgtattttaaggctctgttttattttattttatttttctgtgtctgaaattttttaaagaaataaagcaccaaaagaaattgagtatatccataaacggcatcttcaatgggaatggtaaacattcggattcccaaaaaatcttttggattataattaacaaccggattatcaataaaactcccggttaaaatcccattaactgggaaaaaaccaagcataagaagcgtgaaaaccaaagatgctttagtcagccaatttactttggcaataaagtgcaaatagatcaatgcaagtattgtaactatggcagtaataagggtgtaaattttatctgtatgcaataaacctacaaccgacaaaataataatgtttataaagaccaatagattattaaaagcacttaaaacttcccaattgtaatatttgtcaatggtgtaataggtgaaaatgcaagaaaacggaataaaaataaaaaataaaatttcttccaaaggcaaacccaaaaatgaaattccaagtgtgtaatttgtattaaaccaccatactccgtgagccgtaaaccatacgtcccaagcgataaaaggaatagcaacaatgatggaagcttttaggaatgaaccaaattgatgatggaattgaattcttttgtcaaaagatgctataaaacaaatgatgatcgtgaaaaacaatatgagtgagtaagtataagccatcatgatttcgccgattttaaatacatttttaaatacttaaaaggcacatataaaaatccaaaacattcgccttcttcttttcctaaatgtttgtgatgttgtttgtgagccctgcgaagtgctaaaaaataagagattttggtgtgtgtgaaaaactttatccgttgatgaataaaaatatcatgcacaaaaaagtaagccattccgtagagcataatacccaaccctataaaaaataaataattgaaattttctaatgatccaaaatacatcaacgcaatagtgggcactgcaaaaatgacaaaaaaccaatcgtttttttctaaatcaccttcgttgctgtggtcatgatgatctcggtgtaaaatccataaaaatccgtgcataatatatttgtgaataagccaagtggctccttccataagcgtaaaaacaagtattacaattaatatttccattttattttttgttgaatagtttttctaaaatatgaaaacggtaattaaatatcttatctaatttcttttttacaaataaacggtgagcaagatttcctaaaagtccgaaaggcaattcataatcgactttatctatcattaacacacctttttcgttgggtataaattcgtggcgatggttccataatttgtaaggccctttttcctgaaaatccgtaaaactcttattaggaattacctcggtaattcttgttttccatttcaagggaatgccaagcaatggtgaaacagtgtaatcgattatcattccttcaaatattttatttgttttttgttcagataacacggtaaatgccatatcttttggagttatttttggtaaattcatcggtgatgaaaaaaaatcccaagcggtttgtaaatcacaattcaattgttgctctctgtataattcatgtttcatacttaattactttaagagtgtttcaatatttttttgaagaaaatctgaattgatgttttttttgtttttaacaagaaaatccttgtcttcttttaagttgttgttgtaccccaaaaaagaaggtgaatttttctgaaccgaaaaccggatatatctaatttcaacattttcaggctctttactgatcgctaattcaatgtttttctttcctttcttaaaagtactaaatttgctcatcggactaaaaacatgatgagcccaaatcgtttgataaccgcccagataggctaaatataccgctgatttttcttttgattgctctaattcttctatcatccttttgcacaaatttttatcctgaacggctatactgtagtttgttcttactaaatttatatctggattgttataagaaactagcatcataaaaaccaatagaagtgatataaaaactttcattataaaatggctactttataacgtacataacttttaaaagcaacaaaaactttttgggaattggacactctaatccgcttatttaatatttctgaggaagttttgcttttgatttttttaaacaaggagatgtaatacttatacgccaaatacacaccgaacatagacgaatttggaagttttttgatgccaattaatgcttctttaaattcttcttctatttctttttcaatttgacactttatgcaattatcaaacacacccatatcaacattgggaaaataggttctgcctaaaatttgataatcatcttttagatctcttagaaaatttatcttctgaaaagcagagcctaatttcattgcataaggttttagctcttcaaatttctctttttttccttcggtaaaaacctgtaaacacatcaagcctacaacttcagcagaaccaaaaatatagtcgtggtacaattctgaattgtaatcaattttttgtaaatccatttccatactattgagaaattgagtgataagaacgggatcaatatgatacttatgcactatttcctgaaaagattgtaaaattggattaagtgagatcttttcttctaaggcgttttgagtttccattctcagtctttttagcaatttttctttatcatattcatgaaaactatctacaatttcatcagccaatctcacatagccataaattgcataaatagcgttgcggatcgaaggttttaatgccaaaattcccaaagaaaaactcgtactgtatttctgcgttgttatcttacttactgagtaagaaagttcgtcaaatagttgtttcatattattcatttcttaaatttggttgcttcgtttgctacaatcttccccgaaataattgatggtggaacgccagggccaggaacagtcaactgaccagtataaaaaaggttgttcaactttttatttttcatttttggcttcaaaaccgctgtttgatgcaacgtatttgccaagccatacgcgttcccgccgtaggcattataatcttgcacaaagtcgtttacgcaataacttttctggtactcaattttggaagccaaagcattaattcctgtatgtttttcaattctcgaaagcatctctctcaaatacttctccctaatggctttattgtcgtgcatgtctatagccaaaggcatcaacaaaaacaagttttcttttcctttaggagcaacactatcatctgttttagatggacaacaaacatagaataggggatttttgggccatcttttttctccataaatacaatcaatatgctcgtctaaatcgttttcaaaaaatagtgtatgatgcttgaggtgagggattttttcgttaatccctaagtagaatattaaactggagggggcaaaagttctactctgccaatatttttgtgtgtaatttcttaaactttcatctaaaagcgtttcggtgtgatgataatctgaagaagctatcacggtatcaaaagctatattttcaccgtttatttgcaaagaagttattttgttattgtttgtattgattttctcaaccgttttattaaagtgaaagataactccttgcttttctgctacctgctgcatcgctaatactaattgataaaatcctcccatcggataatgagttcctaacgcataaccgccataattcatcaaactatacaaagcaggaatattttggggcgaagcacctaagaaaataacagggaattccatcagcgttcttaatttttcatctttaaaatatttgccgacatagcttctaaaatttgtcagtaaatctagcttcaatgcgcttttagcaattttaggcgatacaaattctaaccaactgtggcaaggttttgtaacaaaatcctgcattccaacttcgtatttgtactttgccgattgcataaatttctccaattgaactccagcgcctttttcggttttttcaaacaggatttttagctcttcgaaattttcaggaatactcattttttcatcggaaaaaatcatttcaaactgagggtttaaggaaatcagatcaaaaaaatcagaagtttggtagccgaaatcagcaaaaaaatcttccataatatcagacatccaataccaactggggcccatgtcaaacacaaatccttcttctgtggtgaattgtcttgctctacccccaggttgattgtgcttttcaaacacatggacttcatagcctgcttttgctgtataagcagcggccgataatcctgaaaatcctgaacctattatagctaccttttttttcatttgtttaaatttttaaacgcttcttccaataaattctctgtttcaatatttttatcataaatgttttgatggaaattatcaagcttatcgagtaagcgtattaattccattttttcattttgcgataaatttccagtaacgatggtagttgcttgccgtattttatccataatgttttctaaggattgaagacctgttttcgtaatggaaatcactttgctgcgtttatccgttttagaattccgttgttcaatccaaccctgacttatcaaacgattgataatctgcattccgacgggtttttcatgtacatttttttttattaaatctatttttgacatttcgccaaatgcttttaaattaataagataaatgaaatcttcctgcgtagaaaaacccgacccaataatggcagacttggaatagcttttcgcatatctgttcagatgaacaatcaaagtattaatataactttccgcacttcttcccgtttcttttcctacccaagtgggttcagtaacgatagtgttattatttttcgatatccagcttttaaaaccatgaatagatgcttcaaaaacaggattgttttttgtttcagtctcaaattcctcaactaaatttatgatctctttgattaaaagataattcattctgaaagtattttagagtacaaatatacctttttattgtaataaaagaatataaatatacttttatttaattgtttagtcattttggactatttaattattaggtggtaggagaaaacgaatcttataactggttatcttttgctcaacaacttcttacttacaatgtttacacctacaatttagaaagtaataaataacaaaaattcagctccgcaggagctgaattttttatttaacaaatacagttttcaatattttcaattcttacagtttttacgattcactgcactttcgaattttataattgatttcgttttaagaattcacgaaacatttagacataaaaaaaggcgagttgccccaccttgaatgtttttatttttataggtgatatttacggaaaaccgtaatgatattcaataaattattattatttttaacatttctcaaaaatgattttttaaaaaaatttaaacaaaaaaatagcaactgccgaggtagttgcttagatatctaagaatagataatttttctactgcttatagccttgttgtgaattgtctttcagttacaaatataataaaaataaatttaaaaacaaataattatggcaaaaattggactagatattggaagttcgtcagctggctggtttatagataaagataaaaaaggagttgtaacatttaatacgggaatgactaaaggaacttctggttatacatcacctacaaaagatagaaggaaagatcgttctaaacgaaatctgataaaggctcgtaaatatagaaaatgggagttgttgaaagttttggctgagaattatgctcctcttgctaaaaacgaagttttgaattggagttcataccaaaaaggaaaagaaagaaagtttcctgaaagtaaaaagtttttgcaatggttagcttgtgatttcacttatgaaaatggagaaaaatataaaaatccatatgaattaagggtaaaagcattggatggaaaattgacaaatcacgaatttggtagggtgttgtatcatttggtgcaaagaagaggctataaagatattggagaaacggacaaagaaactgaaaagcagttagaacgtcgtactgaagatggctttaaggcttctttggaaaataacaggtctatagcagaggctttactaaatgattttctatataaaggaagacgagcaagaaatcagtatcctcttcgtgaggaatatgaaaatgagttcaatttgatatgcagtaaacaaggttactctatagaaaagataaaaaaagaagtttataaagatgattttgtaaacaaactttggaaggcgataatttggcagcgtcctttaaaaagccaaaaaggaagtattgggaaatgcacattggaaccttcaaaattacgttgtcctatttcgcatcccgcttttgaaatttttagagcattgcagtttattaataccattaaatattttgatgtaaataacgaaaaacaaagtattaatgaggagttgaaaagtttgttattcaataatttgtttttgaaagctgaaggaaattttaaatttcaagaagttaaagatttattggataaaaaaacagaaaaaccttataaatacaattatcccatcaatcccgaaaatggaaaatatgaaacttctatttctggaatgcctgtttgcaaaggtttgatttctttgtttggagattttgcgaaaactgccattggagaaattgaacaatataatataactacagcaccaaaagtaattaaaggatattccatctatgatttatggcatatagtatttggttcgaatgaacagtacttagcaacatttgcaattgaaaaattacaattagaaaatgttaaaagaaaacgaaaggacgaacattacgaaatctcaccactagttgaattaaaaagaaaatttctacaaggttatgcagatttgagtataaaagctattaataaagttattccgtttttgaaagaaggttttctttacaatgaagcagttgtacttgcgaaaattcctgaattattgaaaacagattgggaagcttctcgaaatacaatattggattgcttgtctgatacgaataaagaatacaaaagaaaacaacttattgcaaccattgccaataatttagtagataaacataaagggcaaactagagcaatgattgatggtaacgaagattctaccttcgcttataaagattcttcatatctattaaaagatgatgatgttaaaagtataaatgaagcctgtattgctcattttggggagaaaacttgggagaaatttgatgataaagataatctgatacggaatgttggtcttgaatatcaagaatattttttcgattcaaaacgagcgtataggaaagtacctacaataactgaaatattcaaaacatttctttccgacaaaggaattaatctaaatggagaattgtatcatcattccaacagagaaaatttatacaacagaaatttggtaaccaatttcaaaactggagaaaagtttcttcctaaggataaaaataccaatatagaaattcttccaattcctcttattgatagtattaaaaacgcaatgttcaacaaatcgatgagcgttgtaagaaaactcttgaataagttaattattaatggcgatatagaccaagatactgaagtagtgattgagttagctagagagttgaatgataataataagcgaattgccattgaaaagtatcaaaaggaaagagcagataacagagagaaaatacgacgttttttgcaacaatacaaatcagaggaaaatcaatctttaaatgttgaagataatattgcgattttcgaattgtggtcggaacaaatttttgaagaaactgaagatgaaaataaaaatatcgtaaagaacgaaaatagaataaggatattaaaagaaaaagaagatgtaaaacgatatgagctttggatggaacaaaaagggcagtgtatgtatactggtaaaatgatttcaatagcacaattgttttccaatgaaattgatgttgaacatacaattccaagaagtattctaccagataatacaatggcaaatcaaacggttgcatttgcaaaatacaatcgagatataaaagaggcaagaactccgtattattgcgaaaattattcaaaagatacaccaaatggaacaagtatttctccaagattaggaatttggcgaaagttgagaaattactatgaaattcaatataatagcagaaaaaaagcaaaaggaccagaagatgaagctgctaaaaacaaaagaattcaggataagcattattataaaatgcattttgaatattgggatgataaactaagtcgttttgaagcagaagaaataaaagacagttgggcaagaagacaattggtagatacccaaatggtgagtaaatatgcaagggaatatctaaaactatatttcaaaaaagttgcagtacaaaaaggtagtgtgacagcagatttcaggaaaatttttggatttcaggaacaagatgaaattaagagcagaaataaacatacccatcatattgtagatgccgctgtacttacaatgatacctacaaatagtagttacagagaagaaattttgaaagaatattactcttcagtagaaaataacgataaaagaaaattagctgaggtaagaagaaagttaattccttatggttttaactcgcaagatttaataaaagaaattgaaaataccactttagtagttaattaccgcaaagataaaatcttacaacaaacaagtaaagttgtacgacatcgtggcaaagttcagtttgtaaaaaataaggatggagagtatgttaaagatgaattaggaaataaaattgttaaaatagctaaaggtgatacagtacgaagttcactttttgcgcaaacctatatcggaaaaataaaagatgtagaaagagatgaaaataataaagcaaaaagagaagatggcgattggaagtacaaaacaggcaaagatgaatttttatttgtagttaggaagccaattgcagatgtactttctaaaattgaagatattgtagatcctgtcattaaagaacttgtaagggctcaaaaaaataatcaggttattaaggattatcaaggaaatattatacgtcacgttagaattaaaactaaatcaggaagagaagttaaagaaagacttaactatcaatccaaatatgaatataagaataagttctattcggaagcaggttctgttccttatgcaattttagttcaaaagattgttggagataaattagaaaaagacttgattttagttccttcttttgaaatcgcaaaagagtataaaacaaaccataagtttgatgtgcaaaattatcttcgtagatatgacgctactaacaaattaaattattcgaaatgggataaggcacaattactaaatgtagggcaacgagtaattgttttaaataatgatgaagattttgaggaaagaaaaaatatagaatttcaaaagaatagactttataagataacacaattggctgatggaagtatttatttgaagtatcacttggaagctactgaggatggtgatattgataaaaatgtaaaattagaaaaagatcaaatagtttttgaatatgataaaaaatataaccttcctgatattattgaggatgaatcaataaataatgttgtagatcgaaagaaaaagtttgaaaaagacaaattttcttttgtaggattaaatgataacagactaaaacgattaattccttttatgggaatagaaggagttaaaaaattaaagaaagaacttgaccaatttaaaaaacagtcttcgtttatcgaggtagaaggtagtacacctttacttaaaatgtcaaaagaaaattggaattatctttttgaaggagaggatttcaatatgtcaatagacggacaaataacttggaaaaattataatccatgattacccgctccatttacatcggaaatcccgcctatctgaaactcaaagatgagcagatgcatattttgtgtccccaaaccaaggaaacaaaagggaaagttcctgtggaggatttgggattgctgatgttggatcattttcagattacagtttcgcaccagctcattcagaaaatgatgggcaataatgtggtggtcattagttgcgatgcgcatcatttgccacacggaattatgttgcctttgtatggacattccgaacattcagaccgcgtaaaagatcaattagaagccagcgaaccgctgaaaaagcaactgtggaaacaaaccatagaatgcaaaattgaaaaccaaactgaaatcctaaaaagattagggaattatttcgagcccatgctcgagtacaaaaataatgtaaaaagtggcgatagcaccaatatggaaggcattgcggcgcaacattattggaaataccttatcagtcacgattttttaaggcaacgctttggcgattctcccaatcagtttttcaatttcggatatgcggtgctacggtcaatggtggcgagagctattgtagaaacgggtttgctgcccgttttgggaatctttcacaaaaacaaatacaatccgtattgtttggcagatgatgtgatggagccgtatcgcccttttgtcgatttattggtgatgcaatggttggataaaaacccagaaacagaggatttgactaaagaatttaaagcccatcttcttcaaatcgcaaccatggatgtgcaaattgaagacaagaaaagaccgctgatggtggctttaaaaacaagcgtttcttctttgtataaatgttacacgggagaaaaaagagtaatttcctatccagaattgccatgactatttttgctacttgggcgtgcccctttgtttttccaacgcttaaaccaataaggttttccccagcacgaaaacaaagggtcggtctacgtgcagtcgctgtgttcggctcgtcggctgcgcttcgctcctccgcctcacctcacacgagctccaacaatgcacttcgccctcacgcgaaagactgtgtaaaacaccattttcaccatgaattccgaacgatttaacgcctatcgaattatgtgggttttagttttatacgatttaccaaccgacaccaaagccaatatgcgggccgccaatcggtttcggaaaggtcttattgatgatggattttcgttgtttcagttttccatgtatgttcgtcattgtcccagtcgagaaaacgccgaagttcatatcaaaagagtaaaactcatgcttcccaaagctgggaaagtagccattatgtgcataaccgataagcaatttggagacattgaaattttctttgccagaagcaaagaagaaccaccgcccacctttcaacaactcgaattattctaatttttcgaatcctaaaaacaccaaaaaaccaccgatgaacagtggtttttaccttttgaggttgtgttgtattttaaagcaactcaaaaaatgaaatcccggaagggaatgctgcggacgggattcagtgaaatgcaaaggtgaaagtataggctgaactaaagcaattcaaaaatctttaaaaatgtaaatgattaaggggacaaatcccatttttaaaatcctataaaacaaataaaccttctgaaaaacagaaggttaagcattgaggttgtgtcgtatctcaaagatactgaaaaatgaaagcaattcacaacggttacccatgtattttcttttatcaaaaagttgtgtcgtatctcaaagatactgaaaaatgaaagcaattcacaacgttggaatatcaattaaagttcctgccatagttgtgtcgtatctcaaagatactgaaaaatgaaagcaattcacaacggtcgtgccacaggtaaaacatccgactttgttgtgtcgtatctcaaagatactgaaaaatgaaagcaattcacaacataaatatcgagctctatattttgcgcttggttgtgtcgtatctcaaagatactgaaaaatgaaagcaattcacaaccaccatgtgaaagttgggtaagtgttaatagttgtgtcgtatctcaaagatactgaaaaatgaaagcaattcacaacgcatatagctacaaacgtatgtaagggatagttgtgtcgtatctcaaagatactgaaaaatgaaagcaattcacaacgccatgtttttgtatgattaatcttgtttggttgtgtcgtatctcaaagatactgaaaaatgaaagcaattcacaactcagaaagttcttttaagattatttttttagttgtgtcgtatctcaaagatactgaaaaatgaaagcaattcacaacgatagtacatcacttccgaaacttagtactgttgtgtcgtatctcaaagatactgaaaaatgaaagcaattcacaactgtgggtaaattgaagtattaccatttttagttgtgtcgtatctcaaagatactgaaaaatgaaagcaattcacaacggatgaagctgaattaaaagattggggtatgttgtgttgtatcccaaagatactgaaaaatgaaagcaattcacaactttttcttcatccgtaagcgttacagcgatgttgtgttgtatcccaaagatactgaaaaatgaaagcaattcacaacttacaatctattttaaaacggttaattcccgttgtgttgtatcccaaagatactgaaaaatgaaagcaattcacaacgtggttttggttctgtccaattcataatgtgttgtgttgtatcccaaagatactgaaaaatgaaatcctatatgggaatgcggcggatgggattcagcgaaatgcaatggaaaacagtataggctgagctaaagcaattcacaactctttgtcccaatattcctcataataatcagttgtgttgtatcccaaagatatcgaaagaaatctgtgtaattattaattatatctcgtaaaatgatagactaaaaattggtatacgtagttataagtaaaacttaatctaaagaagaattagaatctagtaacttttaacaaaatagttcgcaagcttttggcttgcgaacgttttttaatttgttccagttctttttggctcttttatttctggccaagtttgtccagctggaagtactcttttctgtttgctggtttgttcaggatcttcagaagccatataggctaaaacagctgccgcaatgacattatttttaacttcatcaaacattattttatcataagtatctctattggtatgccaagtgtaacccgaatatccccaattgagtgaacttagagaaatgcctggaattcctgccgcaacaaaagaagcatggtcggacccaccgccacctggtgtaccagggaaagttgtttctatgtgcttgctaactttttttggtaaagccgccatccatcttccgagatagtcataggcatcaacaaaaccttgaccttggatgttgaccacgcggccagtcccattgtcttggttaaaagccacttgcgtattgttgataatttcgggattatcttttacgaaagctcgagagccgttaagtccctgttcttcgcttccccaaagtcctactataattgttctcttgttattgggataatatttttttaaaatacgtgcagcttccatcatagtaatggtgcctgttccgttatctgtagcgccttgtgcgccgtcccaagagtcaaggtgtgcagacagaataatatattcgttaggcttttctttaccaggtattgtagcaatggtattaaacgattttgctttgcctaagtttttagattcagtattgatttttatttttggttttttatcattggatgccatccgataaagcataccataatcttctactgcaatgtctatagttgggattgtcttggtcttggcaccaaatatacggttggctcccatgattcctgtccaattagaaataacgatgccagcggcacctgctttttctaaagcttcaggtaagctgttgttgtcgtaacctgtgtgcttgattaaatttttaaaatcttccgtatcttttgctcgttgcgccttgaattgctcgtacaattctggagtagcaaattctttaatttgatgatctgggcgtccagatctttgatattgggaaattaacactatttttcctttaacgtttttcaaccaattactgaattcttgtgcgttattcactcttggtaaaaccacaacttcagcttctacaggttttttagtagatggtgaccacgccaactgcatggcttctaaactttttattctaggataggtcatttcaacttgagtgatgccacgctgccaagaagcccattctccgaattgttgatttttggcttcaataccccaagatctaaatttatcaaccgaccaattgttggcttgctccatcgcaggagagcctacaagacgtggaccgataacatccaaaagctcaaaagcaagttgctctagctgcgagttattattaacttcgttgacgatgctttggacgatgggatctagtttttcttctgagacatgttgttgtgcaaaaactatttgtgaggacaatagcaaagttgcaaaactcgttttcatgttgattttcatacactattcttttatacatttaagttttcaatttaagaattaaatgcgagcttgcaaagcaagtttttattttaaacaaattcctatttttgattaaaattatgaaatcaatgaatgtttttccacagttgaaaaccaaacgcctagtcatgaacgcttacaaacctacggatgcggaagtagtgttttttctgcgctctagtcccgaagttacaaaatacatcaaacgagatccttatacaagtattgaacaagccgaagattttattaaaatgataagccatcagtttgaaaatgatttatcaataacttgggcgctgcgtttcgaagaagaaggcgacttgttggggtcaatttgtttttggaatttttctgaagatcgcaaaacagcagaaattggttatgatcttcaacctatacatcaaggaaaaggctatatgacagaagcgcttaatgccattattaaatatggtcgggaggaattaaaacttaatttaatagaagcctttacaagtacatataatgaggcctcaataaaattgttgacgaataatgattttgtcttgaacgaatcaagagtcgatgacgacaatctcgataacttaatttttgaaatgaaaatcccttgacttttgatcttaattgtcttgatttaaaatcgatttaaataaaatttaaaaaaataaaattgaagtttaaacttcgttgggcggatcgtatttttcaccgataagccttgctgtcaccatcgcggctaccgtatctcctgtagcattgagaacagttgctaaagggtcaaccaatgtcccaataatcattactgctgggatggcttcttgcggaagttgataggccgaaatcatcaacatttctccaatgtaaccgccatttggtatgcctccagccaccacgctaacaaaaacagttattcctaatgcaataatcaggttgttgaacgtgaaaaactcccaacccaacaaaagaaaagcgacatatattttgacaatcgaagatatggaagaaccgtttttatgaatgcttgttccgatggggatcacaacattggctacagatgcaggaatacctattttccttgccgcatccagattgacaggcattgttgcaagactactacaagtacttatcgctgtaaaactcggtaaaatattatttctccaaaataaagtgacaccttttgaaccacgaccaataaaagcataaagactgaagaatacaaaaaagtacaccaacccagcaccataatatacagccaaaggtttggcgtaaaagccgaccagttgtggccccaaagtgccgacttgataagcaatataagcacctagaccaattggcgcagctttcattattaatagaagaagatttttcataatctcgttgccaccttcgataaagcttttaaaggttttcaccttttctggattggattgtcgaatcgaaattcctactaaaaaagaaaaaatcaaaagtgctaacatattttgtcgagaaagcaacatataaaattcaccaacactaaagaaacgtacaatgcgatcgccccaagattctgtatcggtaatattttccacaacaacagttgccatgttcccagtaggacgttcggtaggaaaaagataaacagcgacaatactaaataaagccgcaatcaatacaaaagccagaaaagtaaacatcattgcaaaaagaattttgccaagtttgttaccttgttcgatagaagatacagacgttacaattgcaaaaaataccaagggtatgacagttacaaaaagtaaattcaggaaaatatcaccaactggtttcagaaaattaaccatgttgggaaaaaagattcctacaatactaccgaaactaatccctattaacaaaagaatgatattggaatagctttgccaaaaagtcgattgggtaaaagacattctttaatttttttatataagtaaagttaattatgtttttgattattgaactatgctaattaatttataaagaaattaaaaaaaatgatataacttttctttttaaaattaatgatgagaaaagccttataaggaacagttattgcaagtctgttgtggtcgatgattaataaaataacctagaaatatggcatttatagattactacaaaatacttggtgttgacaaaaatgctagccaagatgacatcaaaaaagcttaccgcaagctagcgcgaaagctacatcccgatcttaatcctaacaacaaagaagcggaaaaaaaattcaaagatcttaacgaagctaacgaagttctttcaaatccagaaaaccgtgcaaaatatgataaatacggcgaaaattggaaacacggcgaagaatttgaaaaagctcaaaagcaacaacagcgtcaatattctcaaaattatgacggtggcagttttcaaggggctaactttggagagaacgacaatttttcggattttttccaatccatgtttggtgcttctggtggcggttttggacgtagtagccgaggtagcgcatctggaaaattcaaaggccaagatattgccgcagaacttaatttaactttacgtgatgcagcaacgacccaccaacaaacttttgaaatcaatggcaaaaaagttagaattaccattcctgcggggatttacgatggtcaacagataaaactgaaaggccatggaaatcctggtgttaacggcggtccacatggtgatttgtatattacttttaatatcgctgaagattccgttttcaaaagaaatggcgacgatttaaaaattgatgttaacattgatctttacacagctttgttgggtggcgatgtcatggtgccgactttggacgggcaagtcaaactgaaagtgaaatctgtaacacaacccggaaccagtgtacgcctcaaaggcaaaggttttccagtttataaaaaagaaggtcattatggcgatttgttcgtgacttaccgcattgatttcccaaaagaactcaacgaaaaacaaaaagaattagtagaacaacttaaaaatagctaagcatgtctgacagaatatccatagaagaaattattagaatttataaagttgattacagttttgtagatgatctcatcgattcagaattgttgcatccccagattgataacagcattcgttatatcgttcatgatgaattgtcggatttcgagcgttttatcaattggcattacgacctcgatgtcaatttgcaaggcattgagatcattcatgaaatgttaaaaaaactaagacatttacaagaggaaaacagaaatctcacacaacgtttaggcataacaaagctagagtgggaagatgcggatgataatttttaagtttttgaaatttaaattaaattaaaacaaaaatgcttgatattatcattgtaggcggtggtccaattggaattgcatgtgcgatagaagccgaaaaaaaaggcttttcttatctcattttagaaaaaggaagcattgccaatagtttgtacaattatcctttgtatatgcggtttttctcaactgctgaacgattggagatcgacgaaattccatttattacaagctcgccaaaacctggcagacaagatgctttagaatattatcaaggcattacacgtcaacgaaaactgaatattaaactttacgaagaagttttaatgattcaaaaagataaaaacaactttcaggtgacaacgtccaaaaccggatatttagcgaaaaatgtcatcattgcaactggtttttatgatatcccgaatttgttacacgtgaaaggcgaagatttacaaaaagtccatcattattacaccgaaccgtatccctatgcgcaacaaaaagttgtggttgtcggcgccagcaattcggcagtggatgctgctttggaaatttatcgaaaaggaggcgaggtgtcaatgattattcgaggggccgaaatagggaatcgcgtgaaatattgggtgaaaccagatattgaaaaccgaatagcagaaggaagtattaaagcttatttcaattctgagttgacagaaattactgaatctgctgttaaatttaaaaacgaaaatggagaacaagatattgaaaacgattttgtactcgcgttgacaggttatttaccagattttcaatttttaaaaaacgccggaattattttggaaggtgatgccgatattcccgtacatgatgataacacaatggaaaccaatgttaaatctttgtatcttgcaggcgtagtttgtggtggacgcaacacgcatttgtggtttatagagaattccagaattcacgcgaagaagattattaagcatattacaaattcttaatagcggtttgcccaactgaacttggtctggtttttgaatgttaaagaattgttaaaaaacgcgtatgaaaaactattttaaaccagtgttttggcttctttcttcagtttttgtttttattcaatgtaaaaaagaagaggctttggctgacaatatctctaggccttccgcaactttgcaaaccaatcccaacatacatgttgtgaagattgatactgttattaaaggcaaacaggttgagcttaaaaaagaaatcgagaagaaaattatccctaacaaagattttcattacacagctttgccttacaaaaaaaatgattctttagccaaagacttcaaaaagaaatattccgcagaagaactttacacgattttggcaatcaaccgtttggataaaaaaaatctttatcgtgcagacactttggtcgtgccaagcgtagttgagaaagattttctccgttattcgccatttcctggcaatttgcctgtgttgaaagatgttaagaaatttgtatttttctcatatcctattcaggcttttggggtttatgaatatggaaatttgattaaatggggaccaacctctatggggaaaaagtcaacgcaaacggatcgcggtttacattttgcgaattggaaaaaagaagtttccatctcaacggttagcgacgaatggaaactgagatggaattttaatatcagcaatttcagaggaattggctggcatcaatatgaaatgccaggttatccagcgtcacattcttgcctgcgccttttggaaaaagatgccaaatggatgtacacttttgcggatacatggattcttaacccaggtggggcaacggtgcgcgcaaacggaacaccagtttatgtctatggagattacaaatggggcggcagaaaaccgtggtacaatcttatggaaaacccaaaagctaatgatatttcggtggatgatatgaccaaaattattgaacctgagctagaaaaaatcttaaaag

SEQ ID NO: 3365 - DNA, 24374 bp, synthetic construct
  misc_feature 1..24374: note = Synthetic
  source 1..24374: mol_type = other DNA
ttttaatacttgtcttttctccggtttatataaacgcacaaaacaatgcgtgtaattgctgtaccgaaaagcatacagagtttgatttttggattggtaattgggaagtgataaaacctgatggaacacctgcaggcacaaatgttatagataaaatacaagacaattgtattttacgagaaaactggacaagtgcaacaaaagggtatacaggtactagcaataacttttataacactacaaccaaacaatgggaacaactttggattgataaccaaggacagagtttgcacttaaaagggaatagggtaggaaatcaaatgattttaaaatcggatgttgctacaaacaaagctggtcaaccttattaccatcgagtgacttggactgctaatgacgacggaaccgttaggcaattatgggaaactattaccaatgacaattcagtaaccgttgcttttgatggtttgtataaaaaggtaaaataagtgctctaagaattgcttagtcttgtaaagcgaatacttttttaagcaaatcagtagtacgtgatgacactttatttctgatttctttttcctcaacagcaatcattgtgtaaacaccttttagtgcttcgcctgtaacataatcagttaaatcagggtttacgttattagtaaaaggaatgctgttgtatttattaataagatttgcccaaatttggtcagcaccaactttagtaaacgaattattaattacagggtgaaacttgtcgtacaatgcagtttgggttttgcctgttagatattgagtagcagcatcgtcattaccaagtaaaatgtttttagcgtcattaaaggtaatgtctttaactgcactcacaaaaataggagttgcttcgctaaccgcatcttcagcagctctgtttaatacttttaagccttcatcagcaagattatctaaaccaatatcgcgtaaggctttatctactttttgaagttcttcaggtaatacaatttttaccaactcatttttgaaaaaaccgtctttttgagtcaatttacttacttgtttgtcgataccttggtctagcgcttcgcgtaatccagatgcgatatcagcattgcttaaaactccaccagattgtggtaattggttaacaacatcttgcaattcagcacaagaaataagtgagaaaacagtaagtagtaagaatattttcttcatgatatataatgatttttgagtaatcaaagataactcaattgattaaacaagtatagttttaaaacgctaaaaatctgcatcaagaaaaaataacagtcttattattgaaaaccattacctttctattagcgtgaagttttatagcattagaaagtactattttttctaaatcacgcccttttgctattagatcgtttatagtgtaggtgtgggatatgtgagcaacatcttgtgctataattggaccagcatctaattcttctgtaatgtaatgacttgtagcacctataatttttacaccacgcttaaatgctgaatggtatggttttgcgccaacaaaagcaggtaaaaaagaatgatgaatattaataattttattaggatacttatcaataattgtgctagacacaattagcatgtatctagctaaaacaacaaaatctacatcatgagattctaataatgctagttgtttcttttcagcttctgctttgttatttctagttacagggacatggtaaaacggaattttaaaattatctgcaatcggttttaaatccttatggttactgaggaggaaaggaatttctaaatttaattcaccagaattataacgacctaaaatgtcatacagacaatggtcatatttagaaacaaaaacagccatttttggtttcttttctgaagagtagattctccactttagatgaaatgtttttacaagaccatttttgaaatccattttaaaatcttctaaagagaatgaacttgaagaaaattcacattccaaacgcataaaaaagatgtcttgttctctatctacatgctgatctaaataaacgatgtttcctctattattagctataaaattagaaactgaggcgataatattaggttggtccttacagtggatcaataatgttattttatccatgaaaacagtgttggttcaatagataaagttaaataaaatagggagttagggtagtttttaagaaaaattatttatgatagatttttgttagggtattttgatctataggttttataagataatcttcaacagatgtaattttaatcacttcttgatagtctttatcatcaacggatgaagttaaaatgtagattttaggattgtaattgtatttttgtctaaaagctttaagagcgctcaaaaaatcccatccgtccattacaggcatgtttaggtctaaaaaaattatttcaggtagaaaatgtatgtcttccgattgattttccataaaatcaaacatttcttttccattatcaaatagtagaatattttcttctttaatacctgtttttagtaagagcacctttgttactttcctaaaaatcatgttgtcatcaatgattgctgttttattcatataaatggggaagttttattttaattctaaaagcagtgcctttgctaggtgtgctaaatatatccattttaccgtttaactttttaatacaaagctctgtaaagtaaagtccatagccattcgagttatgacttcttttatgaaacctttttcgttttctaaataaatgttttttgaagaaaattaagttaataccagatccgttgtccttgtatagaatattgtatgtgttatttactttgtaggctgaaattgtgatttttaaatcaacattctctcgcttgtatttaaaggaattgctcaataaatttctaaacacagtatcgatacaatttttagataaaataacatcgtcttttatggaaatagttaaggatgtatttttgggtatggatttttctaaattggaataaatatattctataccagcctttatggatatctttttgtcatcaattaaatcttcatttttaataaaattgtgatattgcaccaaagagtttataccttgattaagtctttggatagaagtgttgaacatagtttgtacttcttcgttagtaaaaccttcgtctgaagttatttgttccgatactttttggagttcttctaaagctataataggttctcttaaattatgagaagtaagtgtagcaaagtcttctagataagagtttttcttctttaatttttgattgagctctacaagctctgcattcatggcatttaactttctgttgttgtttcttaatttggaggatttttttgttatttctatataaaatatgataaaattatatgagtaaaaaaacatatttataaaggaggacgtgttcagaaataatattataaaaaaggcagcttgtattactgtaataatattatggtaagctaatgcagatgttattactataaatagtattggtattaaaaagaagtatggaaaataagtataaggatgcgtgtttttagatgtaatttggtctaacttaatagggcttattctctttattaattttaattcaaaaagtgatatggaattcataaaaaatatcatagccgtattccaacttaaagtttcaaaaccgctaatagcattaagctcttgcatgtctaacaaataataaaagacggcaaaagaggaaagtatatataacaatccatttaccattaaaaacacaactttaaaccttctgacctttatgaaatataaagctaaaaaggctaagacaaacattataacagtaattgttgagcttagtttccaatcaataggatctacaaaatcaaagtatatcaaagaaagttgaatgagttggataaataggcctgaaaaaattagaatttttattagatacctttttttaatgaaataaatagttccaagtattagaaagctaatactggttataactttcattgtcgcattaggatttatagtatagcccgaaaaaatatttttaaagtcatggttaagccaaaagagtatgttaactagagagactagtagggtgactaaggcagttaatttataggaaaagaataaactaacactaagattttttcttattatactatgcatttgagtagcgcttcttaatacaaaacagtcttaaataattaaatccacttaattaaatgtagataattaaaataatataaacaagtgatttttagttatttagttaaaatgagtaaatgtagttgaattttagggctattgaaaaatccttttataaatcgcaatttttttgaattatccgtaaattgcagctcttaaaaagatagatttttacgaatggaacaaatcgcaccatacaaaccaaaacataaagtacgtatcgtaaccgcagcatcactttttgatgggcacgatgcatccataaatatcatgcgccgaattatacaagcaacaggtgtagaggttattcatttaggtcatgaccgtagtgtagaagaagttgtaaatactgctatacaagaagatgtaaatgcaattgcattaacgtcgtatcaaggtgggcataacgagtattttaaatatatgtacgaccttttaaatgaaaaaggagctggacacatcaaaatttttggcggaggcggcggagtaattcttcctgctgaaattaaagaattgatggattacggtattgctagaatctattcgcctgatgatggtcgtgaaatggggcttcaagggatgattaatgatttggtacagcaatcagattttgctattggtgaccagcttaatggtgaagtagcgactttagaagagaaaaacccaaaagctattgcacgtgttatttcgtctgctgaaaacttcccagaagttgctaaagaagctttagacgaaattcatgagaaaaataaaacgtctaaaacgcctgtattaggaattacaggaactggtggcgcaggaaaatctagtttggtagatgagttggtgcgtcgttttttaattgacttcccagaaaaaaccataggtattgtttcggtagacccttccaaacgtaaaacaggtggtgcgcttttaggagatagaattcgcatgaatgctattaattcaccacgcgtatacatgcgtagtttggcaacgcgtcaatctaatttagccttatcaaaatatgttaatgaagctgttgaagtattaaaagcagcgcactacgatatcattattttagaaacgtcaggtattgggcaaagtgataccgaaattttagagcatagcgatgtgtccttgtatgtgatgacgccagaatttggtgcagcaacacagctggaaaaaattgatatgttagactttgctgacttggttgcgattaacaaatttgataagcgtggtgcattggatgcgcttcgtgatgtgaaaaaacagtacatgcgtaaccaccaattgtgggatactaatcaagatgatttacctgtttttggaacgattgcttcgcagtttaacgatccaggaatgaatacgctttacaaagcgataatggataaggtcgttgaaaaaactgatgctgacctgaactcaacttttgaaatttcaaaagaaatgagtgagaaaatctttgtaattccaccaaacagaacacgttacttatcagagattgcagaaaacaatcgtgcgtatgataaaactgctaatgagcaagttgaggtagctcaaaaactatatggtatttataagactatttgctctgttgctaatgtcacttcgagcgcagtcgagaagtcttttcttgataaaaatggaattgaccaagatgagattctgaaacaagctcagactgacaatgatgattttataaagcttttaattgcagagtttgatagagtaaaactaaatttagatccttacaactgggaagttgtaataggttggaatgagaaggtcaacaaatacaagaaccctgtttacacatttaaagtaagagacaaagaaattaaaatagacacgcataccgagtctttatcacatacacaaattccaaaagtcgctttgccaaagtatcaagcttggggcgatattttacgatggacacttcaagagaatgtacctggagaatttccgtatacatcaggattgtatccttttaaacgaacaggagaagatcctgcgcgtatgtttgcaggagaaggtggtccagagcgtaccaacaaacgttttcattatgtaagtcaaggtatgccagctaaacgactatcaacagcttttgatagtgtaacgctttacggtaacgatccagacttacgtcctgatatttatggtaaaataggaaacgcaggtgtatctatttgctgtttagacgatgctaaaaaactttactctggttttaacctagccgatgtgatgacttcggtaagtatgactattaatggtcctgcgccaatgttgttagggttctttatgaatgctgccatagaccaacaatgtgagctttacatcaaagaaaacggtctagaaaaagaggttgaagcaaaaattgccaaaatatacaaggaaaaaggcgtagagcgtcctaaatataatggtgagctaccagaaggcaatgatggtttaggcctatttttattaggcgttactggtgatcaagtattgccacaggatgtttaccatgatataaaaacacgtaccattgcacaagttcgtggtactgtacaagcagatattttaaaagaagatcaagcgcaaaatacctgtattttttctacggaatttgcactgcgtttaatgggagacgtacaagagtattttattgaaaataatgtgcgtaacttctattcggtgtctatttctggatatcatattgcagaagcaggagctaatcctattacgcaattggcattgacattatctaatggttttacttacgtagaatattacttaagtagaggtatggatattaataagtttggcccaaacttatcgttctttttctctaatggtatcgatcctgaatatgctgttattggtcgtgtggcacgtaaaatttgggcaaaagccttaaagcataagtatggtgccaacccaagagcacaaatgttgaaataccatatacaaacttcgggtcgtagtttgcatgcccaagaaattgactttaacgatattcgtacgacacttcaagccttgtatgctatttatgataactgtaactcgttgcacacaaatgcttatgacgaggctattactacgccaaccgaagagagtgtgcgtagagcaatggctattcagttgattattaataaggagttaggacttgctaaaaacgaaaacccaatacaaggatcgtttattatagaagagcttaccgatttggttgaagaagcggtattgctagagtttgatagaattacagaacgtggtggtgtacttggagcaatggaaaccatgtatcaacgtagtaaaattcaggaggaaagcttgtattatgaaactttaaagcacaatggtgatttcccaattattggtgtaaacaccttcttgagtagtaaagggtcgccaacggtacaacctgctgaagttataagagctacagaagaggagaagcaataccaaatacaaactcttgagaatttacataagagtaatgataccaaggtgttgctaaaagcgcttcagcataaagcgattcataacgaaaacatttttgaagccttaatggatgtttgtaaagtgtgttctttaggacaaattactgaagctttatttgaagtaggcggacagtatagacggaatatgtagtgtatttttacaccttaagctataagaatcccgagtgtttgctcgggattttttatggagttaacctagatttaagtcggtataaagtcggcatatagttggtataaatatgacttaaatttggcttatgtgcttgttttttattaaattaacccttttaagagttgaattaacagtgatattatggcaaaacaacgaggtgttatattttttgaaggtactctgggaggtattaatttttactatagaaagggtgttcctactgctcgagtagcaggaggaggttttactagaaaggcaattaaaacaggtgctaatatggtgcgtgttagggagagtaataatgaatttgcaggctgctcgcaagtgaataaggtttttaagcaagcgctacgcccttttttgatagggtataaggatggcacgttgcatagtaggttgatgcagttgtttttaaaggttaaagattgtgattctgtttcggcacgtggaaagcgagaagttgctgttggtattgcttcagagcatgggaaacagttgttagagggttttgtgtttacgcctaaacgatcgggtttgttgccttgtcgttatgggtttgattggaatactttaacgtttagcgttaacgattttagtactgctatggctgggtttcctgaggatgctagctatatggaggtgttggtaggtgttatacgatttgattttgaaacgcatacgtatactcaggttattgaaacgcctttggttgttgagcgtgattttattggcacaagtttttctgtagtggtttcgggattgccttctggtgatggtgtgttgtttgctgttgctcgtgttgggttttatcaggatgtgaatggtgaggggtatttgttgtctggtggtggtgcttttggtattgaggtgttgggtgtgagtggtgtttagtggttagtgtttggttttttgtgttttgtttcatttttttttgagcacaatcttttgataggtttaaggtggtaaatgaaaaagtgctattgttcttttttgcattgcccaaaaaagaaccaaaaaagtctagactgactaattcttaactaaatagcctttgtaaaccttaaaccttctgatcttttcagcttcgctgaattcggacaggcagaagcttttttacggctttacttcgtctattttgaagcattaagaattagtaggtcgttttgttcctgcgatgcaggaattgggttgtctcagtacaggattagcttagcatgatagtagtgagaggtgagtggtgagtagtgagtattagggttgaaagttgaaaagcggtgttaggcatgagggataagttggtatttagtgatttaaaaggcacttcgacaggctcagtgtgacaattgggttgaaagttgaaataaggtgaaagatgatgtttggttatatgttcatttttgaggaaccaaaaacgaaccaaaaagtcctttgtcggtaggcatttcgctttacgcgaaccacacccaaaactttgcgggtatgcccacccaccggctggctccttcgctaaaatgattcactggatcatttttaaacgctcgtcccctaaattccaagcttttgtgtgttatttcgatacgcttctcgatactatttgctatcactgctgtgataccaaatcactcgaagtgacttgattcttgtttttgctagtaatgttttgattttttttctatttttactgtacttccctaaaaaaaattgatagcattttaactctgacctctagttggtaataggtagggtttttattgttggactctagagtaaatggtgttgattatttgaagctctagatgcatttggtataaagatgcctcaaattagaagttgaggtggcttaaatattttagtttacagattttgtgatttgagaaagagagttcataaaacatttaaataaaaaaggcgatactaattaaagtaccaccttggatgtttttgcaacggaataatccttattgtgaatttatttttcgggaaatggagtaaagatataactaataaaaaatggcaactaccagaagcagttgcctagaaagatttctgcggcttatagccttgttgtgaattgtctttcagactgtaaatatataaaaataaaatttaagaataaatggtaaaacttggattagatttagggagttcttcggctggatgggcaaaaaatgaagatggtgaaattgtgaaaaatggtgttgtaacctttaatacaggaatgtccaaagggcaatcaggaggatatgtttcacctacaagagaacgacgagaagctcgttctaaaagaaatttgattaaatcaagaaaataccgaaaatgggaattgttgaaaatcttggttcaaatgaaattagtcccattggaagaacaagaactgcagatatggagcaaatacaaaagaggaagaaaacgaaggtttccggagaatgaaaaattcttaatgtggttggcttgtgattttacttacgagggaggtgaaaaatacaaaaatccatacttgttacgagtaaaagcacttgaccaattgttatcaaaacatgaatttggccgtgcgttgtaccatatagttcaacggagggggtataaagatattggagaaactgacaaagaaaccgaaaagcaaattgaaagaagaaatgaagaaggatttaaatctgctttagagataaatggaacaattgccaaagctttaaatgaagagtttcttaataaaggaaagcgagcaagaaatcagtatcctttacgggaggaataccaacacgaattagaagaaatatgcaaagcccaaggatataatgttgaaaaagaagaaaaagaagaatacaaagataaatttgtgaagagcttatggaaagccattatttggcagcaaccattaaaaacccaaaaaggaaatatagggaaatgctctttagaacctactaaaccaagatgtccagtttctcatccagttttcgaaatctttagagcatggcagtttatcaactccattaagtattttgatgacaacaatgaaaagcagtcgttgagacaaggaatgaaggagcaattgtttttagacaagttcttaaaaaaagattcaaacttcaaattcgaagaaataagaaagtttcttgataaaaagtttggtaaagcaaaaaaatataattacccagtagacagaaaaacagggaagtatgacacttcagtttcttggatgcctatttgtaaaggtcttattgagctttttggtgaaaaagcaaagatagcacttggtgagatagaacaataccatattggtaatgcgcctaaaattattggtagatattcaatatatgatctgtggcatatcatatttgaatttgatacacaatatcttgaaaactttgctattaaaaagcttaacattcaaaataaaatcataacaagaaaaaagaaagaaatttccatttcgcctgtggttgaactaaaagacaaatttttacaaggttatgcagatttaagtttaaaggctttacgtaaaataactccttttttaaaagagggatatttatacaatgaagcggttgttttagctaaaatacctgaattgatagacggtagttggcaagaacaaaaagatattattgtcaaagtattggagaatgcaaaccaattgtataatgaaagaagaagagttatcaacattgcaaataatttgatagataagcacaaagggttatctcctcaagaagtatttgcatataaagattttgaatatactttaaaaccagatgatgtagagaaagttgaaaaagcatgtgaaggttattttggagaaacatcttgggaatatgttgaagacaaagaaaaaatactacaagaagttggtttcgaatatcaagattatttctacgatactaaacgggcttatcgccaatcttcaaccttgacagatatttttaaagaagctttaaaagataatgaaattgaattaaaaggagagttataccatcattcaaatcgtgaaaatcgatacaacaaaaatttgagaattaattgggatacaggtgaaaagcagttgccaacctacaaagatacagggatagaaattctgccagttccttacattgacagtatcaagaatccaatgtttaacaaatcaatgagtattttacgaaagctaataaatgagttaatcattgctggtgaaattgacgaagatacggaagtggttatagagcttgcaagggaacttaatgacaataacaaacgtgctgcgattgaacggtatcaaaatctacgcagagacaatagagaaaaatatcgacttttcttaaatgaatataaggagaatgaaaaatctaatttaaatgtcgaagaaagtattccactttttgaaatgtggacagagcagacttttgaagaaactcaagatgaaaatgggcaaaaagtttctaacagaaatcacattgaaattctcaaagagaaggacgccataaaaaggtatgagttgtgggcagagcaaaaagggcagtgcatatattcagggaaaatgatttccataacacaacttttttctaatgagatagatattatgcatactattcctcgcagtattttacccgataatactttggctaatatgacagttgggtacgctaggtacaatcgtgatttacaaaaacaaaaaacacccaagcaatgtaataattacactaaagatgtagatggttgggggaccgctatagaacctcgtttggagatatggaaacaaacaagagacaggtgggaaaagcgatataaagaccattcaaaacccaaaggaaatgaagatgaagataaaaagaacaagcgaattcaagaaaagcattattctaaaatacattttgattactggaaagataaagttgagcgttttgaagcagatgaaataaaagatagctgggcaagaagacaattggtagatacgcagatggttagtaaatacgcccgtgagtatttaaaattgtatttcaaaaaagtggctgtgcaaaaaggaacggttacagcagattttagaaaattgtttggttttcaggaggaagatgaaatcaaaagccgtaataagcacacgcaccacgccattgacgcatcggttctaaccttgattccggttaacagtagtagaagagaggaaattttgaaatcatattacaaagcagatgaagataaggataaagtagcccttaagagattaagagctatggttaagccatcttctgaatttaaccctcaagaactgataagggagatagaagaaaagacattgattgttaattatcaaaaagataaaattctaaaccaagcagtaaaaaaagttaggaaaagaggtaagattcaatacgtaaaggacagacaaggaaaatatgtattagatgaagatggcaaccgaattgttaagtacgccaaaggggatactgtaagaagtgagctgtacgcacaaacttatttgggtaaaataaaagatgtggaaagatatgatgatggacaaccaaaaaggaaaaatggtgattgggaatataaaactggaaaagatgaatttctttttgtaaaaagagaggatataaacaaggtaaaatcatcagataaattaatcaaatccataatagaccctgtaataaaagatatagtagataagcagaagaaaaacaatgttgttaaagattatcaaggaaataccattcgtcacgtcagaattaaagcaaaaacaggtagagaagtaaaggaaagaatgaattatcgttcagaacacgactacaaaaataagttttactcagaagcagggaatattccttatgccgttttgttacagaaaattacaagtggaaaaatagaaagagaaatgttgccaatagcctcttttgaagtagcaaaagcttataaaaaatatggcaaatttaattttgattcatatataaatgagcaatatccagaatatataaaatggaataaagaactgttgaaagttggtcaaaaagttttggtcataaaagatgataaagaatttgataaaaaagacagtctggatttccaacaaaaaagattgtatgtgataacacaattttcggaaggaagtatttggttaaagtatcatttgaatgcacaatctaaagatgaagtcaaaaaatctataagtctaaaaaaagatgaattgttacgtaaatatgaaatagaaaataatcttcctgaaatagttgaagacgagtcgattcaagatagaaaagaacgaatggatgattataataacagaaaatatagatttgatactatcaacaatagttttagactaacaagaatgatggaaatcgttggagaggaaagaaccaaagaaatgaaaggagaattggacaagtacaaagcaattccatcaagtattgagattgaaggagaaacagcattgctgaaaatgtcaaaggaaaactggaattacctttacgaggggaaagattttgaagtaacgatgttagggaaactaaactggttaaaatgatcaaacgtaccctcttttttggtaaccctgcttatttgagtactaaaaacgaacaattggtagtgaactttcctgaggagaataaggccgaaaaaaccatccccattgaagatttgggctatgtggtcttggaagacccgcagattaccataaccaacgggttgctgctaaaattagtgcaaaacaaaacagcggtaataacctgtgataagcagcatttgccttgtagttttttacaacctttggtagggcatagtgagcaaacggagcggatgcgttatcaattgaacgctagtgtgccgctaaagaaaaatatatggcagcaaacggttactgccaagattaataatcaagcgcagcattttttgtcgcgtgggaaaaatgcgattcgtttaaaacgttatgccaaggatgtaaagagtggtgattttggtaaccaagaggctttggctgctgctttttattttcagaacctatttgatattgatggctttagccgtaaccagaagggtgtgccgcccaataacctgttgaactatggctatgccattttgcgtgctgttactgctagggctttggtgagcagtgggctgttgccttcggttggggtttttcatagtaataagtacaatgctttttgtttagccgatgatgttatggaaccttataggccctttgtggatgccctggtgtatgatattgtggaaacgggttgtggtttggatgagctgaccaaaagtattaaggctgatttgttgatgattcctgctttggatgtggttattgatgggaagcagagtcccttgatggttgccatgagccgtactaccaatagtttgtacgagtgttttgcaggtgttagtaggcgtgtgttgtatccggagtttgtttagtgggtttttagagcacttcgacaagctcagtgtgacaatttatgtaattgttttgacacttcgacaagctcagtgtgacaatttatgtaattgttttgacatttagagagccttaatgcgtttcttcagataccaattcgagagtactttgagggcttcaatgaccgtagctctatgtttattgattatgggttttttagacaaaccctccgtctagaacttctttggtcgttctagccacctccctttaactaaagggagatgctttgtggaaaatcattatagtgattgcttgttatggaaaacgataggtttatacgattgaaccaatatagaagtatgtgggtactggtgttttttgatttaccaacagaaaccttaaccgagcgtaaggttgctgcccgttttcgtaagaatttattggatgatggttttgccatgttccagtttagtatttatatgcgtttttgtgccagtagggagaacgcttctgtacatataaagcgtaccaaaagcgctttgcccaaaaaagggaaggtgtgtattatgcaaattacggacaagcagtttgggatgatggagctttttcatgggcaaaaggaggttgaacctgaaccaccgagccagcaactggagttgttttaggatgtggaatttggtttttgattgaggtctcgactgcgctcgacctgacaattggaaattctgtcgaatccataaataacagaatactagctttttatggctagtatcctgtgaatggtctactaatttagtaatctgaaagcaattcacaacctctaggtcttatataaggatatatatcttcctgtgaatggtctactaatttagtaatctgaaagcaattcacaacacgaaacaatttaatgtaagggaggtttaacctgtgaatggtctactaatttagtaatctgaaagcaattcacaacttagttcttcagtggctttttccgttgcttcctgtgaatggtctactaatttagtaatctgaaagcaattcacaactgtgacttcttgacctacacgattaatgtcctgtgaatggtctactaatttagtaatctgaaagcaattcacaacccatcaccccaatctactaggcaattatagcctgtgaatggtctactaatttagtaatctgaaagcaattcacaactgtctagatatgtggctatcaaaggcaaatcctgtgaatggtctactaatttagtaatctgaaagcaattcacaactagctaaaaggtttctctcctttactttctcctgtgaatggtctactaatttagtaatctgaaagcaattcacaacgcttgtactaatttcgcttttatgttacgacctgtgaatggtctactaatttagtaatctgaaagcaattcacaacagctaatgtattaacgtctaagttttttatcctgtgaatggtctactaatttagtaatctgaaagcaattcacaacctttcacattcgcaatattcacatctcactcctgtgaatggtctactaatttagtaatctgaaagcaattcacaactatcaggcgttaaagtaataatactatcttcctgtgaatggtctactaatttagtaatctgaaagcaattcacaactgagtaacacctatgcgtttaaaaaggttacctgtgaatggtctactaatttagtaatctgaaagcaattcacaacgcttcaaattgaagagttagatgataagcgcctgtgaatggtctactaatttagtaatctgaaagcaattcacaacacaggaactattactacaattgatgatagtcctgtgaatggtctactaatttagtaatctgaaagcaattcacaacgtaaatgaaatattaaatgcacgtaagtttcctgtgaatggtctactaatttagtaatctgaaagcaattcacaacacattaaacggaagcgtaaaactcttttctcctgtgaatggtctactaatttagtaatctgaaagcaattcacaacaatgtgtcaagacgtttttggagtgcttcacctgtgaatggtctactaatttagtaatctgaaagcaattcacaaccacgaaaggggttttgtttcagtacctaaacctgtgaatggtctactaatttagtaatctgaaagcaattcacaactaccaataaacaaatgtactgaaggctttatgcttttgtctaataatgaaacgtagttttatcattatcgtgactttttctaaatgacgatagttaccacccatttacaccttactgaccaaaaaaataatttgattttgtggaaaatttacaaaataactaattcatttgctatatattagattttttgaatgtacaattgttaacccaaaacaaaccctatgcagtacttatataacaagaaacagtccttattatttttattaatgcttgtagttactacttatgttttttatgctcaagaaccgcacaaggaatattatgatgatggaacagtatctagaacaggttactataaggatgataaacgcgtaggcgaatggaaattttatcatgagaatggaaaattagcattggcaggaaagtttgaaaacggtaatactgttggtgtgtggaaaagctatacagaaagtggtaaattatatggtgagggacattttaaaaatgccaatgaaataggtgaatggaagtattattatgaaacaggtcaattagaaaaagtagtactatataatgctaatgaacagctagatggtgtatataaaaaataccatgagaatggtaaattgtctaccgtaggaacctttgaaaataatgttcaggtaggggaatggaaagtataccatgaaaatggtcagttagctgagataggagtttttgaagctggtgaatatgaaggtttgtggaaagcttatcatgagaatggtcagctatctgggatagggcattatgaagatgataaagctactggtgaatggaaacattatcatgaaaatggtcaattatcagaaataggatatacagaaaatggtaaaaaaataggagaatggaaattctactatgacaatggcaaattatctgaaataggaacttttgacgctgaagcatcacaaggagtgtggaagtcctatcatgaaaacggtcaattatctgaaataggatatatagaaaatggtaaaaaaataggtgaatggaaattctactatgacaatggtcaattatctgaaataggaacttttgacgctgaaggatcacaaggagtgtggaagtcctatcatgaaaatggccaattatcagctgtcggaatacgtgaaaattataaaaaagatggagaatggaaacattatcacgataatgggcagttacaggaatttggaaactttgataatggcaaagccacaggagagtggaaaatttaccatagaaacaatgctctttaccaaataagactatgggatgatggcaagtttatggatattatttcttgttatgatggtaatggaaaccctcttgacaaaggcaccttggtacatggtaatggtactgtaaattattatgatgaaaacggtaaactaaccgaaacaaaaacatttgtagatggtttagaacaaaaataatgagttattagcactctcttaaacacagtgtactaaaactaaatattagatacttaatcgcttgttcttattgattgttaaacacctaactacaacgtcaacatccaagtatgttgaagctttttaaaggttttaagttcgcgtcttaataatgggatgtagtctttaccgttactgttacatttttctaaacgacgacagttgctgtacaaacggttggtaagctgtcttaccgatgccatgtgtttgtgttttttatctgtgtgacgttcttgttcggctttagcgatttcaggtgctaaagaaatagactgttgtacgatgtctccagagaagtagatgtgttcgttttcggaaccgtctttatgcaaatacgataaatcatggcttaagtaggtagagatgcttctagacagtacaaaaatatccatagccttttgatatataggcaaatccgatagatgagatggtaaatgaggtaacatagtatataatagcaatttatatcaaaattaagcacaagaaatgagattctactttcaatattaaagcaatatgttatatttgctttaaatattaagttattttttaatttctctttaaatgagtatagatagattaaactggaagattttaaagtgtttgcaggacaatgcaagacagtctaacgctgaaattggtaggcaagttggtattacttcgccagcagtttcggagcgtataaaaaagatggaagatgcaggtattattgaagactattacacatcagtttcttattttgaagcaggttatcaattaaaagctattattaccttacgtgcttttatgggaaagctaaagcctttttttgagaaggtaaaaacctatgatgaggtgttgaactgctatcgtattacaggaaacgaaaatattgtaatggaagtggttcttaaaaaccaaaagcacttagaaacctttatagaccagttgattatatatggagaaaccaaaacgcaaatagtactttcgcaagtggtaaagaatggagcgataaagccattgaagtaatggtcttatcgttatagattggtttccatatgctcagcaattagcttagcatgtattcttgagttttcaataaaccatttgtgggtttcggttccgccacaaattacacctgcaaggtagagtccttgtacgttgctttccatggtatcaggattgtactgtggaaagaaatttccatcattagacaaggtaactcctgcttgttctaaaaactgaaagttaggttggtagcctgtgagagccactacatagtcgttagcaatggtttcagtgcctttaggtgtggaaatgattacctgatgtggtgtaatttctttgatttcggaattaaaataggctttaatgctaccttcttcaattctgttaatgatatcaggtcttacccaatattttacacgttcgccaatagctcctttacgtactaccatagtaacgtttccacctttacgccaaatttcaagcgcagcatcaactgcagaattgctagcaccaaccacaataacatcttgcatactaaaaggatgcgcttctttgtagtaatgtgacactttaggtaaggactcaccaggaacatttaaaagttttgggatgtcgtaaaaccctgtggcaatcactactttttttgcactgtagctggttttgtttgaggtaacctgaaattggttgttttgcttttgtatggctgttacttcttcatacaggtttatgttgagcgtgttagatgttgctacacgacggtaatactccaaggcctcgtctctatttggttttgggttattgcttataaatggaatgttgtcgatttccaaacgctcggaagtggagaaaaaggtcatgtttaaagggtagttaaacaaagagttggtgagtgcacctttttcgagcacgatataattccaacctcttttctcacattccaaagcgcaggcaattccaataggacctgctccaataattagtatatctgtttgtgtcattaatattgtgttgctactaaattaaggttattcttctattttttgaaatctcattttacgctttaacattaaaagtatggcaatacatactaccatcactaaagacacaatgtaccatgtgttggtaaagcctaccaattccaccatgtgcattcctgaattgtgcccaaagatatgtgctatagcaaaagccatactgtataaagccatgtattcgccttggttgccttgttttgcacgttttaaggcaaaagcattagaaaatgggaaggcaatcatttcgccaatggtcataaataacatgccaataaccaatacaccaacccaagcagtaacattaagcacaataaagcttataagtgttaatacagctccaaaggctactaaacctgttttggtgtatttaggagattcgagccattttactagaggcatttcaaatacagcaattaataaaccgttcattcccatgagtaaccctattttaaactctgttaatacatgtacgtctttgtagtacagtggcattgttgagaagtactggagaaaggcaatactaaacagtaccatagctactaaaaagataatgtactttccgtctttataagccgatttagggttttgagaaacgatgttatcctgaactctggcagttttagggttgagtaccttgagtaataggaagcctgcagctatacaagtaataccatctacccaaaacaaaccaccataacccaatgtagcaataattaatccgccaatggcaggaccagcagaaaatccaaggttaatagccaaacgaataagtgttactgagcgtgttttgttttcaggtttactgtaagcacttaatgctacaaacattgcaggacgaaacatatcggctactgcaagtagtaaaaatatacctagcataataccatagtaggtgcttataaattgtaagccaatgaatagaagccctgacaacactaaactaattaccattactttgtaatacccaattttgtcggtgagtttgccaccaagccaagacccaactactgaacctgcaccaaaagcactcataatcataccaacatcagaaagactaaagtctaagcttttattgagatataatgataaaaacggaataaccatggtgccagctctattaatgagtgtaatgagtgatagccaccatacttcttttgataatccgctaaatgtgtttaggtaaggttgtaatagcttgttgttgaaaaaataaaaaaacttcattacttgattgattattataaaagtaaaaagtccgacgttaacgtcggacttttctatattgattaattgtattcaactatcactacaatatatagcaagcccgacttcgttgagaagaggtatatttttgcttaacaattgtattacagttgaacatgatttttttttttattgtccttcaaagctaggtaaaaaaagtttaagttgtatttttgaattgaaaaaattaacccgatgagaaaagttattacatttttagtgttggtattagtcttaggttgtcatcaaggaaaagaaccgattgttggtgagaccgagtttcaaaagaagatgaatgctgattttagagatgcaacaagttcgccacttaaaggaagagctaaaaagaattttaagggacttgatttttttaagtttgactcggcttatgtagttactgctcaattaaaacgtacaccagactctaagtggtttaatatgaaaacgaatactgaccgtttatctagagagcgtgtttatggtgttttgacgtttgacttacaagggcaaacttatcagttgaatgtataccaaggcgaagattctattactagcgaagatcagcaagattatttgtttttaccttttttagacaacacaaatggagagacgacctatggaggcggacgttatattgatttaaaaattcctgaaggcgacactattgtggttgattttaacaaagcttataatccttattgtgcttacaatgagaactactcttgcccaattgtgccaagagtaaattacttagataccaacatacaagcaggtgtgaaggcctacaaaaaggaatagttatttaaccaagtacattccaaaaaaaactgctaaaaatccaactataaaactagcaattgtatatagtgcaaaacttgtaaaatcacctgattttaaaaagacatggttttcgtaagcaaaggttgaaaatgtggtgaatccaccacaaaaaccagtggctaaaagcagtgtttgatttgaagacagtgtattgtttttaactgctaatcctaaaataatgccaatgagtaaactccctaaaatatttgctgcaaatgtaccataaggaattcctgtttcggtgctgttaaggtatttgcttaggatgtatcttaaaacactcccaaaaccaccaccaacaaacacaagaagtaggtttttcatctattttacagcaatgtatattttagttacccaatcagcaggattaggtgtgcttgtaggattggttaaatacgtttcaagcattggtccgttttcatcggtgaattcaagattattttcggtgatatatttcatagtagtattccaagcctcttttaagttagcataatcgccagtaagagttgtttcaactgctttaaatggctgtaactgtcctgttaaaatatcactatcatcagcagtaattacttgagatgttgtaggtatgcagcacgaaaacattacagcattattggcttcgtcccatttgtgataatatacaaaaggaggtccagccatagtaatattgtgtgtaatagcataagcaccaactttaggtaacatatcctgcattttagtatctagctcgctaattttacaagacgtggtattataaaggtaaaatccaccactgtgctgcgttactccatttactttaattgaatagactttcatagactcaacaactaaactatccagcttttctaaaccacgttcaaagtctggaccaatcatgttgtcaaaaccaccagaagctaatgcagaagctttaaatataaacggaacattgtagctgttcattttccatactacgttggttttaccgtcttcggtaggagtaaattcccattgtatctttgaagggtcaaaatccccaaactgtagttcttgatcaatagaaacattaggtttagttcctaaggttttcatgttaccttctccatgagaatccacccacgagtacgcacctccaacacctttggtttgttcgctaagagtaattactgtttctggatctttttcaacccaagaagaccaagcttcccagtttttaaaatcgataacattgttatagataacagcagcaggtgcattgattgtacgttctcttttaacttcaaaagaattaggttgtacagcaatgtaaatagcaatacctataatgagtataagaagta

SEQ ID NO: 3366 - DNA, 24362 bp, synthetic construct
  misc_feature 1..24362: note = Synthetic
  source 1..24362: mol_type = other DNA
tcttgataaaaatttggttgaaatttcggttgttaaactatttaaggtgccatttaaaacttctttacccaacatgttataaacgctatatggtttattaattaaggattgattagttatagaaattttaaaagaatctgtactcgggtttggataaacttcaagttgaggtttattatcaaaactatttgttgataattctgtttcgaaaagttgatctaaagcagcaccgaaaaaggtgtttattttattgtctgtagagtcaaagttactagggttaaaaaacgaagccataacgcgataggtcgatcctttataattagtcattgtagtttcaccagaatgtgggtaaatttcaggaccaaattcataaatagattcaactccagcggctggtgtaacagcatcaatataccaaatggtactataaatccatgaaataggagtaggataacttgtatttgcagtagaagacctgtctaactgagcaactccagcattactatcatctatatacgattgcatatcataggattcaattttagcataatcatataaaaattggccagaagcaaaatcggcaggggcacttccgtacatattataaattaaatcggtgccaattaaccaaagatatccaccattatctagataagttcttaaatcttcaattcctgcggtgccattattccaaaaacttaatccaacaccatcatctccagtaaaccaaattattaaatcgtaattacttaaggttgttaaattaggaactccatttgcaacggcatcatgcacagtaacatttgtatacgatgttgctaaaatggcattgtgaatactcgtgttgtggtcggtattaaaatcgttatccgtaattaacaaaatatcattttgagaataagaaattaaggccaaagtaaaagtgaaaattgagagtaatgttttcttcatacattaaaaaatttaaaagattaattatctcaaatttaataaaatacgctatttaaatttttactttttacagaattgaagttatttatatgaataatgtaaattaagcttaataaaatattaaagctttaattttggcttttaattcctcctaaaaattcacaatctttcaaatcttgcatagagctaaatggtacttgtgttttgttatattgataggtattacttagctgtttcgataaattgtggtcgtctacattaacttcaatatcgtccattgtaaattggcatgggtgctcgtaacctgcagcgtgagtaatttcaataaactcttttttaaaggttttaaagtactgcgctaatcgttctgactttaacggaatgtttatgccttgttgcaaccacttgctttgggtagcaatacctgcaggacagcggttggtatggcaaacttgggcttgaatacatccaatactcatcattgcttcacgagccacgttaatacaatctgctcccatagcgaaggccatcgcagcttttgctggaaaccctaatttcccactaccaataaaaacaatacggtcggttaagtctttgtctttaaataatttatataaatcgccaaaaccataaacccaaggtaaggaaacatggtctgcaaaactaggaggcgcagcaccggttcctccttcgccaccatcaacagtaataaaatctggtccttttcctgtttttttcattaaatcggccagttccttccattggtctaattttcctatggcagcttttattcctacgggtaatcccgtttcttcggctaataattcaataaattctaacatttcttttacattagaaaaagcagaatggtttggtggagaaagcacatcttctcccattggtacatggcgtatttccgatatttcttttgttattttacttgcgggtaaaacaccacctttacctggttttgcgccttgcgataacttaacttcaatagcccttataaaaggatttttttcaactaaagcctttaatttttctaaagaaaaattaccatcatctgctcttactccaaaataaccagttcctatatgaaaaataacatctccgccgttactatggtatggagatagtccgccttcgcctgtattatgataggcatcggccaatgccacacctttatttaaagattctatagctttagcagataacgaaccaaaactcatagcggaaacattaattacagatgcaggtctgtaaggcttctttcttttattaaattcaccaattaccttagcgcaaggtaaaaaggttttatctatactatttgggtgctgtttatcaattttaaacggaaacatggcattattaacaaaaatatgctggtgcgcataaatatcgcgatcggttccaaaaccttcataattattttcgttttttgatgaagcgtaaatccaacctctttcaatcctgttaaaaggtaattcctctctgttatttgctacaaaatattgtctcatttctgggccaatactttctaaccaatatcgtaaatgcccaacaatagggaagttatgacttatggtgtgttttttttgaataaatatatcgcgaaaagcaacaataactaatacaactaaaacccaagcccaccatggcatgtttgataaaaagtttaaaatagaggtcatttttttatttttaaaaagtaaagatattttaaataaaattgttccccaaaaaacgaaaacatatctttataaaatgcgattaaatgtaaaaaaaacgagtatagttcttgttatattaataagtgtaattgtagtatgtacagttattttaaatgtttttatttcgaataaattaaaagcaactttagcagaattaccaaaccatattatagtgaattatgatgctataagttcgaatatttggttacggaaatttagcgtaaaacatccagtaattgttgttaaaggacaaaccacagataaaacattattaaaaactgaagctgaagcgtttaatttagaaggatttagtatttggaagtatcttttagaagaaaaaattgatataaaaactatcgatttaagcaattcggtatcggagatgttttataattttaatttacaagaagatagttaccaaaaggaagctacaacaggtttaaaaaatgattttgtaattcataatgtcatttttaatgaagcgaatattttaaccaagaatatagaaaatgattctataatatttagcatttctaaattaaattcaactgtaaaagaattgaaatttaataaaggcgtttttgtctatgacagttttacggtaggaggaaacaacctgtttttagctgtaaataagtttgaaaatttaaatatatcagaatttaatatttcaaataaaacgatggcatttattaacgtagatttatttacaaaatattctaaatcccaattatcatcgattttagagcaggaacgcgatcatgtaaaggtgaattttaaagaaattcgtttacaagcattagatctcaattttaataatggatttagtttatcatcaaaatcgagtgaaataaacctacctaatattgaaatttttagaaacaagttattgccagacgattttaaaacaaaaccgctttattctaaacttttacgcgatttaaattttaaacttaatattgatgagttaaaaattaacgacggacaaatatcttattttgaaaaagttaataacgacaataaaaaacccggaacaattagatttaacaacttaaatgcagaaataaataatttaggaaatgttaatacacaaacacctgttaatattactgttgatgcgctatttatggaagattctaattgccatatagattggaattttgaagtagcagatactacagatgcatttgtgtttaaggcagatttaaaaaacttaaatgcctcaaaaataaatcaatttattgagcctaacttaaaagtaaaactaaagggtgaattacaacaaacgtatttttctgtttatggtaataacaacatttcgaatacagatttaaaaattaagtatgatgattttgaagtttctgttttaaaagagaacggcaaagaaaaacgtaaactattatctactttggttaattggtttgttttaaataacaccaattataatgatgataattttcgttatggaaaagcagaaaatataatgcgacataaaaataaatctgtatttaattatgtttggataaatgttaaacaaggattgttatcagccatgaccggtagtgaaaaaagagattaatattaggttaattttcgtttttataaaatctagttaagagtttattgtttaaaacttctacagcctaatttgtttataaatattaataaatccctttaattaaaagcgaaacaatggttaatttcacgcttttaaattactagtagattttggagaaatatttaagtcagttaaacgaggcacaactagcgcctaccttacaaatagatggcccaatgatagttattgctggcgcaggttctggcaaaacgcgtgtgcttacctttagaatagcttatatgatgagcaaaggcatcgatccttttaatattctagctttaacttttaccaataaagccgcacgcgaaatgaaagagcgtatcgcgagcatagtaggatcaagtgaggctaaaaatttatggatgggaacttttcactcggtttttgctaaaattttacgcattgaagccgatagattgggctacccaagtaatttcactatttacgacacccaagattccgatcgtttaatacgcgatattattaaggaaatgaacttggataaagatatttataagtataaacaagttcgttctagaatttcatcttacaaaaacagtttaataactgttcgtgcatattttcaaaacccagaacttattgaagccgatactatggcgcgtcgccccaaaatgggagatatttataaagcctatgtggagcgctgttttaaagctggagccatggattttgatgatttattgcttaaaaccaacgagcttttaacacgttttccagaagttttagcaaaataccaaaaccgatttaaatatattttggttgatgagtatcaagataccaaccactcgcagtatttaatagttcgagctttgtccgataagtttcaaaatatatgtgttgttggtgatgatgcacaaagtatttatgctttccgtggggcgaatatcaacaatattttaaatttccagaaagattacctcgatgtaaaagtatttcgattagagcaaaattaccgctcaacaaaaaacattgtaaatgctgcgaattcggtaattgataaaaaccaaactaaactcgataaagtggtttggacagccaatgatgatggcggtaaaataatagttcatcgttcgttaaccgatgccgatgaaggtcgctacgtagccagtactattttcgatactaaaatgaatcatcaattaccaaacagcgattttgccattttatatcgaaccaatgcacaatcgcgttctattgaagatgctttgcgtaaacgcgatattccatacagaatttatggcggtttatccttctatcagcgtaaagaaataaaagatgttttatcgtatttaagattaataattaatccaaaagatgaagaagctttaaagcgcgttattaattttccgccgcgaggtattggtcaaactacagtcgataagcttatggtagctgccaatggttataaccgatcgattttcgaggtgatgaaaaacattgataaaaccaatgttaaagttaactccggaaccaaaacaaagcttttaaattttgttaccttaattgaaagttttcaggtaatgaatcaaacagccgatgtatttgaacttgccgaatatgttaccaaaacaagtggtttaattcgtgagcttaataaagatggaacgcccgaaggtgttaccagaatggaaaacatcgaggagcttttaaatggtatgaaagactttgttgaaggtcaaaaagaaatagtagatgccacaggatctttagccgaatttttagaagatgtagcgctttctaccgatatggataacgataaagacgatggcaataaagtcgcattaatgacgattcacctagccaaaggtttggagtttccgtatgtgtatattgttggtttagaggaagatttgtttccaagtgccatgagtatgaatacgcgaagcgaactcgaagaagagcgccgtttgttttacgtagcgcttacacgggccgaaaagcaagcgtatttaacctatgcgttatcgcgttatcgttggggtaaattagtagattcagaaccaagtcgttttattgaagaaatagatgaagaatatttagaaatagaaacacctattgaagaacgccgaataaatccaatgctttctgccgatatttttggcgatgtagaacctaacaaagttagatttaagccagcaaaacaaccaaaattcgataaaggaaaaacaaaaaagtctccagaaaaataccaagcaccaacacctaaaaatttaaaacctgtagctaaaagttctgcaaatgcgggtagtcctaatttattcgataataaaatagctgttggtaatatggtaaaacacaaccgatttggtactggagaaattataaaaattgaaggcactggtccagataccaaagccgaaattaagtttcaagttggtgtaaaaaaattactgttacgctttgcaaaattagaagtactaggttagagcataattatttaaaaactgttaaatagttgttaagagcgaatgttttatttggtttctgcatctaattaaaagagtaaccaattaaaacaataggtatgaaagcattattatcactagtattaattttaagttttgaattcgttgtagcccaacctggtggtggtggcatgatgggcggcggcggtatgcgtggtggtggccaaggcggacaacaaaaccaagaacgccaagaaatgccagaattcgatgcagctaaagtcgcaggtatttttaattatgatgacgccgaagttttaaaaaaaattaaacttaaaaagaaagaagaaagccttactcttgaggttagaaaagcaataaacacttataatgttagggttaatgaaatcgcacttttaaataaagataacttcgataccttaaatgtttacgttaaagcggtgcgcgaatcgcaacaagcaaatcgtggccaaaaccaatcgttcgatcgtagtgagcaagatagggaagacgatcctagatttaaagttatggagttggtaaaagaaaaaaccgaacctgtaaaagcgttggttgtaaaagaagaagataagcttaaccaaaaaatgcaaacgttattagatgaaaaaaaatataacaaatggttagattatcaagccgaaattaaagaagaattaaacccgaaacgtccggagcgtaacgattctggtatgcaaggaggaggcagacaaggtggccgtcaaggaggaggtggcggtatgatgggtggaggcttttaaacctttgctaatttaaatgggtttgcataaaagcttttaactttagccaagtgtctattaaagctaagccttcccaaccatgagcttcattttcatataaagtaaactcgtgaaccacatttaggtctgcgagtttattttttaaatcgataccttgagaagtaggaatcaatgggtcttttccaccataaaataaaatggaaggtggtgcatcagttgtaacttggtgcaatgggctagcttcttctaaataagaagtttcaggaaattcgccaaacatatccagtaactcctgtaagtcttcgttggaattatttaaatattcagggtcggttaaattcgtaggcccaacaatactacaaaccatatcgatatttttatcggtatcgagtgcataactccataacagcgataagtgagcgccagcacttgctccaataaatccaaaattatcagaaattgtataattagagctgttagattttaaatgattgataacactggtaatatcgtcagtttgcatcgggtaaggtttgtttttttcattagcataccgataatttacgtttacaatagcatgatttggaaaatcgattcgtattaaatctttaatcgcattcatgtcacttttatctccagaaatccatccgccaccatgaactaaaataaccgttttagtatttaaagagcgattagcaggtaaatataaatcgaacttttgtcggtcttcattgccataagaaacatttaatgcttcgtaatacaagctaggatctaatccatcttcattattgtttgaggtattagaactgcaattttgtacacaaacagcaataaaaaaaagacagaaaaatttaaaaacaagcttcataactaaaattgtattatttttaaacgtataataagatacaaaaattggctgattttataaaaatatacgaagaaaacccaaatccgcgtgaaatagcaaaggttgttaacgtgttgaaacgtggtggattaataatttatccaaccgatactgtttatggtttaggctgcgatattaacaacataaaagctttagaacgtgttgctcgaataaaaggtattaagctcgaaaaggctaatttttcctttatttgtcacgatttaagtaacctgagcgattatgtaaaacaaattgacacatcggtttttaagttattaaaacgcaacttgccaggggcgtatacttttattttaccaggctcgaaacaattaccaaatccgtttaaaaaacgaaaaacagtaggtatccgtattccagaaaacaatatagctttagatattgtaaaaggtcttggaaatccaataatttcaacctctatacatgacgaagatgaaattattgaatacaccaccgatccagaattaattcttgaaaaatgggataatttagtcgatttggttatcgacggcggttatggcggtaacgaaccatcaacagtaatcgatttgtccgacggcgaacctgttttagtgcgagaaggtaaagggaatcccgatatatattaaaaagctaatggaacatacaccaattaattacatcgaatttaaagccaaaaacttacacgatataaaaaccttttatacagcttgttttaattgggcgtttaccgattatggcgatcaatacatcgcttttaaaaatagtggtgtagaaggaggctttgaaaaaacagactcagaaatagtaaatggtgttttggtggttttacatcataataatctagatgaagtaaaagccaaagtacttaaacatggcggacaaatttcagtcgatatttttgcttttcctggcggtaaacgctttcaatttttagatccttctggaaatgaattggcggtttggtgtgccgaaaaaaattagtgagttttaaccttccacctcaaaaaaactaaacacattaccaccgtaactttttaaataactgaaatttttaacgttattttaatagggcgttctagcgggctttacattatatcttttttatcgtacctcaaaaaaaggatgccattgcaatccctaacgcgaaaattcgtcttcgtaataatataattttcttatatttaaaatctccttaaataattaaatatgcaacaaagtattaattgttgcagcacttagcataaatacatttaaaaaaactaaagtaatgtttaagcaaaaaaatgccccgaattggaagtcgaggcggcttaaatgttttactcgcaaatttaataattgatgggattgagctcgtgaagccatttaaagaaaaaagaaaacgacataagaataaacctatgccgctttaaatgttttcacaacggaataatccttattgtgaattgcttattatggtaaaccggaaagtaaaaatgatatgatgggatacttttaaaaaaagtaacgactacctaggcagtcgtttagaattttctgtggcttttaagccttgttgtgaattgtctttcagtgacactaaattaagaaaaaaatatattatggcaaaattgggtttagatttaggaagctcttcattaggttgggcaattagagatggggacgaaatttctaaaaaaggagtgattacatttccctcaggaatggtcaagggacaaggtggtgggtatagctcgcctacgagagatagaagagaagcacgttctaaacgaaatcttattagggctagaaaatacaggaaatggaagttacttgaaattctatgtaaaaatagtgaatatgtgcctttaaatattttacagttagaatcttggagcaagtataaaaaagggcaggcaagaatgtttcctgaaaatgaaaaattcttaagatggttgtcctgtgatttttcttatcaagggggcgaaatgtacaaaaatccatatgaattgagagtgaaggcactagaccagcctttaaccaagcatgaatttggaagggttttatatcatctcgtccaaagaagaggatataaggacattggggaatctgataaagagaccgaaagtcaaattaaaagaagaggtgaaagtgggtttcaaaaagcacttgataataaccgaaccattgctgaagccttaaaaaacgaatttttagacaaaggtattagagcaagaaatgaatatccttacagagaggaataccaaaacgaacttgaattaatttgtaaagcacaagggtataatgtttccagagatggcaaatatgactatcaggaccaatttgtactgagcttgtggaaatccattgtttggcaacgtccattacgttcccagaaaggagccattggaaaatgtacgttagagccttcaaaattaagatgtcctgtctctcatccaatttttgagatttcaagagcttggcaattcataaataccataaagtattatgataaagatgatgaaaaacaaaacttgcccgaagatttaaaagaattgctttttaatgatgtttttataaaaaaggacaattttaagtttgaagatataagaaggtatttagacaaaaaatttaagcaaaaaacaaaatacaattaccctttaagtaaaaaaacaggaaagtatgaaacaagtgtttcgggtatgcccttttgcaacggaataataaaaatattaggagacgtagcttatgattctctaatgaatattgaaaaatacaatatagggaatgcaccaaaaattataaacggctattccattttagatgtttggcatgctgtttttgattttgatgaagaatacctagaagcatttacgaatgaaaaacttaaagttgaaaatacgacagtaaagcgcaacaagaaagaagtatcgttatcaccgttggtaattttaaaaaataagttaactgtaggctatggtgatttaagcgtaaaggcactaaaaaaaatcattccgtttttaaaacaaggctatttatacaatgacgctgttatgttggccaaacttccgaaattgatgggaaatgaatgggaatctcaaaaagaagacatcctaaaattggctaaaagcagccaagaaacatacaactggtgtaggataattgttgggattaccaataatttgattgatgcgtataaaggcgaagtagaggattggcgggaaaccggaaagtcagtaaaagcatggaaagattttgggtacctgctcaccgaggatgataaaagagaagtcatcaatgcctgtattggttattttggcgaaacttcttgggataaaagaaaggataaagaaactatcatcagtgaagtaggaaaggaataccaagaatttttcttcgattctaaaagagtttatcgggaaatgcccacgttaaccagtttgttttttgaaacattatctgtaaacggtataaagctaagtggggagttataccaccattccaccagaaaaaatatatatggtactaaagtaaccgataaaaatacaggcaaagatatactgcctatacctttgattgacagtataaagaacccaatgtttaataaatcaatgagcattttaagacgtttggttaatgagcttattctaaaaggggaaatagataaagatactgaagtggtggttgaagtggcaagagagctgaatgataacaataagagagtagctattgaacgttatcaaaatgaacgacgaaaaaaacgagaaaaaattagagctttcctagaagagtttaagactaaggaaaacaaatcatttaatgtggaagagcgtattcgtgattttgaattgtggtgtgaacaatcctttgaagagacttttgataaatcaggaaagaaaattgttaacaagaaaaacagtgagattttaagcgaaaaaaaagctattagacgatatgaattatggatggagcaaaaaggacaatgtatgtatacaggaaaaatgattcccattgctcaattgttttcaaacgatattgatgtggagcatacaattccaagaagtctattaccagataatacaatggcaaaccttacagtttgctatgccaaatacaatagggaaaataaaggaaaattaatgcctttcttttgcgaaaattatgaagaagatttagcgggtattggtacagccataaaaccacgtttaagggaatgggaaaaaactatggataattacaagtccttatttgaaagcaggctaaaatccactggaaatgaggatgaggctaaaaagaacaaacgtatccaagaaaaacattatttcaggatgcattatgagtactggaaggataaagtagagcgatttacaactgatgaggtaaaagatagttgggctagaagacagttggtagatacgcaaatggtaagtaagtatgcaagagagtttttaaagacatattttaaaaaagtagcggtacaaaaaggggaggtaactgctcagtttagaaaaatatatggttttcaggaaaccgataagataaaaagcaggaataagcatacacaccatgctattgatgctgctgtgcttacacttataccagtgaacagtagccgaagggatgccttgttggataaaatgtataagatggaagaaagggaaggtaagcaattttccaccaaacctttcgatttatttaattcacaagaattaataaatgttattgaaagccagacgcttattgttaattacgaaaaggataaaatcttacaacagactgtaaaaaatgtaagaaagcgtggcaaattacagtatgtgaaagacaaatatggaaattttgtaacagatgaaaaaggagaaaaaatcataaaaaaatcacaaggagatactgttagaagtactttgtataagcaaacatttatagggaaaataagagatgtaggacgctatcccgacggacaaccaatacgtgaaaacggagaatggaaatacaaaactggtgaagatgaatttttgtttaccgaacgtaaaccattaaaagatgtgctttctaaagtggatgatattatagatcctgtcattagggaaataataagaactcaaaaaagtcaagcaacagaccctcaaggtaataaaataagacatgttagggtaaaatcaaaagcaggacaagttgtaaagcaacgtgtcaattaccgttcgaaacatgagtataagaactactattattcagcagcaggttcaattccttatgcagtaatgcttcaaaaaaacataaatgataagattgaacgaaaaattattccagtggcttcttttgaggtttctaaggtgtttatggaacataaaaagttctcactagagttgtatttggaaatgtttcatccaaatttaagtggttaccaagacactaaattgttaaaagttggacaaaaggttttgatgttgaatgacgacagtgagtttgaacaaagaaaagatatggagtttcaaaagaacagactctatcgtataacccaattcgcaaatgatggaaaaaggattatgcttaaatatcatttagaggctcaagctataacagatgtaagaaaaaatgttaatgaacaaaaacacaaaatattaacaagtgaagaggtgaaaatgggcatatctgaaatactagaaaacaccagtataacgaatttagctgatagaaagaaagattttgaaaaacgaaaatacaattttaacgataggttaaataagatcgagagtgtttctaacaagttaaaaaaaacgcaagtgaaaaagatgattaataattatcaaacagaatattcgtcatttccagaaaacataattccatcttttttaaaaatctcaaataataattggaactttctttatgaaaattatgattttaaggtttcgatattaggtaaattaatttggctgaaaaatgattaaacgcactctattttttggaaatcctgcttatctcagcactaaaaacgagcaaatggttgttaattttcctgaagaggacaaaccagaaaaaaccatacctattgaagatttagggtatttggttttggaacattcgcaaataaccatttctaatggtttacttatgaaattggtgcaaaacaaaacagcggttataacctgcgataaacagcatttaccttgtgggtttttacaacctttggtagggcatagtgagcagaccgagcgcatacgctaccaattaaatgctagtttacctttaaaaaagaatttgtggcaacaaactgtaacggctaaaatagataaccaagccaatcattttttaaatttaggaaaaaatgccttgcggttaaaacgctatgctaaagttgtaaagagtggtgatttaaataatgaagaagccttagcagcagcgcattattttcaaaatttgttcgatattccagagtttagtcgcaaccaaaaaggtattgcacctaataatttacttaattacggttatgctattttaagagcggtaactgcaagagccttggtaagtagcggcatgttgcctagtgtaggtatttttcatcgtaataaatacaatgccttttgtttagcagatgatgttatggaaccctatcggccttatgtagatgctgtggtttacgatattgttgaaagtgggggtaatattgaagatttaaacaccaatttaaaatcggaattattagctattccggcaatagatgtaatgatagatggaaaacaaagcccattaatgaatgccatgagccgaaccacggccagtttatttgaatgttttgaaggttcgcgccgcaaaatactctatccagagttctaaagtttccctcctcataaggagggattaagggaggtgttaaatatataacaaccaaataaaaactaatatattttataaaatgttataaaatcacactaagcgcagtcgaagtgtaattaaagaaacaaaaagcgattataaagtaataatcactgtaataactaataattggtatatgaaaaaccgattaaaccgtttaaaccaataccgttgcatgtgggttttagtattttttgatttaccaaccgaaacattaaccgaacgaaaagtagccgcaagatttagaaaaaacttgcttaacgatgggtttaatatgtttcagtttagtatttatatgcgccattgcccaagtagagaaaatgcagtagtacatataaagcgtacaaaaaatgcattaccaaaaaaggaaaggtctgtattatgcaaataaccgataagcaatttgggatgatggagctatttcatggcaaaaaagaagtagaaaaggaaacaccgaaccaacaactggaattgttttaatatgtttagcgtaactagtttatgtcatgttgaacttgcttgtgctgaacttgtttcagtaactcagcatctcataaacctacagcacaagagaagtaatcctaataaatgctagagatatgcaaatctattgatatggataaaaaacagaataccagaatgttacataaagtatcctgtgaattatccataaaaataaagaactgaaagcaattcacaaccaaagccatacgatgttaggtgtagatgctcctgtgaattatccataaaaataaagaactgaaagcaattcacaacataacgaccaattaatcgatttaggttttgcctgtgaattatccataaaaataaagaactgaaagcaattcacaacagaatcttataatatttcgcttaacggtatcctgtgaattatccataaaaataaagaactgaaagcaattcacaactttcgtcaatttgttttttgtaacgctttgcctgtgaattatccataaaaataaagaactgaaagcaattcacaactaaatcatttactttacataaagttacaggcctgtgaattatccataaaaataaagaactgaaagcaattcacaaccgagtcgttgctttcgttatacgcagcatccctgtgaattatccataaaaataaagaactgaaagcaattcacaacttaaaaattaaccgcgaaggaactcaagcacctgtgaattatccataaaaataaagaactgaaagcaattcacaacttgtatatgttctttaatcattcccatcgacctgtgaattatccataaaaataaagaactgaaagcaattcacaacttgttagtaattattctttcaatcttatttcctgtgaattatccataaaaataaagaactgaaagcaattcacaactataagcagtcatacattctttacaatgatcctgtgaattatctataaaaataaagaactgaaagcaattcacaactattctacgtccagaactcaaactttttaacttttgaattatccataacccttcgtctgcgctcaggacaagcttaaagaactgaccaagcgtagcgaccgatgaacacattaattcaaaataatattggtgaataaagcaattcacaacgcaaaccttatacttggcgtgttaccattacctgtgaattattcataaaaataagaaaaataccaatcgcagctactaaccaatgtaaaatttcaaagaacacagttgaataaatcaatcattaataatacggatatcattaaagaaatctatttattagttaattgttttaaaacttaaccttccacctcaaaaaaactaaacacattaccaccataactttttaaataactaaaattttcaacgttatttaacttggtgtgttttgaatgttctactattaacatgccgttttcgctaagtaaattatttgcaaaaactagctctggaattttggcgaagtcttcatcggagaaattataaggaggatcggcaaaaataatgtcgtaactgcccgaagctttttctaaatacttaaacacatcacttttaatggtgtttataggcatatcgaacttgttagctgtttgatttataaattttatgcaaccaaaatcttggtctacacaagtaatgtgttctgttcctcttgaggcgaactcgtaactaatgttacctgttccagcgaataaatcgagtacaacaacatcttgaaaatagtaattattgttaataatattaaataaagattccttcgccatatctgtagtagggcgaacaggtaaattttttggcgcaataattttgcggcttttatattgtccggaaataattcgcattaaaaactggaaattatactatagttactatgtttatgttttggttgtgcatcgatggcgtatctatatgcgtcttctcggtctccaaaaaatattaatcggatgtatttgtaggctattacgtataaatcatcataggcatcaatttcgcctaaaaatataaggtttaccgtttctggacttaattgtaattgctctaaacaaaacaaaatgtaataaataaaatcttctttagtgttataaaaaaaagaattgtaaagttgtaattttttattttgcacaatggcaatttcaaaatggtctttacttacattaacatatgcttttggcactaaatagtttacatcagtttttaaaatagattcaattaagatggtagaaatatgcttataggtgaattttccaaacttatcataaataaaattgttaatatttatgtaaggcacataaacactaacactatcgttcacatctatatcatcaaaggttataaaatctgattttaaaattttagtgttaaattttaagtaatcagctaagtagtcttcattaaataatggttttggtactaatgctgacaattcgttgtcatgaattacagaaaccccagaaaaagaaccatttaaagcagcttctgtattaaactcattttttaaagcgtccagaacgccaaaaggattttgtttttttgcaaatgttatatcctttaaaaaagtaacggtattagtgtctcggtttagaatacaaaaagaaagtccactcaaacttatttgaatggacaattctgtatttgttaatttggttattttcttattctgcagcgccataagttttaggccagttaccaattgttttaacctcgtccatagaacctacttttaacttgtctccgttaacgccatcaaccgaaaccacttgtttttcttgaactaataaatctttgtcctgatcgaataaaattacatcttttgaaaccgatgcttcaaaaacagggatattaattttgttttgcattaaaaagccagattccattttaaacttagcgccttcttcaccaacaggtacattcatcatggttttatagcgattagagtttttaaataaagaatcttttactggtacataacctaaagtatcaattaatacaattgattttttcatatcaactccaaactgctttgttaacacttcatcaattactgaagaatcacgacgttgagtaatagtaaattgcgcggtatctataaatttaattaagccatcaaaattatcagcaaatttaccagttaccgttttatgtgccaactgcgaatctctaatatcttttaaactttcaattacaacagcgtaacgcttatttttttctttgttaaatttaattggttcgtaaaccgacatatacgttttataacctaaaaaggcaattaaaatccaaagcagtatgttaataaagggttttaattttgaggggataaatttgtcaattaaccaaactaagccaattgtacctaaaatcactgcaactgcaataagaatgaatgttaacataatatgtttttaattttgtaaattattaattggtgtttagcaaatctacaatttttttttaatcgtaaaagctaataggagtaaaaatcatttttatctttgaataatttataaaacgttctcgtattaaatgaccgctccagaattctacaagcttctaaaacaacattttccgtttaaaacaaccttaaaacaagacattgtattacaacagcttgcagagtttatttttaacaaaaacaataatgcattatatgttttaaagggatatgcaggtacgggaaaaactacaattgtaggtactattgttactaatttatggaaagctaaaaaaagtgctgtactaatggcaccaacaggaagggctgcaaaagtaatcgcaaattattctggaaaggaagcttttacaattcataaaaaaatatattttcctaaaaaagatcgtggtggtggggttaagtttgtgctacaacctaataagcataaaaacaccatttttattgtagatgaagcgtctatgattccggatacgcctggtgattctaaattatttgaaaacggttctttgctcgacgatttaatgcaatacgtatatgccggacatcaatgtaaactgttattaattggtgatacggcacagttacctcctgtaaaattagatattagtcctgcgttaaacgaaaatactttggcgctaaattacaataaggacgttactaaaatggaattagatgaagttgttcggcaggagcaaggttctggaattttggccaatgccacagtgttacgcgaccatttagctcacgatttttacgatgagtttaaatttaatatagaaccgtttgatgatattatacgtttaattgatggccatgaaattatggatgccattaacgattcgtatagcgatcatggtaaagaggataccgccataattgtacgaagcaataaacgcgcaaacttgtacaaccagcaaataagaaaccgtattttatttaatgaaaacgaaattacggttggagattacttaatggtggtaaaaaataattatttctggattaaaccaaccaccgaagccggatttattgccaatggcgatattattgaagtgctagaaattttcagtattgtgtctctttatagttttcgtttcgcggaggtaaaagtacgcatggtagattatccaaaaatgcaaccttttgaaaccgttttacttctcgatactattgatgctgaaacaccatcgttaccttacgaagattctaataggttatatcaagaagtaatgaaagattatgaggaagaaaccgctaagtataaaaagtttttaaaagttaaagccaataaatattttaatgccttacaagttaagttttcgtacgcaataacctgtcacaaatcgcaaggtgggcagtggaataccgtttttatcgagcaaccgtatttaccaaatggcccagataaagactatatgcgttggttgtacacggccgttacacgtgccaaagaaaaattgtatcttattggttttaaaaacgaattttttgaagaagattaaattatgacagcagaaaccgtaattagtatttgtttaggcattggtttatcagcatcggtagggtttcgtgtatttttaccattatttgctttaagtttagccgcttatttcgatgtttgggcattaaacgaatcttggcaatgggtagccagtacgccagcattagttacacttggtgtagctactttggttgaagtgtttgcctattttataccttatgttgataatttacttgatagcatggccatacctttagctgctttggcaggaaccgctgttatgctgtctacagtagccgatttaagtcctgttattacttgggctttagccattatagcaggtggcggaacagcttcgatagttgcgggttcttcgtctacaacacggttggcatcaacagcaacaacagcaggtttagccaatcctttagtggctgtagtagaaacaggaacttcggtggtgatgtcggtggtttcaatttttcttccttttttagctttggtattagtagtcgttattttcttcatcatttataaaatctataaaaagtttaagaaaccagtagctaaaacctcttaaaatttaagtatttttgatattcaatatttttaatttcaaatgaaaattatttcaatgattcccgcaagatatagcgcatcgcgttttccagggaagttaatgcaagatttaggtggaaaaacagtaattcgcagaacttacgaggctactgttaaaacgaaattattcgatgatgtttttgtagttaccgatagcgatattatttataacgaaattgtaaataatggcggaaaagcaattatgagcaataaagcacacgaatgtggtagcgacagaattgccgaagcagttgaaaatttaaatattgatgtggtagtaaatgtacagggcgatgaaccttttacagatgaagaatcgcttaaaaaactcattaacgtgtttaaaaatgatactaaaaatgaagtagatttagcatcattaatggtacatattacaaacgaagacgaaattaataatcccaatacggtaaaggttgtaatagatcaaagtgattttgctctatatttttcgcgaagtccaattccgtatccgcgcgataaaaatgtaaacgttaagtattttaaacataaaggggtttatgcgtttagaaagcaagccttgttagatttttacaacttgcccatgcaaactttggaagcttcagaaaaattagaacaacttcgttatttagaatatggaaaacgtataaaaatggtagaaaccgatattgaaggtatagagattgatacaccagaagatttaattcgagcaaataaacaatggaaataaattacgataaaattaaagttataggatttgacgccgatgataccctttgggtaaacgagacgtattttcgtgatgccgaaactgaatttggtaagttgttatcggaatatgaaacaccaaataaactagaacaagagctttttaaaaaagaaatagaaaacttagggttatatggttacggcgtaaaggcatttacattatcaatggttgagtcggctctagaactttctaattataatgttaaacctaaaactttagaaaaggttttaaatattggtaaaacaatgcttaatcaacctgtagaattattggatggtgtagaagaagttttagaaatattatcgaaaaaatataaacttattttggctacaaagggcgatttgttagatcaagagcgaaaattagaaaagtctggtttaaccaactattttcatcacatagaagttttaagtgagaaaaaagaagagaattattcaaaacttttaaatcatttggatattaatccatctgaatttttaatggtaggaaattctttaaaatcagatgttttaccattagtaaatctaaaagcaaaagctatacatgttccttttcataccacatgggcacacgagcaagtaacggcaagcgaaactactggaaaagaatataaaactattaaatcgttaacccaattattaaatattttaaactaatttggagattattgatacaaatacgtgggaacgaaaacaagttttcgagcatttttcaagttttatcgatccttattttggacttacaataccatttaatgtaacaaaagcatatcattatgcgaaaaataatgaggtaagtttttttgtaaaatattatcacgattgtttaaaagctataaatttggtagaaaacttaaaatatagaattgttgatcataaagtggtgaagtaccaggttattcatggttcaacaaccattatgcgcgaaaacaaaacgtatggattctcatttataaagtttaatgaagatttaaatagttttattaaaaattttgaagccgaaaaacaacgtataaatcaatcaaatgatttgtttccaccaacaaattctctagattgcatacattcgtctgcaataccatggataaatttcacaggagagaaacaacctgtttcgggtaaaccagattcagtaccaaaatttgcttttgggaaagcacaaaatgtaaatggagagcatatcatgaatgtatctattcatgtaaatcacgctttagttgatggatatcatgtagggttatttgctaagaaatttcaacagtttttaaaccaatagaaattaaataaatggtatttttaccattagaaaacaaaattattaatgaattataagaactttccaatggtgccaagagttatttttggcagaggtagttttaatcaaataaacgatgttttagccccaaaacgcaaaagcattaatgcgccatttatttttttaatagatgatgtgtttcgtggtaacccatggttaacgtcacgaattgagttagcatacgacgataaaattatttttattccaacaaaagaagaaccaaaaaccgaacagattgacaccttagttgaagaaataatattacaagctaaagagcgcccatcgggaattattggtattggtggtggtacggttttagatattgcaaaagcggttgctattatgataactaatagtggtgaagctaaagattaccaaggttgggatttggttaaaaatcccgctatttaccatgttggtattccaacaatttcaggaacaggagcagaggtttcacgtacaacagtactaactgggccggaaaaaaaattaggaataaactccgattttacgccttttgaccaagttattttagattcagaacttactaaggatgttccaaaagaacaatggttttatactggtatggattgttatattcattgtatcgaatcgttaacgggaacgtttttaaatgagtttagtaaaagttacggtgaaaaggcattcgaattgtgtaaacaaatatttttagatgatactctatcgaaaagagattcacaagaaaaacttatgatggcttcatggcacggtggtatgagtatagcatactctcaagtaggagtggcgcatgctttaagttatggacttgcatttttattaggcattaaacacggtattggaaattgtatagtatttgatcatttagaagatttttacccagaaggtgtagccctttttaaaaaaatgaaagccaaacatgatattgaattacctcaa

SEQ ID NO: 3367 - DNA, 24320 bp, synthetic construct
  misc_feature 1..24320: note = Synthetic
  source 1..24320: mol_type = other DNA
tttttgcatgtctttttgcaataaaaaacgtcgtctaccagcttcattttcgatatgctgtttaaaaaaataataagcaatggctccgaccaaaagggcaggtagtaaactaaaaagtaattctattattttatctatatccataaattatgcttttataacaaacatagtttgtttttaataattgaacaagaacgtgttttgagatgtttttaattaggtatgactttacgttttataaccacccaaatgctcacattcctttaaagattgcatgccattaaaaggtacaacggttttgatataaccataagttctatctaagtctgaagataaattatgatcatctacattaacctctatatctgtcattttaaattggcaaggatgttcataaccagcagcatgcgtaatttctaaaaactcttttctaaaggttttaaaatattgtcctgcacgttcagattttaacggtacatctattccgcgttgcaaccattgactctgtgtagcaacaccacttgggcatttgttggtatgacatattttagcttgtatacaaccaatactcatcatggcttcacgcgccacattaataacatcgacacccattgaaaacgccattgcagctttaccaggaaagcctaatttaccgctacctataaaaaccacttgtttttccaatccttttttctgaaataatttataaatatctccaaaggcataaacccatggtaatgaaacatgatccgcaaaacttggtggtgcagcaccagtgccaccttcaccaccatctacggtaataaaatctggacctttaccagtgtttttcataatatcggtaagctcttcccattggtctaattttccgatggcagctttaataccaacaggcaaacctgtttcttcagcaatagcttctataaaatctaccatttctggtagtgtagaaaatgctttatgatttggtggagatagaactgtcttaccaacttcaacaccacgaatttctgcaatttcagcagttatttttgcaccaggtaaaactccaccttttccaggttttgcgccttgagacaattttaattctatagcacgaataaaaggattgtcctcaaccaattttttcatcttatccatagaaaatccaccatcatcagcacgtactccaaaataacctgtcccaaaatgaaatacaacatcactaccattactatgataaggggataaaccaccttcaccagtgttatggtatgctccagcaattttgcaacctttgttaagtgagtctattgctctagcagataaagagccaaaactcattgcagatacgttaattacagacccaggacgatatggttttctgcgcttgttgtgtgcaccaataacttttgcacatggtaaaaaatatttgtctttggcattaatatgattgtcttctactttaaaaggtagcatcgcattattaataaatatgtgctgatgcgcataaatatcacgatctgtaccaaagccttcgtagttattttcgcttttagcagaggcatatatccaaccacgttcaatacgattaaatggtaattcttctctgttgttagctataaagtattgtctaatttctggaccaatactctcaaatagatatctaatatgcccaactattgggtagttgtgactaatggtgtgtttgcgttgtaaaatatcgcgaatagcgataatgactaaaactactaatatccaaacccaccatgcaatatcgcttaaaaattctaatatggaatccataaaattaatttaagaagtaaagatatttaaaataaatcgttctcaatgtactgaaactttatctttatagtatgaataaaaaacagaaaaaatggtttttagtaattagtatagtattgctcatttttcttgcaggcatttttgcagctaatcaaatcataaaaaataaaatacaaactaaaattgctcagttaccagatcacattaaactaacttatggagatatcagtgttaattccctctttggaaattttataattgaaaacccagaactagaagtccttggtaaaacaactaacaagcagaatatggctctaaaactagagcgtatcagtataaacgatattggctattgggattacctagttaatgatgagattactatagataaaattattttgaaagaggcaattgtgaattacaagcataatcctttggttgaaaatgagtcttatgacaaagctacttatgaatcattgaagaaaaatttgagtatcagaaaaattgtaataacgaattctgatatttatatgtctgactacgaaactgattcaacactcctaaaaactgaaaaattgaattttgaaatcacaggattgaatctcaaaccaagagaaaaatccgaaaaaattacatataaaaatatcaaaatcaacacaaaagccttaaagtatagcttgaatagttatgacaacatattcattgatgagattgaactgaatgaaaacaatttgaggctttcaaatttaaaattgaaaacaaagcacagcaaaacgaaactttcagagcttttacaatctgaacgcgaccattttaatatggagataccaactgttaactttcaagatttagactttggttttaatgctagtgctaaattttatatcagttccaaaagcgtagtcataaatcaacttagcactaatatctatagagataaattagttgctgacgatttaacatcaaagccgctttacagtgaaatgcttagagatttaaattttgacctcacgttaaatgaaattgaaattataaacggaaaaatctcatatgcagaaaacgtgaatgctaatgaaactgtgggacgactcgattttagtaacgtaaatggaacattcactaatttcggaaataccttcggaggtgctgagacgaccattgcaattaattcgatatttatggataaaacacctttaaaagtcgattggaattttaaggtacaagacccaacagaccgttttgtatttaaagcagatttagctgcaatgaaagcagaccaaatgaatcagtttaccgcaccaaatttaaaagtgaaactagaaggcgaattacagcaaacctatttcacagtagatggtaatgcgcgcacctcaagtattgatttaaaagtaaaatacgacgattttaaagtatctgttttaaaagacaatggtaaggaacgtaaaaaacttttatccggactcctcaacttattcatttcaaaagatagcgacgatgaagccaataaattccgacatggaaatgcagatcaagtagagcgcgatgttacaaaatcagtattcaattttgtatgggtaaacatcagctctggcttactatctgcaatggcaggtgatggtgagaaagaaaactgattagttgtttaagtaatctaaagtgagttgcgtaaacgcttttacacctagcaacatcccactttcatcaatcataaagtctggagtgtgatgcggaaatgcacctttagaatcttcacttggtgccatacctcctaaaaagaaataaattccaggaactacttcttgaaaataagaaaaatcctctcctccagtagtcgctttcatcaattgaacgttctctgctcctgcaacgttttgaagcgatggcaacatttgttctgttaattcaggattattaaacgtaatagaggtttgatttctaaatgaaattgtagcttctccaccataagctttcgctatggtttctgtcatggctttcatgcgtctttctatcattgagcgcatatctgggtctaaagttcttacagtaccaattaattctgcggtttcgggtataatattaaatcgtgttcctgctgttattttaccaactgtaattactgcagcttcatcggttaacttagcttctcggcttataatagtctgtaaaccatcaataatttttgccgaaattaaaatagggtcaactccagaccaaggctgagagccatgcgtttgtttcccttttacattaataacaaagcgttcaaccgaagccataataccaccttttttgtattttaaaactccaacaggtgtgcctgcattaatatgaagtccaaatataacatctggcttaggattctctaaaacaccctctttaatcattagtttagcaccaccttcttcacctggtggaggcccttcttctgctggttgaaaaataaacttaactgtaccttttattttgtctttatgtttagataaaacttcggcagttgccattaaaatagcaatgtgtgtatcgtgaccacaagcatgcatcacaccagtttctgtgtttaaaaattttgttgttactgtagatttaaatggtaaatcattacgttctgttactggtaatgcatctatgtctgctcttaacgcgacaaccttgcctggtaaatcaccttttaatacacccacaactcctgttatggcgattccggtttcaacctctaatcctaatgactttaaatgttctgcaatttttttagctgttttaaattcttgattagataattctgggttttcatgaaaatgtctacgccattcaattaattggtcttcaatattaattatatcttgttccatagtatgttgtgcaaaagaacaggaacatgccaatactactaaagctaaaaagatcttcataagtttataatttgcactaagatattgaaatttcataaaacaaaagtcttaatactttgtttataattattaccatttctctatggtaatacctaatactattattaatttcacaattcgaaaaatttagtctttggaaaagtatctcagtcaacttaatagcgcacaattagaacccactttacagaaagatggcccaatgattatcattgctggtgcaggttctgggaaaacacgtgtgctgacatatcgtatagcgtatttaatgagtcaaggtgttgatgcatttaatattttagcattaacctttacaaataaagctgccaaagaaatgaaaggcagaatcgctgatattgttggagatggagaagcaaaaaatttgtggatgggaacgtttcactctgtttttgctaagattcttcgttttgaaggtcatcatttaggctttccaagtaattttacaatttacgatacgcaagattctcaaaaacttcttggttctatcatcaaggaaatgggattagaaaaggatatttataaaaccaaacaagtatatagcagaatttcttcttataaaaacagtcttataactgtaaaagcatattttaaaaatccagaattaatggaagccgatgcagcagcgagacgtccaaaaatgggtgaaatctacgcgaattatgtagagcgctgttttaaggctggagctatggattttgatgatttattattgcgtaccaacgagctattaacacgttttcctaatgtattggcgcaatatcaaaataagtttcgctacatattagtagatgagtaccaagacaccaaccattcacaatatttaattgttagagcattggctgaccgttttcaaaatatatgtgttgtaggtgatgatgcacaaagtatttatgcgtttcgtggtgctaatattaataatattctgaattttcaaaaggattacgacgatgtaaaaatgtatcgcttagaacagaattaccgttctacgaaaaatattgttggtgctgcaaattcagtaattgaacataataaaaccaaactcgataaaattgtttggacagccaacgacattggcgaaaaagtaaaagtgcatcgctcaatgaccgatggtgatgaaggacgttttgtagctagtactatttgggaaactaaaatgaaccaacaattacttaacagtgactttgcagttttataccgcaccaatgcgcaatctagagctattgaagatgcattgagaaaacgtgatattccttatcgtatctatggtggtttgtcgttttaccaacgtaaagaaattaaagatgttaccgcatatttacgtttaatattgaattcagcagacgaagaagctttaaaacgtattatcaattatcctgctagaggtattggtcagacaactgtagataggttagtggttgcagcaaatgcaacaggaaaaacgatttacgatcttattaagaatatcgattccatttcaataaatattaataatggtacaaaaaataagcttagagattttgtaacgcttattgagagttacaaagtgatgaaccaaacagcaaatgcttttgatttatctgagcatgttactaaaaccagcggattaattagggaactgaataaagatggaactccagaaggtgttacacgaatagataacgtgcaagaattattaaatggtatcaaggattttgttgaaggccagatggaacttgcggatgctggtgattcattagcagaattcttagaagatgtggctttggctacagatttagatgcagacaaaggtgacccagatcatgtagctttaatgagcatacacatggcgaaaggcttagaatttggacatgtatttattgtgggcatggaggaagatttatttccgagtgccatgagtatgaatactagaagcgaacttgaagaagaacgtcgtttattttacgtagctttgacacgagcggaaaaacaagcgtatttaacttatacgttgtcgcgatatcgctggggaaaattgattgatgcagaaccaagtcgttttatcgaagagattgaggatgcgtttgttgacatcgttactccgttaaaagagcaacgttttaacccaatgttagatgaatcaatatttggggatattgaacctaaccgagtacgatttgctaaacctaaaattgccaaaatgccaaaaaagaaagctaaaccaacacccgagaattttaaaattagtgcacctaaacaaatgacgcctgtggcacaagctgagagtgtttctaatacatacgatgaaaaattagtcgttggtgcaaaggttaatcacgaaagatttggtcgcggagaagtcattaaaatagaaggtaagggagctgatgcaaaggcagaaattaaatttcaaaaaggagacgttaaaaaattacttttgcgttttgctaaacttcaaattttgcatacaaagtaattaaactacaaatacatttctataaataattttaacttaattgtggtgtccaataaattcaatccaacccatccatgaccctcgttaggatataatgtaaattcatgtataacgttaagttcttcgagtttatctctcatggcagttccttgagttgttggtattaaaggatctaatgcaccataaaacaagattgttggtggtgctgatgaagtaacttgatgaaaaggactcacttcttctaaaaaagcggttgaggtatcggttccaaatgattcaaaaagttcttgtaacactgggtcatcattatttacataagcaggatctgtaaagttggttggtccaactacactacataccatattagtttggttatcactatcaaaagcgtaactccacaataatgataaatgtgcaccagcactaacgcctacaaatccaatagtgtcagagattgaataataactctcattagattctaaaaaatccacaacacttgtgatatcatcaatttgcattgggtatggttggttgttcgcatctgccaatctgtaattgatatttactactgcatatccagacatttgatctttaataaacgtcttaaaagcattcatatctgctttgtcaccagaggtccatccgcctccatgtacaagaattatagtttttgtttctgtatttctattaggaggtaggtataagtcaaagatctggtcgctgtcatttccatatgcaatattaaatgcttcgtatggtgactcggtatctaaagtatttgaaggattttcatcagtactattagaatcacatgagctgaaaatgcttattgctaatagaaatacaagaaacttaaaagttttcatttttttttatttacattaataacgtcattagtaatatacaaattatactcatatcttagtattataataaatttctaaattatgaaaaagcttttatttctatttgttctattacagttctctctttgctttgcacaacgtccaaatggtgggcgaagaggaaacaacaatactggtcaagccacaaaacaaccatcaacgccaaaatttgaatctgttaaagttgcaggtattttaaaatatgacgctaaaaaagtattaaaaaaattaaaattaaagaagagtgattctatttctaaagttgtaacaagtcacataaatatttataacaccgaaattgagaaaattaaagcaacacataaagatttatttgaagctttggatattgttgtaaaccaaaatatggaagcagcaataaagactaggaatagagaaggaatgcaagaaactagaaagatgattgatgaaaagctgaatcctattagagaagacgttataacgcatcagaatcaattaaattcatcattcgaaacgatactcaaagaagagcaaaatactaagtggctagagtatcaaaaatctcaaatagcaaaattaagaccaaagcgtcgcggcaatgatgccagaaatagaccagataatacttctggcagatctagaagatcaagaggttagttgtatggcagaattcattaaaatatatgaagaaaacccaaatcccaaagccgttcaagaagttgtaaaagtacttagaaacggaggtttaataatttaccctacagatacagtatatggtttaggttgtgatataaccaatataaaagcattagaaaaaattgctagaattaaaggtgtaaagctagagaagtctaatttttcatttgtatgttcagatctaagtaacctcagtgattacgtaaagcaaatagacacagcaacctttaaaatcttaaaacgtgcattgccaggtgcatatacgtttattttgcctggatcaaaaaatcttcctaacccttttaaaaaacgaaaaacggttggtattagagtaccagataattccattgccttagctctagtaaatgcgcttggcaatcccattgtttcaacatctataagagacgatgatgacgttttagaatacacaacagatccagaattaattctcgaaaaatggaataaacttgtagatattgttgttgatggtggttttggcggtaatgaagcttcaactattattgacctatctgttgagcctgccgaaataattagggaagggaagggaagtttagagattttttagtcaattgaaactcgacatcttttattgttctatttgtaatagatttttttttacatttataatccttatccgcttaagactaattaattcgtgctttttataatggctatttaagtatgttatgatcccaaaaacggtcgaaaaagaaaaggcgacatttctgccaccttaaatgttttcacaacggaataatccttattgtgatttgctttaacaatctagaaaactagctgttttttatgaatacggttttccataaagtaaaccggttgtgattttttaattttaaaaaagaaagagtttcatatgaaaaaactctttctatgaaagcaatacacaagacatactaaaaatatgctgagaattgaaataaatcttaaatagtttaaagtatcagaagcaaggtttagaagctattttcaatggtggatatcacaaccactttcagatttaagtacaaatataataatctatatttagtatgtaaaaacattttattatttttactagtatttgaatacaagctattaaaaaataatgattaattacaaaaataaaaaaccactaccgaagcagtggtcaagattttctctgtggctctatggccttattgtgaattgtctttcagataacaaatataagaaaatataaattataaagaatttggattatgaaaaaattaggtttggatttgggcagttcgtcaattggatggtttttaagagaagatgaagaaatattaaactatggttcaattatttttgattcaggaatggttaaagggacttctggttattcatcaccaactaaggacaggagagaataccgtttaaaacgtaatcctattagggctagaaagtatcgtaaaaaactaattctacaaacgcttgttgataatggaatggtgccattagaaagttatgaactaaaaaaatggactaactatagaaaaggaaaatataaagaatttccctcgaattcaaattttaaagattggttagcttgtaattttcgatttgatggagggacagtttataagaatccatatgatttaagggttaaagccataaatgaaaaactgacaaaattagaattaggaagagcgttatatcatcttgctcaaagaagaggattcaaagacattggagaaaccaacaaagagacccaaaaacaaattgatagaagaaaggaaagcggttttcaagatgcgctaagtaatcatcgtacaattgccgaagcacttcaaaaagaatatttggaaaaaggtatgcgagctagagataattatccttatcgtgacgaatatgaagatgaattattgcaaatactatcgaaacagggtttttcgctcaaaaaaaatgataaaggtaagtttaaaaacaaatttgtgagtgatactcgtaaggctataatttggcagcaacctttaaaaactcaaaaaggtaacataggaaaatgcacgttagagcctaaaaaaagaaggtgttcagtttctcatcctttgtttgaaactaatagagcttggcagtttatcaataccattaaatataagaaaaatgcagatgatagttttgaatttattccacaaaagtatcgcgatcatctttttcattctgtttttctgaatcaatctggaaatttcaaatttgaaaaattaagaaaagcacttgataaattgtttcaaaagaaaatgatttataactacagacttgacgaaaagaaaggaacttatgaaacaacaatagcaggaatgccattttgtaaaggtgtaattaaaatccttggtgataaagctttgacagatatattgagtattgaagaatatactcaaagttcaatgccaaaaaatcacgaaaattattccttgctcgatatttggcataatatcacagaattcgatgatgaaaatctttcagagtttggtaaacaaaaacttaatcttgattttattgagcgtaaaagaaaaggggaaattgaaagtacttcgcctttattaattcttaaagaaacattgccacaaggttatggcaatttaagtcagtttgttttgcgtaaaattattccattactaaaaaaagggtatatctacaatgatgctgtattgttagctaaccttaaagaagccttaggagttaattacgaacggcaaaaggataaagtaataacagttttgaatgaagctacaaaattttataaagagcataaaaccacaattattattactaacaaactgattgaaaattataaaggtgaaattgaggcaaatttaaatggccaagaaaacacgctttttgctcaaggagattttcaatacttgcttaaagattcagataaagatgatattattaaagcatgtataaaccattttggagaaaatagatggaaaaatgtgccaaataatgaaagtataataaacgaagtaggtaaagaataccaagagtttttctttgataaaaatagagcttataggaaattagaaactcttcaagatatttttgaagatttactcaataaggaagagataatttttaagaaaccactctatcatcattccaatagagataatatttatggaaatcctattaaatatcgaaatacagatatcgaaattttgccattagctaaaaccaattctataaagaatccaatgttcaacaaggctatgagcattttacgtaaattggtaaatcaacttattgtagatggtgttgtagataatgatactgaaattattgttgaagttgctagagaactaaatgataacaataaaagaattgcaattgaacgttaccaaaaacaacgcgaagcaaaaagaaataaaattagagtgtttttagaagaatacaaggctaaagaaaaatcttctcttaatgtagaagaaaacatccatcagtttgaactttgggaagaacagatttttgaagaaaccgaagatgaaacaggtagtgcgtacaagaatgttgaccgaaaagaaattcttaaagaaaataacgccataaagcgatacgaactttggatggaacagaaaggtcagtgtatgtatactggtaaaatgatttcaataagtcagctgttttcatcaacaaccaacatagagcacacaatacctagaaaattacttccagataatactttggcaaatcaaacaattgcttttgcagattataatacaaatataaagggaacggaattacctgttcatcttcctaattatagtaaaaacgttgcaggagtaggaacggaaattgaaccaagacttcaacaatggaaaacaattagagatgggtttaaaaaagcttttgaaacaaggcaaaagccaaatggtgctgaggatgaaaatacaaaaaacatacgtattcaagataagcatttctataggatgcattatgattattggaatgataaattagatcgttttacgagaactgatgtaaatgataaatgggcaagaagacaattaacagatactcaaaatataagtaagtacgcaagggagtttttaaaaacctatttttttaaagtagctgttcaaaaaggttctacaacggcagaatttagaaaaatgcttggattggaagacaaggataatcaaaaagatagaaacgctcatacgcaccatacaacagatgcagctgttcttacttatattcctacaaacgctagtagaagagataaactgataaagaattcttttgcactaaaggatgaaactgataaacagttacgatatacaccttaccctaattttaatgcgcaatccattaaacacaatatagagaataatacgcttatttataatttcacaaaagataatattactacacaaacttttaaaaaagtacgaatagctggtgaaattcaatataagagagatacaaatgggaataaaatactatctaagccattaatatctagaggagatactatacgagcatctttatttaaggattctttcttagcaaaaattagagatgtggaacgatttgatgatggacagccaaaacgaaatgaagataatacggattgggtttataaaaaaggtgaagaagaatttatttttgtaaagaacgagcctatttcaaaaataaacaaagctaaaataaaagatatcgttgatccagaacttgctaaactcgtcgaatcccaattgggaaaggataaaattttagactggcaaggtaaagttattagacacgtccgaattaagaaaaaagctggtagacaagttaagtctcgtgttgattataaaagtgaaaaagattataaaaattcttattatgctgaaagtggttcaataccgtatgggattatgttgtttaacccaaaaagtgaccaacggattttattgcaagcacacgcttatcaaatagcagaggtgtttcgggaaaaaagaaaatttgatattgatttgttcgttgacaaattctatcctgattattctagttttaaaaaattactattgagagtagggcaaaaccttattgtattaaataatgatgaggaattcgagaaacgcttagaaaaagaatttcagaaaaatagactatacaaaattgtaaagattgataatggcagtctgtggctcaaatatcatcttacagctatagctgataatgacttagatttagttgtaaaacagaaaaaagatgaattgctttggaattacgaaaaggaattgggattaggtaaggttagagaggatgattccataaaagatttaaaaactagaaatgaagtttatgaacgtaaaaaatttagtttttctagttataatgattttagaattaaaagaatagttgacaactttggaaaacaaaaagcttccaaaataaagtcagaactcagtaaatacaaaaaagttgcttcatttatagaggttgaaggagaaacacctttgttaaaattaaatacttctaacagttggaattttctttatgaaaatacagattttgatatttcaatattaggaaaaattaagtttaaagaatgataaaaagaaccctatttttcggtaatcctgcctatttaagcaccacgaacaatcaattgattctaaaatatcctgacttagaggaagaaaaaaccatacctattgaagatttgggatttgtggttttagaacatccgcaaatcaccattactaatggtttattaatgaagttagtacaaaataaaacagctgttattacttgcgacaaacaacatatgccgtgttcgttttttcaacctttggttggtcatagtgaacaaaccgaacgtatgcgacaccaattaaatgctagcatgccattaaaaaagcaattatggcaacaaacggtaacgctaaaaattactaaccaagccaatcattttttatctagaggaaaaaatgcattacgtttaaagcggtatgccaaagacgtaaaaagtggcgactttggcaatgaagaagcccttgcagccgctttttattttcaaaatctttttgatattaaaaactttagtcgtaatcaaaaagatattgcgcccaacaatttacttaattatggttatgccatattacgagcagtagcagcaagagcattggtaagtagtggcttgttgccatcggtaggcatatttcatcataacaaatacaatcccttttgtttggcagatgatatcatggaaccttaccgaccttttgtagatgctttggtctatgatattgtagaaagtggttgcaatattgaagaactaaaccgtaacattaaatctcatttattaatgattcctgctatagatgtgattatagatggtaaacaaagtccgttgatgaatgctatgagtcgcacaacatctagtttgtatgattgttttgaaggtagcagaagaaaaattttatatccagaatttagatcatcattacaaacctttgcaaactaattgaactatgcactatggaatcttatctaacccgattaaatcaatatagaagtatgtgggttttggtctttttcgatttacctaccgaaaccataacggaacgtaaagtagcgtctcggtttagaaagaatttaattaaagatggttttgcgatgtttcagtttagtatttatatgcgtttttgtccaagtcgcgaaaatgcagcggtacatattaagcgtaccaaaaacgggttgcccaaaaaaggaaaggtctgtattatgcagattaccgataaacaatttggaatgatggagctttttcacggccaaaaagaaatagaacccgaaacaccaagccaacagctagaactattctagaaaccaaaatgtcacactgagcgcagtcgaagtgctattgacagttgaaaattttcaaatcttacaggtagttttaaaaagcagaaaaccagcctgttacagctagtattctgcgaattatccataaaattaaggaactgaaagcaattcacaacccgtgtgtgttttaccgatacctgagcgattctgcgaattatccataaaattaaggaactgaaagcaattcacaaccacgaagccatttatctaatgctcctagattctgcgaattatccataaaattaaggaactgaaagcaattcacaacaagcaaagatgatttaggctcaaccatgtatctgcgaattatccataaaattaaggaactgaaagcaattcacaacgctgttatatttgaagaagatagtgttatatctgcgaattatccataaaattaaggaactgaaagcaattcacaacggattgcatgtgatttctatatgcatctagtctgcgaattatccataaaattaaggaactgaaagcaattcacaaccctggtctaaaacactctccttagaatgtttctgcgaattatccataaaattaaggaactgaaagcaattcacaactattggaacatcttgtgttactgttacgtttctgcgaattatccataaaattaaggaactgaaagcaattcacaacccagcgtgaggtgtctaaggccttacaaaatctgcgaattatccataaaattaaggaactgaaagcaattcacaacaattccatagtttttaattttaatatttgttctgcgaattatccataaaattaaggaactgaaagcaattcacaacgcgtaaccctgtggtgttgtattaccatgatctgcgaattatccataaaattaaggaactgaaagcaattcacaacggcggcttgtaaggtacatcaaaatgcttttctgcgaattatccataaaattaaggaactgaaagcaattcacaactgcttgccatttatcaagtgttttaatttctctgcgaattatccataaaattaaggaactgaaagcaattcacaactatctacgcttgtaagcacgtaaccaatcttctgcgaattatccataaaattaaggaactgaaagcaattcacaacccatctactgttttggtatctccctctttttctgcgaattatccataaaattaaggaactgaaagcaattcacaacgtaactaatcttgaagaaaaagccgcttgttctgcgaattatccataaaattaaggaactgaaagcaattcacaacttacgcagaaaaagcataatgacgggtttttctgcgaattatccataaaattaaggaactgaaagcaattcacaacggattgaggcttcggcttccatgttctttttctgcgaattatccataaaattaaggaactgaaagcaattcacaacagtaataatggaagtgttgagcaaatagattctgcgaattatccataaaattaaggaactgaaagcaattcacaacttctatttgctcaatcatttctatatctatctgcgaattatccataaaattaaggaactgaaagcaattcacaacaaagttgtgatgctcctacaattcaatttatctgcgaattatccataaaattaaggaactgaaagcaattcacaaccggaaatggattttctactggcattataattctgcgaattatccataaaattaaggaactgaaagcaattttcaacgataaaaagagtattaaagagaatcgaaattttttaagctggctttaatatcttttggaaacgtttaccatttatgtaaaaaagaactagtgatataataccacaaaccaaaaagccaataaaaagtggagtcacagagtctactacaaaacttcctatataatttgcaattggtacagccattacggtagaaataaacccgtttagagcagatccaatgcctgcaatatgtcccatgggttgcatggctaaggcacgaagattgccaaataaaaatccaatggtaaaaaactgaatcgcgaaaaaagtaattagaactgcgatgcttggcttacttccagaataaaacattataataaaaactaaagacgtcaacacaaaactccacatggcgatatgtacaatacgtttcatcccaaatcttacaacgagttgactgttcataaatgtagctagacctactgaaatagctaaacttgcgaaaatgagaggaaattcttccgctaagccatattgcttttcaaagatttgttgtgaggtgcttaaatacaccataaaagaacctgtaataaatcctgatagcaacgtatagattactgcagattgaattttaaaaaactgtacggttcctgttttaaaaatagataatcgatacggtattttatatttatcctttaaagtttcgggttgtcttaaccaaaaccataagactaccaaaataccaaaagccaatgtgaacgtaaatatgaatttccaattgtaatggttcattaaaaattgccctaaagtcggagctacaactggtactaaaataaataccataacaacaatagagatgattttggccatgtagtcaccatcataagaatctctaatcattgcaatactcatagttcttggtgctgctaagccaatgccttgcagcacgcgtccaaagagcatcatttcaaaattacgagtggttaaacagatgatagaggcgatgataaagacaacaaagccgatataaacaattggtttacgaccaaaactatcggacaatggaccaaaaatgagttgcccaaaaccaagacccagaaaaatataagtgattaattttggagcctctgtgatgtcagttacactcatgtaatcaccaattaaaggcaatgccggtaaaaccgcatcaatagaaagtgccactatagacatcaatgctgccattaatacaacaaactctaattgtgatcgtttttgcatgccgcaaaagtaaattaattattacctatttggggatttgtaaacgtatctttgaataaatttttcgattagtatgcagcattttaaggataagccaaaaagatctaaaacggataagccaaaagttactttaaaaacagcgttcaaaactattatttggccgagacgtaatttagtattcttaggtcttatattaatcgttattcgtagtcttgcaggttttgttttgccattggaaagtaaagtcttgttagacgaagtggtcccaaataaagattacaatcagctatacactttaattggaatcgtaattggtgcgatactcgtacaggccataacatcttttatgctaacaaaagtattgagcatacaagcacaatatttaattagtgaattacgcgcacaagtacaaagaaaagtattgtcattacccatcagtttctttgataatacaaaatctggtgcattagtatctcgaataatgacagatgttgaaggcgttagaaatcttatcggaactggtttagtccaactagtcggtggatcatttacggcaatcgtcactttagtaattttattgagaatgaatgtttggatgacactcttcacgtttataccattatctatttttgcatttattgctttgagagcgttcaaatatatccgtccaatatttagagcaagaggtaaaattaatgctgaagttaaaggaagattgaatgaaactttggcaggtgttagagtaattaaggcctttaatgctgaagaacaagagaacaaggtttttgaaaaaggtgtggataatatttttcagaatgtaaaaaagagtttgacagcaacagctataatgacgagctcatcaacatttctaattggtttagcaacaacaggaataatgggtataggtggtcattacatgattaatggagaaataacacctggtgattttttacaattcacatttctattagcatttatggtggctccaatagtacagatgagtaatatcggaagtcaattaacagaggctttggcaggattagatcgtactgaggaactgatgaatttggccgctgaagatgaaatggaagagcgaactattatgcttgaaactataaaaggtgatataaaatttaacaatgtatcctttgcatatgaagcaggaaaacctgtattacataatataaatttcgatgctccttctggttctgtaatagcattggttggtagctctggttctggtaagtccactatagctggtttgtctgcaacttttttaaatccagaatctggaatagtcaccattgatggtcaagatttatctaaggtaaaactcagtagttttagacaacatttaggcgtggttttgcaagatgaatttttgtttgaaggaagtattagagaaaacatcatgtttccaagaccaaacgctactgaagatcaattgcaaaatgcagtaaaagcggcttatgttaatgaatttacagatcgttttgacgatggcttagaaacattgataggtgagcgtggcgttaagttatctggaggacaacgacagcgtatcgctattgcgagagcaattttagctgatcctaaaattattatcttagacgaggcaacatctaatttagacacagaaagcgaaggattaattcagaagagtctatcagaattaacacataacagaacaactattgtaattgctcacagattaagtacaataaaacgagcagatcaaattttggttatagaggcaggtcgaataatggagcgtggtacacacgatgagttattagcaaccaaaggacgttattatgatttgtatacgtttcaagcaaaaatttagtagacacttattttaaattgagaattctataggcttcaccttacataatttaagttataaaggcagtgcagcggttcttcttaaaaacggttttgagatttaaggacctatgcgcagattattagaactactgaaggtgaagaggtagattttaattattatagacttgtgtttaattaaattaatataaaaaatcttaatgctttagagagcacaaaagctcaccattgctggtgagctttttcaaacgaatcacttaactaacacaattaagcaattaatatcaatccctcagattaatatttttgagaaatcattacatatctttttcattgctttaagtttaatttacagccttacaacattgattattattgcatctgcaatatttctgattatacagatgtaaaacaaataaggtcatagcaggtagataaataatgccttcaggtatagtgtacaattgaagtttttcattgattattaataaacataaagctatccaattgaaccataaactatatttaacccattgtttggaactattgttagaagaccaataaactgcaaaaaatgagattgccagaaaaacgtagtctattatagtccaccatgtcggtgcactctcacaacaagtagcagaacaggtttgtgcaataaatataaatggtgtagctacgcagtgtattaagcaaagactgctcgctattgccccaatagaatctgaattattttgttgaaaggtttttgtaatcatataaattaatgcaacttagttgcaaatataataataaatttgaaattgcaacatagttgcactaaatttgtgttatgggtataagaagaaaaactaaatctgtaaatacaatcttatcaatttttgagaatgggaaagaagctttatctgttgttgatttagtagaacagttaacagaacagatgaataaaactacagtatatcgcattcttgagcgattagaaaatgatggtagtattcactcctttactggaagcaatggcttaaagtggtatgctaaatgtaatgaatgtactgctcatcatcataatgatgtacatccgcattttgaatgcaaagattgtgggaaagtagagtgtctagaggtagatgtacctatcccaaagttgaataatcgcaatattcagtctgctaaagtattatttactggacaatgtgctaattgtatggtttaagaaattatatgattctacaaaggaatgttcccatgcttacgttgaggctttacaacggctttattttcaagcatgctaaaagctttaattaatttacgtcttgtattatgaggtaatatcacttcatctacaaaaccacgttctgcagcactatagggattagcaaagagctccgcatattcagcctctttttctttccatttggcctctttatcttctgctttagaaatttcgcgtttaaatataatttctgctgcacctttggctcccattacagcaatttcagcatttggccatgcaaaattcatatcagctccaatatgtttagagttcataacatcataagcaccaccatatgcttttctggtaataactgtaattcttggaacagtagcttcgctaaatgcatataataattttgccccattcgttatgattgcattccattcttggtcagtgcctggtaaaaaaccaggtacatcttctaaaaccaatagtggaatattaaaacagtcacagaaacgcacaaaacgagcagcttttgttgaactgtctacatctagaactccagctaaaaacataggttggttggcaacaataccaacagatttaccacctaaccttgcaaaacctacaataatattctctgcaaaatttttatggatttcataaaaagagtcttcatcgattatgccattaataacctgatgcatatcataaggtttattggcattttctggtacaatggtgtctaaaatgtctcttatttcttcttcaatttcaaaatccaaatcttgaggcttctctttattactctgtggtaaatagcttaataattttttgacatcttctaagcactctacatcattagctgaggttttgtgtgcaacaccagattttgtagaatgtacagaggctccaccaagctcttcactggtcacttcttcgttagttactgtttttacaacgttagggccagtgacgaacatataactcgtgtcttgtaccattaatgtaaaatctgtcatcgcaggcgaatacacagcgccaccagcacaaggtcccataattgcagaaatctgaggtatcactccagacgcttgaacgtttctataaaaaatgtcagcataaccacctaaagaacgtacaccttcttgaatacgagctccacccgaatcattaagtccaatgataggcgcaccaacattcacggccatatccataatcttgcaaattttctccgcatgtgtttcagatagagaacctccaaaaaccgtgaaatcttgagcaaaaacatagattaatctactgtttatagtgccataaccagtaactacaccatcaccatagaattgttgatctgccattccgaaatcttttgttctatgagttactaaagcaccaatttcttcaaaagagccttcgtctaaaagatacattacacgttctctagccgttaattttttcttttggtgttgtttatcaattcgagcttggccacctcctaatttggctaaggctagtttttcgttaagtgtttttattttgttgtccattctatatttttttcttgcaatggcgcaaaaggcgcaaagctggatgtggtttaattttgcttactgcttactgcttactgctcactaaattcggtactcttaataatttctgatcttctaaatagcgctttaatgcaatcttcgctgcaatctcagcttcttttttgtgctgttcttctaataggctaggtgagtagtactgctttacaaagtgcgtatcaaaattcccacttctaaaagcgtcgtgttcacagacgaatcgcccaaatggtaacgtagtttctacaccttttacatggtaattatcaatcgcttttatcattaactcaatagcttcttcgcgtgtatctccataagtaatcaattttgatagcattgggtcgtaataaataggaatatccataccttcttcaaaaccattatctactcttatattttcacctactggtaatctatagacttcaagatttccaacacttggtaaaaagtcattcatgggatcttctgcgtaaactctgagttctaacgcatgaccattaatttttaaatcttcttgcttcagatccagttgctctccacgagccaccttaatttgaagttcaaccaaatctacaccagcaatccattcagaaactgggtgctctacttgaagtctcgtattcatttctaagaaatagaaattcaggttttcatctaaaagaaattccactgtaccagcattgatatagtcacaagaccgcgcaacgttaatggctgcttgtcccattttttctcttaactctggcgttaaaacggcagaaggggcttcttcaactactttttgatgacgacgttgcacagaacattcacgctcaaaaaaatgcaaacaattaccatgcatatctgccattacttgaatttcgatatgtcgcggtgatgcaacatatttttcgatgaatacagaaccatcaccaaaagcatttgtggcttcactaatggctctgtccatttgagattcaaattccgcttcgtgttctacaatacgcataccctttcctccaccaccagcagatgctttaattagaatgggaaagcctatatttttagcaatctttttagcttcaggaatatctgtaatcgcttca

SEQ ID NO: 3368 - DNA, 24287 bp, synthetic construct
  variation 8785: note = note, n is a, c, g, or t
  variation 8854: note = note, n is a, c, g, or t
  variation 21094: note = note, n is a, c, g, or t
  variation 23420: note = note, n is a, c, g, or t
  variation 19150: note = note, n is a, c, g, or t
  variation 19072: note = note, n is a, c, g, or t
  variation 19138: note = note, n is a, c, g, or t
  variation 19060: note = note, n is a, c, g, or t
  variation 19102: note = note, n is a, c, g, or t
  variation 22604..22607: note = note, n is a, c, g, or t
  variation 1166: note = note, n is a, c, g, or t
  variation 19145: note = note, n is a, c, g, or t
  variation 8830: note = note, n is a, c, g, or t
  misc_feature 1..24287: note = Synthetic
  variation 8839: note = note, n is a, c, g, or t
  variation 10731: note = note, n is a, c, g, or t
  variation 21043: note = note, n is a, c, g, or t
  variation 19177: note = note, n is a, c, g, or t
  variation 8803: note = note, n is a, c, g, or t
  variation 16662: note = note, n is a, c, g, or t
  variation 19260: note = note, n is a, c, g, or t
  variation 21076: note = note, n is a, c, g, or t
  variation 19158..19159: note = note, n is a, c, g, or t
  variation 1945: note = note, n is a, c, g, or t
  variation 19268: note = note, n is a, c, g, or t
  variation 8845: note = note, n is a, c, g, or t
  variation 19116: note = note, n is a, c, g, or t
  variation 13599: note = note, n is a, c, g, or t
  variation 8751: note = note, n is a, c, g, or t
  variation 23454: note = note, n is a, c, g, or t
  variation 19231: note = note, n is a, c, g, or t
  variation 5099: note = note, n is a, c, g, or t
  variation 8827: note = note, n is a, c, g, or t
  variation 19224: note = note, n is a, c, g, or t
  variation 9908: note = note, n is a, c, g, or t
  variation 22609..22613: note = note, n is a, c, g, or t
  variation 19168: note = note, n is a, c, g, or t
  variation 21079: note = note, n is a, c, g, or t
  variation 8743..8744: note = note, n is a, c, g, or t
  variation 22627..22630: note = note, n is a, c, g, or t
  variation 21060..21061: note = note, n is a, c, g, or t
  variation 22593..22597: note = note, n is a, c, g, or t
  variation 8746: note = note, n is a, c, g, or t
  variation 8755..8756: note = note, n is a, c, g, or t
  variation 22615..22625: note = note, n is a, c, g, or t
  source 1..24287: mol_type = other DNA
  variation 8851: note = note, n is a, c, g, or t
  variation 19087: note = note, n is a, c, g, or t
  variation 21055: note = note, n is a, c, g, or t
  variation 8848: note = note, n is a, c, g, or t
  variation 8737: note = note, n is a, c, g, or t
  variation 8764: note = note, n is a, c, g, or t
  variation 19107..19108: note = note, n is a, c, g, or t
  variation 19174: note = note, n is a, c, g, or t
  variation 8818: note = note, n is a, c, g, or t
  variation 9535: note = note, n is a, c, g, or t
  variation 19264: note = note, n is a, c, g, or t
  variation 19171: note = note, n is a, c, g, or t
  variation 3665: note = note, n is a, c, g, or t
  variation 8776: note = note, n is a, c, g, or t
  variation 19255: note = note, n is a, c, g, or t
  variation 8806: note = note, n is a, c, g, or t
  variation 19189: note = note, n is a, c, g, or t
  variation 19273: note = note, n is a, c, g, or t
  variation 21073: note = note, n is a, c, g, or t
  variation 19162: note = note, n is a, c, g, or t
  variation 8791: note = note, n is a, c, g, or t
  variation 8836: note = note, n is a, c, g, or t
  variation 5019: note = note, n is a, c, g, or t
  variation 3428: note = note, n is a, c, g, or t
  variation 19237: note = note, n is a, c, g, or t
  variation 19186: note = note, n is a, c, g, or t
  variation 8788: note = note, n is a, c, g, or t
  variation 8800: note = note, n is a, c, g, or t
  variation 8824: note = note, n is a, c, g, or t
taaacttattagtttggagttataggatgttttttttagttgtttaaactctttgccataagttgattcatatttttttgattgtccgtaagaaaaatgacaaaagaaaagaaataacaaaaaaaatctaaacttattatgttctttttttatatgaattcgcattaaatacatttaacaaataccaaatgtaaatatgctgcattctattgattaattaataaatatcagttaagtttatgaacacagaagtgttaaactttataactctaaaatacttaagttcgaggattaaattttatttcaaataaggttcctttttcatctaatcgtttaatagttccatcaagttgagtaacaaaaatcttaattaactccattcctaaactaccttcttctttttctaacattcctttttccattccttttccattatctccaacaagaagggtgtatgatttttcttttttatctatagttaaattaataacgacttttcctttgttagcgccaatgaaagcatacttcaagacattagagataatttcgttaagtaataaccctaatgggataagtatgtcaattccaaactttactttttcaattttaatatctagaaaaatatcacaattaatggaataggtatcaattaaatcattggttaatgccataatgtaatcttgaaaatcaatgtgagctaaatctccagtttgatacaatttttcatgaattaaagccatagaacggattctgttttttgcctcatcgaataaggccaatgcatctttatctttagtatagccagattgaatacttaaaaggctgataataacctgcatgttattttttactctatggtgaatctcttttaataaaatttccttctcatctctttgagattcaattaaaatagttctttcatgtaccttttcttctaactctttacttattttacgttgttgagcttctttaaaagaagatactttgaaaattgcataaaaaataaggagtgtgaatgctaatattacccaccattctttccaccaagcgtttgctattctgaaactgtaagttgcaggttcttgattccataagccatcttcatttcgggctcttacattaaatgtataatctcctgggggaagatttgaataagtagcgtaagntttatctgtagctttataccattggtcatcaaatggggttagtttgaatcgatattgaacatcttcagggaaagttaaatttatggcagaaaattcaaatgttaggtgattttcattatggtttaagacaagattggcaggtaaattattccacttaataagctctttagaataatttaaccaatctacatcttcaaagtataatttaagattgtttatatgtattaatggctcaaaaacattagttctgtcgtgagtagggttatatttaattaggcctttaactgtgccaatccacaaattattttttctatcttcaaatatagctctactattacattctacacccttaaacccctgtttagatttataattttttattctggatatttgcccataactatcaaaactaattctatcaataccattgtttgttcctatccataaatttccttttttgtcaccgtgcattaaatagattacactagaagataatccatctttaatggttattggtttaaaatcaaatccatcatatctaacagcacatctatcggtaccaaaccatattttaccatacttatcttcagtaatactaccaatataagaattgcagaaacctttggcattagcataactcgtaaatttattatttgcatatttggttactccgtttcccgttcctatccatatatttttttcagaatcttgaaacagcgaatgtatataatcatgagaaagtccatctttagaagtgtagtttttaaaagatgagtaancatatttagaaagacctttcccatatgttcctatccataaatttccggacttgtctaatagcaatgttcgggtattgtttgaaggcaaaccatctcttactgtgaaatttttaaaaactccatttttatatcttgttaacccttcactagttgcaaaccataaatttcctttattatcaaaaagagaagccctaacagtattgcttcctagcccatctgctgtagtgtattgagtagaaattccatctttatatttataaaccccctcatcggctgttcctatccatatatagccattatcgtcagcagtaatgctaaaaatactaggactatttaatccttgaattttattaaaataggtgaaagctttattcccatatttaattaatccggctccatttgtacctatccaaatattacccgatctatctaaaaatagtgttgttaagctattagttatcaatccattttttttactaatatgagttattactccgtttgaatttaatatataagcacctgtatttatagtagatacccatatatttttatcattatctataatgatatcagttactactggattcaatccactaaataaatttttgtcaaattcaaaatgattgttagagacacttcctactagtaattttttaattcctttatctgttccaataaaataattcccatcagaatcttcttgaattgcagtaacattattgctaggcaatccatttttagtggacatattgataatgtcattttttctaaatattgttattccttcattggtcccaatccatatgtttcctttagaatcttcaaaaatttcatttattttattacctattagtttattgttttctttggtgtaattggtaaatgttccatttttatatatgctaattccttcctcgcttcctatccaaactcttccttttttatcagtaaaaactatattatgaccgttttcattaagtaatccatctttttttaaaaaagtaaaaaagttgcgtccattatattttgtaacacctccccacgttgatgtgatccagatgtttccatctagatcttcacttaatccagtaaccatgtttccagaaactccatctttttctgagtattgggtgaagttaatcccatcaaatttacagacaccacctccagcagtaccaatccataaatgccctctggcatcttgaataattgcattaactcgagattgagagagcccttcttctacattaaaatactcaaaattataagtttgagaatacgaactatagcttaaagaaaatgtaaggaatagggtaatatataagtgtaaaagttttataattttagtttaaaatagtgctatacaataataacttaaataagttagttttaaaaataaacaattaaccacctaccttttttgtcttagaatagcccatatcaattaaaagtgcataaagtttatctttaaattcaccttganttatgatttcgctgtctttcgcagaaccaccaacaccgcattttgattttaataatttcgctaaatttttcatgtcattattagttccaacaaaacccacaattaaggttactgactttcctttacgccttttacggtcaactagtacttttagttcctgtttatctttttctaatgtatccaactcctcattttcatcatcatagttgtagtttgagtttgttgaataaacgatgntttttttactcatttacgattacttttaatgatttgtgcataacttctatttcgagtttattatccatttctataggctctccatcaatatgtatttttttttcaggattaattaagatgattttttcacttgtaatgacctgtgtatatttaaattgatgaatttttttacttaaaagataatacccgaaaaccggtaaatatattagtggaaattttcgaacggaaattaattttacaagcccgtcatctattttagagtttggagaaattaatatgttattaccatattgttttgaattagaaaaagtaacaagcattcctttttctatggtttctttgattccattataatgtactgtatagtccaatgatttatattttataaaaccctttaaagctatttttaaataagtccaaaaccctcttttactgacctcatcaaatttccagctgatataggcatcaaaaccaactccggcagttcctataaaataatcgttattgattttaacaacgtcaattaatttagtttggccttcattaataagcataattgcttttttaatgttcattgaaattttaagatctctcgctaatccatttcctgaaccggcaggtataatagctaacgttgtatttgaattaataagatttttccctatctcattaactgttccatctccacctacagcaactataatgtcatatttattaacattattaacactaatttctatggcatgttttgctcttttagtatatgctatgtcaatatcaaacttggttttatccaagtgagtactaactaatttctctacaattttttgctttccaactccagaaataggattaataatgaataatattttctgtttactgttaatcactattttattttgagatagataattgattgttaatcaatcgattgttgtattgttggatgattccttttaaaagtttctctgttttttctttgctgtttttttgttgaggattcattattccaatgagattttttcttagtaaagaatctttagccatgtcgtaatattctatggttttttctccatcaaaaattaaaaaatagttgccgtgagcaatttgatatgaattattgacatagtttacagtaaatttttcatcattattaaaagcattgtttccaaatgtaattatcggtttttcaattcctgttaaccacattaatgttggagtaatatcagcgtgctgaaaatagttgtcgctttttccttttaaataagatgaaggggcataaatgaatgcaggaatagcataacggcctaacctagttttgtatttagcagtatttgattgtgcagaatgatcngctgtaaaaataaaaatagtattgtcaaaccaaggcattttttgagcagttttaaaaaattgctttagagaataatcagnatatcctactgtttcgtgtaaaggtaagtcgcctttaggaaatttaccaatgtgatcttttggtaaagtgtatgggtgatgtgatgatacagtaaaaatagtactgaaaaaaggttgctcttttttatttaattctgtagcataatattgtaaataaggttcatcaaatataccccataagccatcgtaatctctttttttgtttggatattcatctaacccaaaataattatcaattcctacaactcctacaaaaccattaaaacccatcgttccgtttgcacctccatgataaaaagaagtattatagccttcttctttaagtatttctggcaatccgtttaatttatttccagcataatttgataaaacataaggagaactcattaattgagggagaccagctaaaatacatggtaaggcttcaattgaacgctgtccatttgaatatgcatttgtaaaaacataactttcatgtaaaagagaatctataaaaggagtataaccttttccattattaaatcctccaacatattctttagcgaaactttcgagaataattaatacaatgttttttccttttaaagaacctccatcgataatttctttttttggcgaataaatactttcaatttcttcatcagaaaaataagtgataggttcaatattatctatgagtatggttttaataatagtaaaaggagtatttaatacaataggtatgttttgggcttgagtatattgcccagcattaacgatgtcaataggtttgtattgaacgccacccctcattccaataactgttaaccctgaaaatattactagaataatagaatgaatgaaatagtcttttttgtaaaaagggtaaaatagggcattcagtttacaatattttttatgcaaaaaccaagacaggataagtaagcctacaaggagtatatagtcataccaaaaatcaattatataatgtggtaatagattgaaaaagtcatttcctgttccaatcattccaaaaaaatcggcagtggttttttttaatgtaaaatcaaaataagctacatcaattaagttaaggataattgccaaagagtttgctgtataaaaacataccgctaaaattttttgataccacttaaaatttctaaatgaaaatggaattaaatgtaatatgataagtggcgaaaaaaggaatgaaatagctactaaatcaaagcgaattccgtaaagaaataagtcaaatgaaacatcagtaaaatgatggttattgaatatatagaataatattctgcataaagaaaaaatgacaaaggcaatgcctaatttctttaataaaagtttaagatggtttaagtaagaactcattaatgaaagttagaattaatgtttctctaattctttttcatcgttacagccacatttaccacaatcgtgagattttcttttaacaataaacttgataaataaataaaccaaggctattgtagcaatagtaaaaacaattatttcttgcataacttcttagattctttgtgatttgatttttttgcttctaaaaaaattaatatataacctaattaatagaactgttgagcctattataaaaaaatcaaataatgtatgaccttcaatttttattggaagaaatcctttaattgctagcaataaaagtgagttacacagtaaccatagtggagttatccaaaacaaatttatttttaaaggagagctaaaccaattattttttttattttccattttaaaatgaatttattgcaacaattaacaataagctcagtaaagttacacaatttcagttaactttgcctccgataaattcaataaatatgccactaacatacaatcgtagaaagtattctgatgatgttttaattaatctatacaagggaatactaaagcctcgattaattgaggaaaaaatgatggtgttattacgtcaaggaagaatatctaagtggttttctggaattggccaagaggctatctcagttggagcaacaatggcattaaataaagacgaatttattttgccaatgcacaggaatttgggggtatttacctcaagaggtattcctttacacagattgttttctcaatttcaaggaaaaatgaatggctttacaaagggtagagatcggtcttttcactttggatctaaagaacacaatatcgttggaatgatttctcatttggggcctcaaatgggagttgctgatggaattgcattaagtgatttattaaaaggaaaggagaaaacaactttagtatttactggagatggaggagcaagtgaaggagattttcatgagtcgattaatacagcagcagtatggaaactgccagttatatttttagtggagaataatggatatggactttcaactccatcgagtgaacagtttgtttttaagaattttgtagataaaggaattggttatggtattgaaacagagctaattgaagggaataatattttagaagtttatcataaaataagtgagttagctaaatctattcgtaaaaacccaagacctgttttggtagagtgcttatcttttagaatgagaggacatgaagaagcctcaggaactaaatatgttcctcaagagctaatggatgaatgggcaaaaaaagatccagttgaaaactatgagaagtttctcctagaggaaaaagtattagatgagaaaaagatagaagaaattaagtcaaccattaagaaagaagtggttgaagaatgggataaggcttatgaagaggagagtttaattgctgataaatcaactgaattaaatgatgtgtatgccccttttcagttttctgaaactcttccgaaatctcaaaatacaacagaaaagaggttggttgatgctatttcagatggtttacgccagagtatggaaaaatatgatgatttggtgttgatgggacaagatattggtgattatggcggagtatttaagattacagatgggtttgttaaacaatttggtagagaaagggtaagaaacactcctttatgtgaatcagctattttgggggctggtttaggcttatctattaatggacaaaaatcgatggtagaaatgcaatttgctgattttgtttcagaagggatgacacagatatgtaataatttagccaaatcttattatcggtgggggcaaaatgcagatgtagtggttcggatgccaacaggtggaggaatggcagctggcccttttcattctcaatgtaacgaagcttggtttacacaaacaccaggtttaaaagtagtttatcctgcttttccagcagatgcaaaaggtttattggctgcaagtatagaagatcctaatccagtactgttttttgagcataagggcttgtatagaagtataaaggaagaagtgccaaatgattattataccttagaattaggtaaagcaaaattgctaagagaaggaaatgatgttaccattgttacttacggaatgggagtgcattgggcattagatgccttaaatgaaaactcagaaatttcggcagatttaatagatttaagaacgttagttccgttagatactgaaacaatttttaaatcggttaagaaaacaaatagagtaattattttacatgangctacnntntttantggnntaggaggngagttaagtgcnttaattacnganaantgttttgantanttngatgctccaatnaaaagngtngcnagtatnganacaccngtnccnttnattaaccagttagaagagcaatttatgcctaaagaaaggtttaaagaagagttggtaaagttggtgaattattagtttaatttttctaaagtctatgtaggtaagtaatatagactttagaaagttggttagaataaatgatgcaagaagatagtttttatcatatctataatagagcaaatggtaacgagaaactatttctttcagataataattatcactatttcttaaagcaatgggtaaaatacattaacccaattgcagaaacttatgcgtattgcttaatacctaatcattttcactttgtaattaaaatacgaacagaaaaagagatttcttttaatctaggttttagtgaaaaacaaccttttggaaagttccaaactttccaaaagttattaagcaaacagttttctaatttctttagcagttatactcaggcatttaataagatgcatggtagaaaaggaagtttatttactccaaattttaaaaagaaaatcattacagatgatgaataccttagacaagttatcttatatgttcatcttaatccggttaaacatcaggtaactaaagattttgataattattcttacgcttcattttcaagtataaggtctgataaatcaacattactaaaaagagaggaagttatagcattatttgatgataaggatnattttaactttgtacaccagcaacaaaaagtaaagactgaattaattaatgaaataattaaagtagataattagtgaaaatagttcagaaaataagttcttggggctttccgatggctatcagaaagggatgccgcctactatccctaagctaaaaaagaatagaatagaaccttccaagagttatgtggcttatctacataactcttggaaggtttttctataaataaaaggtattcatgaaacatttggacaaaaaaatgcctcctgattatggacaagaggcaacccaaatgttttcacaacggaataatccttattgtgaatagcttcaaaattgtacggaaatatttgttatatttatagttaaaaanatagcgattacggagtacgcaatcgcttagaaaattctacggcttatagccttgttgtgaatagtctttcaaggcaaatatacttaaaaaaaatgaaaaaactaggaattgatttaggaagtgcctcttgtggatgggcaataagagatgataatgaaattattaataaaggggttataactttttcgactggaatgacaaaaggacaaggagggtattcttctcctactcaagatcgaagagaagctcgttctaaacgaagattaattcaagcaagaaaatataggaaatgggagttgttagaaattttaatacaaaatgacttagttcctttaaaaataaaagcattagaattatggtcaaaataccaaaaaggtattcaaagaaaatttccagaaacagaagaatttttacaatggttagcctgcgattttagttatgataatggagatagttataaaaacccttatgaaattagagttaaaggtttagatggaaaacttacaaaacacgagtttggaagagctttatatcatattgttcagcgaagaggctataaagatattggagataacaatgatgaaaccaaaatacaaaaagaaagaagagatgaagggtttggtgctgcaatacacgagcataaatttatttcaaaagctttacaaatagaatttttagataaaggtaaaagggctagaaatgaatacccttttagagatgaatatgaagaggagtttgaagcattgtgtaaaaaacaagaatatgatgtgtcaaaaaataaaaaaggagaatacaacaatgattttgtaaagaagttaagganaaccattatttggcaaagacctttacgaagtcaaaaagacaaagttggaaaatgtacattagaaccgaatagcccaagaatacctgtttcgcacccgctgtttgagatatttaggacgctacaatatattaatacaatcaaaacagttaatgaaaacggagaaaaaacgcaaattccaaaagagtatagagattctttattaattgatgaattcactagaagagatagcaattttaaatttagcattattaaaacatatttagataagaaatttcaacaaaaaatggaatataattatcttaataagcggactggtaaatatgattctactgtttcgggtatgcctgtttgtaaaaactttatagccctttttgggaaagaaattgttactgacttattaaaattatccgattataatattacttctgaaatacctaaaactataaaaggctattcaattcatgatttatggcatcttatttttaatagtgatgatgtgagttttttgaaagattttgcagaaaataaattaaaaattgaatctacttttaaagaaaaagatggtacaaaaattagagaaaatgaatttgcaaatcttcaaaaggtatttatgcaaggttattctgatttgagtgcaaaagcaatcagaaaaacaatcccttttttacaggaaggtaagttatacaatgaggctgttgtgttggcaaaaatgccagaactattaggggatgattggcaggataagaaagaagcgattttaaatgctattgcagaaacatctgtattatatgattacaatagtgatgtcatcaatatcgttaatggattagtaaatgcttacaaaggattgaattacgatgaactatttgcatataaagatacggactatttattagcggaatcggacatttcggatatagaaaaagcttgcttcaactattttggaggaaaaacttgggagataaaagaagataaagaagctgttttaaatgatgttaagaatgagtatcaatttttttttaaggatagtaaaagaacttacaggaaaaaagtcactcatacagaattagtagctacatcattaaaaaagattggaattgaactaaatggagatttatatcatcattctgacaggaaaaatatttatccaaaacctatttttagcgaaaaatatgaattgaatattttagcagttcctcttattgatagcataaaaaacccaatgtttaataaagcaatgactattcttagaaagttgattaacgagttaatcattcaaggagaaatagatgagtttactgaaataatagtagaagttgcaagagagctgaacgacaataacaaacgtgccgcaattgaaaagtatcaaaatgaacgagaaagaaatagagaaaaataccgtgaatttattagagaatttaattctaaagaaaataaaaaaatcaatataaatgaaagaattgatgattttgagttgtggacagaacaaatttttgatgagaataataaaaagatagatgataaatcatctaatcggttaagtattcttaaagaaacaaaagctattgaccgctacgaactttggacagaacaaaaaggacaatgtatgtacacaggtaaaatgattagtattactcaacttttttccgatgaaattcaaatggagcataccataccaagaagtttattgccagacaatacaaaagccaaccaaacggtttgttttagaaaatacaataatgatataaaaaacaatcaaataccttttgattgtcctaattatgcaaatgatgattcaaatgggagcgctataaaaccaaggttagcgacttggcaaaaattgaaagataaatatcaaaaagatttcaatgacaataaacgagctaaaggaaatgaggatgagaagaaaaaaaatgaaagaatagttagaaagcactacgctaaaatgcacttagattattggacggataaattgaaccgttttacttgtgatgaaataaaagaaagttgggctagaaggcagttagtagatactcaaatggtaagtaaatatgctagagagtttctaaaaacctatttcaaaaaagtaaatgtagaaaaaggcataattacagctcaatttaggaagatttatggttttcaagaagaagaagaaattaaaagtagaaataaacatacacatcacgcaattgatgcagctgttttaacccttatacctaacaatgcaagcagaaagaaagcattacttgaaaaatcttacgagaagcaagagcgtagagaaggacaatatacaacttctccatatccaaattttaatgctcaggaactaataagaaatattgaagagactacgcttattttcaaccatacaaaagataaaattatctctcaaacctataaaaaagttaggaaaagaggtgaaattcaaaaaaataaagatggttctatcaagtggatgaaaggtgatagtattagaggtgatttatatggacaaacgtttttgagtaaaataaaaaatgttgaattagacgaaaataataaacctaaaagagatgaaaagggggcgtgggaatttaagaaagggaaagatgagtttacttatgctactaaaaagcctatagaggaagtaaaagctaagtatatcaaagacattattgaccctaatattaggacattagttggaaatcagaagaaaaataacaagatttttgaccatcaagataaagaaataagacacgtaagagtaaaagtaaagaaaggtagagttgttaaagagcgtgttaattatagaagtaaaaatgaacacaagaacttttattacgcttctgctggagaaatcccttatgctgtaatgttagaaaaaattanagatggtaaggttgaagaaagaaaaatgatacccattgctatacacgaagtagcaaaagtatttaaagaacatagacagtttaatgctgatttgtatctaaacttttttcataacgaaataaaaagaaattataataattggagattgctacgcattggtcaaaaagttatggttcttaaaaatgactctgaatttgaagaggttgttgatattaatttccagagaaataggttgtataaaattactcagtttaaatatgatggtagtaaaattatgctttcctatcatttagaggctcaatcaaagaaagatatagatactcaaataaaggaaattaagcactctatattaactaactttgagttagaaataggtctttctaaattaattccaaatgagaacatagaaaatgctaaagatagaaatgaagattatcaaaaaagaaaaaataattttaagggtagactagagataattaaaaatcattctaatggaggtagtgaaacatcaaaaaagatagaagctgagatttctaaatataaaacagaatcatcttcaattgaaattgaaggaatgactccaatcttaggtttttctcaaaaaagttggaattttctatatgagggagaacattttgaaatggatgtattgggtaatattgaagttttagttgaaaaattaacataataaaagttcgaatcaatcacatcggtcaaatagttaaaataggagaataattatacattttgtataacacattttgtataacacattttgtgtaattaaaaataatagtatacctttgtgtaaataaatgaagctatgagtgtagatttcaacccttttttagaacgaggatatagaagccctgcttatttttgcgatagagaagaggaaacacaactattgattgattatattaaaaaccgaaccaatgtaactttgtttgcttttagaaggttagggaaaacagggctaattaaacattgtttctacaaactgaaaaaagaaaaaaacctgatttgtatctatgtagatattttcgataccaccagtaaggccgaatttatcaacaagttggcaacagctatttacgccacctttcctccaaaaaataaactcggtaaaaaggtatggcaagccatccaatcttttcgacctgttattacctttgatgaattgactggcttaccgtctgtaaccttactgctacacaacccgaacagcaaaccaataccataacgggtctttttaagtttttagatcaacaagaaatccaaattgtatttgctattgatgaatttcagcagatattagcttatcctgaaaaaaatatggaagctgttttgcgtatgcaaatgcaagaattacaaaacacctcgtttattttctgcggaagtaaccaaacacaaatgcacgaaatttttaacagtgccaaacgtcctttttttgcaagttgcacttcaattaatctggagcatatccataaagaaaaatataaaaaatttattgcacaattgtttaaaaaatataataaaaccattacttcagaagccgttgactttatttgcacctggaccatgtgccatacattttatacccaatacctctgtaaccaactatttgttaaagcgggaaatgagataaacctagaaaaagttaaaaaaattgcagccgatttactccaattacaagaagggaaattttatcaataccgaagtttgcttactcctttgcaatggaagctacttgttggcgttgccaaagaaacaaaactaacgcaaccacatgctaaaatttttatttcagaacatcaattgggtggagcatcaattgttagaagaggtatggaagcactggtaaaaaaagaaatggttttacataatagaggtatagaaacaccttactacgaagtatatgacaaatttttaatgcgttggctacaaagtaaataacataactctttggtatgatttttcgtaaagtattgcatactaaactttacgataatgataaaacgcaccttattttttggtaatcctgcttatttaagcaccaaaaacgaacaattattaattacttatcctgacaaggaaaaaccatccaaaactgtagcgatagaagatattggttttgtggtattagaagaccctcaaataaccataagcaatcgcttactcgaaaaattaacacttaataatgcagctattattaattgcaatgcacagcacatgcccatcggaatggtaatgccttttagtggtaattcagaacaaaatgagcgagttcgctatcaaatagaagcatctgttccgttaaagaaaaatctatggcaacaaactgtacaggcaaaaatcaataaccaggcagcattgctttctgatagaggagtagaggtgcaaaatatgaaacattgggcaaaagaagtaaccagtggtgatgtgctgaaccacgaagccagagcagcagcttattattggaaaagtatttttgacattaaagattttactagaggacgaaaggaggaagctcccaataatttgttaaattatggttatgctattttacgagctgtttgtgccagggcaatagtaagtagtggtttattacctgtgttgggaatccatcatgccaataaatacaatgcttattgcttggcagatgatattatggagccttaccgaccttatgtggatatggtggtgtgttacattgtagataatcatgatgatattgaagaattaaccaccgagttaaaacaggagctattaagtattccggctttggatgtggtaattgacgggaaaaagagcccgttaatgactgcaatgagcagaacaacctattcgttgtacgaatgttatgtgggttggagcagaaagttgctgtatccaacatattaaaattcaactctccaaactttccaagagtttaaaactcttggaaagttaacaggtaaaactaaatatatagaatgaatgaaaaattttcacgattaaatcagtatagaagtatgtgggtatttgtattttttgatttaccaaccgaaacaaaaaaagaangaagagcagcatctcgttttcgtaaagaattattgaatgatggctttagtatgtttcaattttctatttatatgcgattttgtgccagtagagaaaatgctgaagtacataccaagagggcaaagtttagtttgcccaaacatgggcatgtaggaattttaaacattaccgataagcaatttggaatgatggaaatgtttatagggcaaaaagaagtagaaacagaaaaacctagtcaacagttagagttgttctaaaaaagaggattattttttaatcctaattttggatgtaaaaagcaacataccagccacttaacgtggggtatgttgcgtttcatctttaaagatacaattttgaaagctattcacaacgcttaaatcctgcttcctcttctggagtttgttgcgtttcatctttaaagatacaattttgaaagctattcacaacttaattctaatgaaacagacgaacaattaagttgcgtttcatctttaaagatacaattttgaaagctattcacaacgggtcataagtaataaagcgcgctcgcggagttgcgtttcatctttaaagatacaattttgaaagctattcacaacagcagtagtttgatgaacgtgtgctccagcgttgcgtttcatctttaaagatacaattttgaaagctattcacaaccagcactcattttatcttttgttagattaggttgcgtttcatctttaaagatacaattttgaaagctattcacaactaaaggtcagctccgcgaaggtcagctccgttgcgtttcatctttaaagatacaattttgaaagctattcacaacagctcttctctttctttcgttcttttatttgttgcgtttcatctttaaagatacaattttgaaagctattcacaacgaattgctgacgaggagaagcaacttgttagttgcgtttcatctttaaagatacaattttgaaagctattcacaactcgctggggttttattattagacataacttgttgcgtttcatctttaaagatacaattttgaaagctattcacaacccatgaagcgattatatttgctcttgtgtagttgcgtttcatctttaaagatacaattttgaaagctattcacaactatgttacagaaaatttaacaggatggggtgttgcgtttcatctttaaagatacaattttgaaagctattcacaactcttcagtcgtgataccttcaggttttttggttgcgtttcatctttaaagatacaattttgaaagctattcacaacacaaaggcgatgaaccagttcggagtttcagttgcgtttcatctttaaagatacaattttgaaagctattcacaacaataactcaaattacttcttatcattcctagttgcgtttcatctttaaagatacaattttgaaagctattcacaactgaatttactcaagtaatagagctttttgagttgcgtttcatctttaaagatacaattttgaaagctattcacaacgtacaggtaaaagttgcgttcttaaaatgagttgcgtttcatctttaaagatacaattttgaaagctattcacaacggtatggctgtagctaatactgttgctactgttgcgtttcatctttaaagatacaattttgaaagctattcacaactgtattaacttttctcgtttagctcttagtgttgcgtttcatctttaaagatacaattttgaaagctattcacaactgcatattcaaacattgtatcactatttacgttgcgtttcatctttaaagatacaattttgaaagctattcacaacttataaagcatctgatgtaaaaattgcctgttgcgtttcatctttaaagatacaattttgaaagctattcacaacgtgtctattgtccatccacttgaatcagtagttgcgtttcatctttaaagatacaattttgaaagctattcacaacaagaagaaaagtattcctattgactataatgttgcgtttcatctttaaagatacaattttgaaagctattcacaactcgtaaccaggtattaatgtaacaacctgagttgcgtttcatctttaaagatacaattttgaaagctattcacaacatccatttaagaaaggtgctttttcctgttgttgcgtttcatctttaaagatacaattttgaaagctattcacaacccaaaagctccgttgtcatttgtaaaatcggttgcgtttcatctttaaagaaaaaaatgtagagtttaattactaatccaacaacaatttcaatcttttaagtgatttctgattttttttggaaaagatggagtttaatactttctctttttctttcgtagttaagtgccaacttaaagaaatttcattttcagaattattnaattcaaaatcnataatatcaataggntgagtaaaatcattncctanntattgtancatttcatctaagttataatcntgtatangaaanagattttnntanaaactnccnacnggncttaaaaanttntctgtaatactgctaatcgattttttgtttaccantaagtgntttggnttatctcttaatgtgatnattanaatnccanttgtnttttcattaatccaatctttaaatgtatagatgtatttataggtagttaattttccgaaattatcacgcatgccggcatctataactgttatttttggattagatggtaatgaaactcttggcattataataggaaaagtagcactcattcttaatgcactggtatattttaggttatcggcatcttggtttttaaataaccgggaaaattccaaattttcaattataggttgattatttattaatttgtttcttgatgtagttgttaaataggaaataggttgagatgagatgagtaatcttctaccatcattaattacggtaggcgataatatcataataggaatatctgaattatattctggttgtgaataatcttttaatcttttatctaagacaccattagtgtttattaatagttgtctttcaaaagaatatcccctgtcttttgtgtaagaatatttaccgtcattatacgttttcattctaaagaaaaaatcatttgtagcaatgctaaatgcaataggattcaacaagtctttggcaatattatttagataataatcagaatatattgagtggtttaacgtatctttttgtaaatatagctccctaaaataagaagctccaatcattcctccagaagatcctgtaattaagtgagtttggttaaatagcttaccacctgttgaactatctgaagtttggagcatataaaaagtccataacatagaacgcgaaccgccaccactagtatttataaaaacaatttttggttttaagctggcattgttttttttcttccagttttcaagaatcgatatggaattctttttatcattgatcaaattagttttattatttcttaattgatttaagtttttaatggagtaatcagctttttcggttgtgtagtttaatccataagccatattgctataggtaaatttttcggttttagataggtaattaactaaaacaaatagtgtaataaaaattatcgttgtccaacctttaagccaagtataaaaagcactcattaagataaaaacaatggtaaaaaagagaataatactagctccagcaggaataacacatataggatgttcgctaaataatcctagagagattaatgaaataaatattgcaatttcaaaaatagatgcgtttaggtgattatgagaaattacagatttaagcatttccttatcatagtgagaaatgtctcgggctggtttaacaacaaatggagtatggaggtaaatctcaacgtgccattttactttactttttaaaatttcatatatactttcttgttttgtaaataaagagttgatgggtttgtcttcatcatcacttgaagaaattcctaattttttaaatatatttttattggttgaaaggaagtaggtgattgaccctactatattaattgtatatccaattaatatggctagtacataaacaaaaatctcaaaaggtgtagtgttttcattttctatgtgatagtttatgacttgaaaaacatagtaggtgataaatataaatgggagcaatgagttgttaatacaaaacctcacaaaaggtcttttaagtgctgctacaaaaggaaatcttttactattaataatgtaactacttatgttaaatgtcattacaaatccaccaatggcaaatcccataatacaataggaccaaaaactaacagtatttaaatattcaggggctaaaaagagatggtggatgccatatttactagctattgatttncttacaaagccnaatannataatccataanaanagnaatagatgattcctntttagattaactaaaagaagctgtaaagggaagaaaaaaaatagtttacgaatcattctatgaaaatatcgttctaatggttcttatccctttgttttacggagtttttggctattttgttataaataaaggaaaaaagaactaatatattttcttttcaaaaagctttccgatcccttcaataaattttctaagtaaatcaaagtataatgaaattcctagaataaaacacattagccatataactataacatttacccagaatgtgtcaaaataagcaccaaaaattcttttttcaggagcgtaaaaatgtgatctaaatccattagggcttaaatagatagggtatgccttttgaattaattgaccatctaattctaatattttattaatggaatttttatcttttacataatctgataaagcatcgttggtgtagtcatttttcatttgaatgaacttctttttagcttctttatctttgtttaatttggctattaacccatctttttcattatatgcttgcttgtatttttttaaataaaaggagttaagttgaattaaatatgctttagtatcataaaaaactttgtcatttattttttcaagataaaggctttctgtgaagttaaatttaacattaggatttcgtttaagctcttttttaatttcgtttctaagaagagttaaattttcaatagattgctcttttttctcttcatctccaatattgttttgtacactacttaattttgcagtcaattttcctaaccaataattttttctaaattcaaatcgtttgaattttttatcaagcttaaaaaattgtttttcaaattcattgtctttaaattgacgaactgcaatagcttcataagcccacctagaagtcattatttctccaactataggtacgttttcttgaactgtaatagaagggtttagcttgtcgaatttaaccattacgccacttagcagtagttgagggataaccaaaaatggaattaagatataaattgttactgctgagttaaagcttgctgatatatttagtcctagcatattagcaaaacaagctgttgtaaataataccaaccaataagaaaaatacattcctttaatgtctaaaattaaattacccacaattacaaacgacaacatttggatggcagaaataataaacattacactaattttagaggctaaataaccacccttacttaagtttaagaacttttctctttttctgattttctgatctctaaatatttcttcagcactaactgttaagccaataaacaacgcaacaataaccgacatgaataaataagcagggaaattttcattttctctaaatgtatatcctacttcattacttgagtcagagttataataacgaagtaagtatgataatataaaagcaaggaatggggcttctaaaaaattgattagaaggtattgtgtgttggttaattttgacaatacatctcttgtgatgnnnnntttaaannnntnnnnntnnnnnnnnnnntnnnntataatttttaaagcttcattagttctattgaattcggaaagattttgggcaactttttctttataatttccataccattccgtaggatcaatcttcctattgtcggtagggttaccgtattcatctacaactcttgcctcgataatgttaaatatctgttcagaatttacattgccacagctaatacattcactttcatcactgtttacatggtttgctaatcgtttaaagtaaactatagcatcaacagggtttccattgtatatagggtagccacctgtatctaagattaacaagttgtcaaacatcttataaatatcagatgatggttggtgaataaccacaaatattaatttaccttttagagcaagctctttaagtaaatccattataatttctgaatctcttgatgaaagtccagatgttggttcatctacaaagagaacagcaggctcacgaattaattctaaagcaatgttcaatctctttctttgcccaccactaatggttttatccattggactgccaacttttaattctttagcttcatataacccaatactgtttagaacatcgataacacgtttggttatttcggtttcgctcatattagcaaaacagagttttgcattataaaacaagttttggaatacagttagttcttctattagtaagtcgtcttgagaaacgtaaccaattacaccttcaatttcatcagccttgtgatgtatatcaacaccatttatggtaacttgaccagttgttggggtgtatgctccatttaataantttaataaggtagattttccagccccactagcanccataattccaaccattcttccagattcttctgaaaaactataaggatgcatcccgtagtttcctcctttgaatctataagttagattttctacattaaaaattattttttctgcattatcatctacaagataggaactaacaatgtcactgtagtatattggttttacttttgagcttctaatagaagatccttggttaagaatacttgaacggttttttcctattaaaatgccatttaagtatagttcagcgtctccaaaataacggacaaagaacatatttactgtttcaatcttaattattcttaatgttcctactaagccttctgaataaatatggtggctttctttgtaagtactctcttttttattgtctactactagcgcattatcaatatcaaaactttgagtttctatatttgctataaagtcgaggcaaatatcaaattcatttttagggatattaaaagtatctgaaacagtgatgacaaactccatttcttgttctgaagctgttttatttgcatatataaattctaataaacgtattagaacaattattttttgcttttgagcaagctcttcatttatctgagtacagattaaaagaatttttacagaatttactgaagttctttttttctttttaccgtctttagattttctagtttttgcctcaataaaatcatcatagagttttaagtattcatcaactaattgttgattcaattgttgtttaaggaaagaggttacaatttttctactattatcagaaatatcttcagcttcagatacaatagaaaacaattgcattaaggcttttaatattctt

SEQ ID NO: 3369 - DNA, 20948 bp, synthetic construct
  misc_feature 1..20948: note = Synthetic
  source 1..20948: mol_type = other DNA
tctcaccttcggcaagcaccgtcttgcagcaagacgacctgatatggatcgtaggcgagagacaaaaactccgacgcctccaagaataaacgtttcgacccgtaattctccttcgcactgacgctcttcattcctacatttttcattttttgggcgtgcccctcgccgcatatatacggttggtcttgtctctcagctcctccctttccgtaattcgtaattggcaattcgtaattgattcagcggctcgtatacgcttctatccctcacgcagagcagggcgaacaccaaacacccaacacctcgattcaacgattacacgattcaacaatcaaacgtgatcaatattttttgtaaaacaaaaaaatatattacctttgcaacctcgaaaaaagtacggatactattagtatctgctactacataaaaaaactaatttttttaattaaatcaatttcaacctgataattgggttagcactcaatcattatgcaaataccccctcgataacgagttgccgtgggtcgcgtgcaatctgttttatcgcaaatcatttaacaccattagcaacaaaaaaacattaaatcataaatatgtataatatcttacagttgaaagcaaagcagttgcccgagttacaggaaattgcaaaagagatgaatatcaaaaaagcgtcaaatctcgacttcgatgctctcgtatatgcaatattagaccaacaggcagtagacaaagctctaaaacccgtagagcaggcagccaagcccaaaagagcacggataaaacgaaccctgatagccgaagaagaggctgccgctgccgtagcaaaaaaagacaacaagcaggctgcaaccgaaggtgaaaaagccaaaaccgaacaagaaccaaaagcaaaacataacaatacgcccaaaaacagcaaaaacaaatcccccaaacgctccaccacagagcaacagacaaaacaggacaaaaaacccgttgttcagaccgcgacaacgacgccgatactcgacgacatagagacactcgaagacaatgacagcgaaatgtacgacgacatagagattccaaaaccgatggaggagacagtcgttacagcccaaaacgacgtagaagaagaggtatctccgactcagacagtcgccacacagacagacatcataccacaggctactcctcaggagagtgacaaggcaataaccgagagattccagttcgatgacataataatgggtacgggagttttggaaattgtaaacgagggctatggctttcttcgctcgcccgactacaactacttctcgtcgcccgacgacatatacatatccggcacacagacaaaattgctcggactgaaaacaggcgatacaatcgtaggaccaattcgcccgccacaagaagaagagaagtatttccctcttgtcagagtacacaccatcaacggattggaacctgccgcaatacgcgaccgtgtaccgttcgaacacctgacgccgctattccccgacgagaaattcaaactcaccacaggcaaaggcgactcattatctatccgcgttttggatatgtttgcccccatcggcaaaggacaaagaggacttatagtagcacaaccgaagacaggtaaaacagtattgctaaaagagatagcaaatgcaataaccaaaaaccaccctgaggtgtatatgataatacttctcatcgacgaacgtcccgaggaggttaccgatatggaacgcagcgtaaatgcggaggttatatcgtcgacattcgacgaacctgccagcaaacatgttcaggtagccaatatggttcacgagaaagccaagcgacttgtcgaaagcggacacgacgtagtgatactgctcgactccatcacacgcctggcacgtgcatacaataccgtacaacccgcttcgggcaagatactcaccggtggagtcgacgccaatgcactgcacaaaccaaaacgcttcttcggggctgcccgtaatatcgagaaaggaggctcgcttaccataatagcaacagcactgacagagacaggctccaagatggacgaggtaatattcgaagagttcaaaggaacaggcaatatggaattgcagctcgaccgacggttggcaaacaaacgcatcttccccgccgtcgatatcaacgcctccagcacacgtcgcgacgacctgctactcgacacgcagactctgaacagaatgtggatactgcgtcgttatctgtcgaatatgaatcctgtcgaggctatggagtttctcctgcaacgactcgaaagaacggaaaacaacgaggagtttctggcatcgatgaatgattagtattgattggatttgtaataaccctcgaagaaaacccattgctttacgacaataaagaaataaccgacgatgcaccctttggataaattcaaatattgccccgtatgcggagcagacaacttcaccgagaacgacgacaaatcgaaaaagtgtcataaatgcggtttccgttactatctgaatgccgtatcggcggtggcgggtttcatcgtagacgacagcaaccgtctgctgctgtgtcggcgggcgaaagagcctctaaaaggcacttgggatttgccgggcggattcgtcgatattggcgagacagccgaagacgccatcagacgcgaagtaaaagaagagctcaacctgcatacggacagcatcaggtatctgttctcgataccaaacgagtatctctattcgggcttcaacgtacgtactctcgatatgttttttatgataaaaatcagcgacttgtctatcctgacggcaaaagacgatgtcgaacaggcaatgttcattcctttcgaccaaataaatatcaacagcatcgggctgaaatccataaaaatagctgtcgaaaaatttttagcttcacgcgtctgaaacaacaatcttttttgtaactttgcactttggcttttggcaagctatctatctattttataaccatataaaaaggcaatcgggcacgaaggtaaaagatgaaatttttgaagatactgtcatcgctcaaagtgatattcgtattcattttgttggagatactggctttgctaataattgccaataagagcgtttttcagcgaagccatttcgtacagctctctatggacgtctcggctatgatgtacgaaaaaacgagtgaactgacaaaatacttcggtctgtactccaccaacgaagaactcgtacgacacaataccgagttgcagaaaaaggttgagcatctacaaaatatagtctcatctaacgaatatctggcttccgtaggacacgactcggcagtggctttcgtgccggctaagatagtaagcaagacactgaacgatttggacaactattttatcctcaacaaaggagaaaaagacggcattagcgaaggtttgggcgtggtatgcaacggcaatgtattgggcgtggtacaatacgtgtctcgtaattactcggctgtattgcttgctatgtcggcaaaaatgaaactcagcggaatgattaagaacgacggacacctgtgtaccgtcatctgggacaaggtatccacctctaaggcagagatagaagacataccataccacatcgacgttaaaataggcgatactattgttacaagcgggttctcgtctattttccccgaaaattatgtaatcggtaccatctccaagattaccaaaaacaaatcaaccgcctccaacgacctacagattaactattcggtcgattttatgcgtgccaaatatgccgaaatagttatccccaaagacataaacgagattaataaacttaaagaacagacaaaccaatgaaagatatcttcgtaaatgctttggtaataacattgatgttgctcttgcaagtacttttcttcaaccaaatcaatctgtttggatacggatatatttttgtctatcttatttttctgatagtaactccgctaagtatcaagacaataccattaatgctggtgtcgttcgtcataggctgtgtactcgatatttttatgcaaagttatggtatacatacgtttgctatcacactcattgcagccatacgtcgcagtttgctcaatatattcttctccaaagaagatttggattatagtacgagtctatttgtgcgtttttcgtacgcttactataaatacgtagttataatagttctaatatactgccttacagtcttttctatggaggcattttctactaaactcattattcccgttctacaaaaaacgggtgtaagtactgtcgtcactactatctcaatcttttttgtacaagctcttacactcagaaaatacgatgagagataattacaggcacaggagtttatatatcagactgttcgttgtcatcggagctttgatattgatcggacaactcataaacttacagataatcaaggactacggagagcaggcagacgacaacgctttcttacgaaagaccatctacgctatgcggggactgatatacgaccgcaatggtaaactactggtattcaaccaaccaatctatgatatagacattatagtaaaacagtgggacgacctgaaaaaacaagatacaccggtagacaccaccgaattatgccgagtactcggtatcgagaagagcgatttcatcgaacggctcgacaatctgaaggacaaaaataaaaacatcaactattcacccatactgccacaaaaacttatcacacagctcactcccgaagaagctgccgtaatacaggaggttatatggaagtttcccggcatatcgctcgtcagccgtactatgagacaatacactactccctacgcgtctcacgccataggctccattggcgaagtgtcgaaagccatactcaaaaaatatggagatgagtataaacaaggcgattacatcggcgtaagtggtgtcgagaaacagtatgaagacatactaaaagggaaaaacggattagaaatatttctccgcgacgtaaagggcagaatacaaggcaaatacaaaaacggcaaagaagacgtagcccccgtaggtggcaaatcgttgacactgagtatagacatcgatttacaggcgtatggagaaatgcttatgcagaacaaagtaggcagcatagtggctatagagccgtctacgggcgaaatcctcgcgcttgtgtcgtcgccgaactacgacctgtccgaccttatcggcaaacaacgcagccaaaactacgcaaaactcctcagagacccatacaaaccgctcctcgatcgcccaatgatggcatattaccctccgggcagtactttcaagacagccaatgctctcgtattcgaacatcagaaagtaatcgacagagacacacgtttcggctgccattcgggttatatcgtaggtagcttccgagtcggttgccactcgcactcgtcgccgctcgacctgcccaattccatatcaaactcgtgcaatgcatactattgtgcagccttacgaaagatgctcgacgaccccaaatacggtaatataaaaaatgcattcaacgagtggaaaaaaaatatcgtatccttcggattcgggcataaactcggcgtcgatttccccaacgagaatcggggactcataccgaacaccgacacttacgataagatacacggcaaagaccgttggcgaagcctcaacgtagtatcgatagcaatcggacaaggcgaagtgctggcaacacctattcagatggcaaacttctgtgccatcatagccaatcgcggatattggatacgtccgcatatactcaaaaaagtagaaggatacccgctcgataccgcctataccaacaaacgctacaccgacgtagagcctgagtatttcgagcctgtcgttcaaggtatggagtgggcggtcaatggcggcggcagcggctccacggcacgcatagcccgaatagacagtatcatagtatgcggtaagacaggtactgcccagaacccgcacggcaaagaccattccatattcatagcattcgcaccgaaagacaacccgaagattgccatagcaatagtggtcgaaaactcgggattcggtgccacctgggctgccccgatagtatcgttgatgatagaaaaatatctgaaaggtaaaatctccgagaagcgtcagtggctcgaagaccgaatgcgtaatgccaacctgatgccacctctcccccaagaggcgtctgtgcccgataccgttacccgaacacgtcaataaacacctttttcgcgtaagtactcccgaaaaaaagtgctccctgttgatgtacaaggagcaaaacaaaagttttcactacggaataatccttattgtgaattgctcaaaaaattgtatttttgcaaattaaataaaatatgtcatcaaataatttattatgcaaaaagcaaccacctgaggcagttgctaagaaaaaaattctacggcttatagccttgttgtgaattgtatctcgagtgcaaagatataaagaaaattttaaatgacaataggtatatgaaaaaattaggattagatttgggcagttcttcgttaggatggactattttggatattgatgagagcaaaatcatcaaacagggagtaataacttttgatacaggcatgctaaaaactcaaggcggatacacgtctcctactagagataggagaattacacgttccggacggaatttaataagagcccgcaaatatagaaaatggtcactattaaaaatacttataaagcatgattttgttcccttaaatgaagaagaactaaatgactggtctaaatatgaaaaaggtaagattcgtaaattcccaagcaatacgcgttttttaaaatggttggcgtgtgattttggctatcaacaagatggtaaaaaatacaaaaatccctacgaactacgagtaaaggcaattgatgaaaaactaaccaaacacgaatttggacgagctttatatcacttaattcaacgtagagggtacaaggatattgggggacaagatgatgagacaaaaaaacaattagaaagacggagtaaagaaggtttagacaatgctataaaagaaaacagaactcttgccgaggctcttcaaaaagattttctacagaaaaacaaaagagcaagaacgcaatatccatatagatgcgaatacgaacatgagttagaagttatatgtaagcaacaaggatataatattgataaggacaacaagggtaactatcaagaaagcatagtcgaagaaatttggaaagctattatatggcaaagtccattaagaactcaaaagggaaatataggaaaatgtacctttgagccatcaagacaacgatgcccaatatcacaccctatttttgaggtattcagagcctggcagtatattaacacaataaaatatcttgatcaggacgacaataaacaacctttacccatagagcataaacgcgaattatttgattttttgctcaaaaaagacaaaaacttcaaatttgaagagataaaaaaatttcttgataaaaaagcagggaaagaccaaaaatacaactacataagcaaagaagggaagtatgattcttctgtttcgggtatgcctatttgcaaggaattaatcaatttatttggagataaagccaaggaggctattcttagtatagaagacgaagatgaaaataaaagtagcaaaatagttaaaagcaaaatcaaaagggaaaataaaaaagaagccgaagcagattactcaatatatgacctttggcattttctatttaattttgataaagaatttcttgaaacatttgcccagaataacttaggtattgcaaatgaattaagtaaaaagggggtagaatctaaccctatggtaaaaatccaagagaaaatgatacaaggctatgctgatttaagtgtaaaagctataagaaaaatattgcctttcctaaaagaaggttatctgtacgacaaggcggttttattggcaaaaatacctgatatattaggagatagatggatagaacacaaatccttaatattagaaattttagagcagagttacaatacatatatctatagaaagcaaattatcgacattaccaacaaactcatagacaagcataaaggattaccttgtgaagataagtttgcatataaagattattcgtatacgatagaccaagacgacgaaacagatatagagtgttgctgtgaaaaccatttcggcgaaaagtcgtggccgaaggtaaaaaacagagatgaaataaaaagagatgtcaaagaacaatatcaatcttattttgccgataataaaagggcttataagacgataccttctttgacagaagtatttaaaaagctcttaaacgataatcaaatagcacttaatggtgaactttatcatcattcaaacagagaaaatatttacaataaaaaactcgatataaattataaaacgggagagaaacgattgccaactcgcaaaaacaacaaaggtatagaaatagaaattctacctattcctctcatagacagcataaaaaatccgatgtttaataaagctatgagtattcttcgcaaattagtaaacgaactgatattaaacggggatattgaccaggataccgagataattatagaattggcacgcgaattgaatgacaacaacagacgaatcgccattgaaagatatcagaaagctcgtagagaagaacgagataaaataagaacgtttctggaacaatataaaacagaagaaaatcagcatttcaacatagaagaaaaaatacctgtttttgaactttggacagaacagatatttgataaacccaaagaaaacaaacattttaataaagcacaagaaattctatccaaggaaaaagaagaaagatacaaattatggcttgaacaaaagggacaatgtatgtatactggtaaaatgatctccattaccgaacttttttctaacgaaacggacatagaacacacaataccaagaagcaaattaccagataacactatggcaaacaaaacgattgcttttaaatggtataatgagcaaataaaaaaagacaaaattccttcagaatgtcctaattacctgaaagatgaagaggtaggaacagctataatccctcgattagataaatggaaagagctgagagaccgatatcaaaaactttacgaagacagaaaaaaggctaaaggaagagaagacgaaaacgcaaagaacaaaagaatacaagataagcactattacaaattctattttgattattggaacgacaaagtaagtcgctttgaagcaacagaaatcaaaagtggttgggtaagacgtcaactaacagatactcaactaacaagcaaatatgcaagagaatttctaaaactttatttcaaaaaagtattcgtacaaaaaggtagtattacttccgaatttcgcaaaatattggggattcaggggcaagaagagataaaggaaagaggaaggcatacccaccataccattgacgcttttgtactcacgcttattcctactaatagtagctataaggaagatatactaaaaaaatattatctctggttgaaatcaaaagacaacgatattctcaaagaattagaaaaaagcaaaaaggtactattacagggcataagtatccaaaagacgatacaaacaatagagaatactactcttgcttataacttccacaaagacacaatattagtacaatccaataaaatagtaaggcatagaggaaaaatacagtatgtaaaaaacaagtcgggacaatatattttagataaaaacggcaaccgcattataaaaagaaccaaaggagatactgtgagaagtgaattatttgcccaaacttatatagggaaaatcagagatgtagaaagagacgaaaaaggtaaacctataagagaaaatggagattggaaatataaaacaggcaaagaagagtttgtctttgtcaagcgagaacccatcaacagtgttaaatcgtccgaaaaaaatatcaattcgattgttgatccccaaataagaaagttggtaaaagagcaaaaaaataactctgttataagagactcacaaaacaacattattcgacatgtaagaatacagacaaaggcaggaagagaagtaaaacaacgtatcaattacgagtcaaagtacgattacaaaaacaagttttattcggaggcaggctccataccttatgctatactattacaaaagatccacaaaggaaagaatattaagaatataatcccaataccgtcattcgagattgccaagatacacaaacagaaaggtaaatttgatatagaaagttgtattcaaacattccaccccaattataaagacaataattggaacaaacagctattaaaggtgggacaaaaagtcttagtattaaaagatgactcagaatactctcaaatagaaaatattgatttcataacaaaaagattatatgtcatcaaacaatttaaaacagataatcgaatagttttagaatatcatttaaatgctatacccgaacaggacatagataatgctataaaaaaatataaagacaatttattattggaatatgaaaaaaaatatggtatacctgaagttgttgaggacttatccataaaagacgaaaaagaaagagacaaagattataaaaacagaaaatattctttcaataatttaggagattttagactttcgagacttacaaatattattgggagagaagaaactttaaaagtaacacatatcttaggttcatataaaaaatactcgtctactattgagaaagatggggatactccacttttattaatgtcaagaaataattggaattttctatacgaaggaatagattttgatacaacaatcacaggtaatttaaatttcaaaaaagctaataacctatgattaaacgtactttatattttggtagtccgacatatctgtcgttgaagaaagaacagttggtaatacaactgcctgaggtagttaaaaacgattcgctaccggataccttcaaggcagaggcggtcagaactattccgatagaagatatcggcatcgttatacttgacaataagcagattaccataacacacggagtaatcgaaagtctcttggcaaacaattgtgctttaatcacttgcaacagcaatcgaatgcctgtcgggttaatgctccctctcgacggcaataccacacagaccgagcgttttcgcaatcagatagacgcctcaataccgttgaaaaaacagttgtggcaacagactatacaggcaaagatagagaaccaagcgtacgtcttagcaaaaaacaccgattgtattgtaaaaaatatgcaggtatgggctgccgacgtaaaaagcggagaccccgacaattacgaagcacgggctgccgtctattattgggcaaatatcttcccacaaatcaaagacttcactcgtaaccgtgaaggtgtccctcctaacaaccttctcaactacggatatgccatcttacgtgctattgtagccagagctttggttgccagcggattgctccccacattaggtatacaccacaggagcaaatacaacgcttactgccttgcagacgatattatggaaccttaccgcccatttgtcgatacggtagtttacgacattgttgccaacggatctccccacgacgaactgacacaggaaataaagacaaaactcctcaagatacctgttttagacgttattatcggtggcgaacgaagtcctctaatgattgccgtcggacaaacaaccgcctcgctctacaaatgtttctcgggcgagtgtcgaaagataaaatacccaaaatttgaataaaggtaaaaatgtagaaattgaaaaatgtaaaaacacaagataaagtatggttgaaaaagataatccgataaagacaaagtcatatgcttttgccgtacgaatagtaaaacttcgccaatatttaaactccgagaaaaaagaatttgacctatcgaaacaagtactaaggagtggtacgtctatcggagcaaatatctcggaagggtgtgcaggtcaaagcaagaaagactttatagcaaaactatccattgcccttaaagaagcacacgaaactcggttttggttgtgcctgcttaaagacagtgattatcttgacgaagagcgatacaattctttactcaaagactgcgaagaactgataataatacttacaagtatacttcgaacagctcgaatcaattcttaaatttctaagtttttacatttcaacgtatggagcgttttagtgaatatagagttatgtgggtacttgtatttttcgatttgccgaccgaaaccaaaaaagaccgtaaaaactatgctatttttcgagacaaacttataacagacggctttacaatgtttcaattttcgatatatctgcggcactgcccaagtcgcgaaaatgccgaagttcatataaaacgagtaaaaaacaatctcccgcccaatggacacgttggtattctttgtattacagacaaacagtttggcaatatggaacttttctacggaccaaaggaagagcagatacgaccaccttgccaacaactcgaacttttttagaaaaataaaaatcctgccgtatagcaggatttttatttgaaacaactcttttttcaaaattctaatttagcctgtaactttctatttttatgcatattacacacatccagttgtttcagactacaaagatacaaacttttgaaagcaattcacaacagtcatttgatttttataataagggttttggttgtttcagactacaaagatacaaacttttgaaagcaattcacaaccctcccgtagtttttcacgttgccttgcagttgtttcagactacaaagatacaaacttttgaaagcaattcacaacgcctattgctttcgggtattgtcacagtctgttgtttcagactacaaagatacaaacttttgaaagcaattcacaacctaaccaacgatggcggtgcgtcaagtaatgttgtttcagactacaaagatacaaacttttgaaagcaattcacaacagacacactacctctacaaggtaatgctctgttgtttcagactacaaagatacaaacttttgaaagcaattcacaactccttaatatgctttcactcttacgccgtggttgtttcagactacaaagatacaaacttttgaaagcaattcacaacagcctgtcgattggtggtataggtgattttgttgtttcagactacaaagatacaaacttttgaaagcaattcacaaccctcagttgtttgagcgacatagcaagggcgttgtttcagactacaaagatacaaacttttgaaagcaattcacaacaagtcggaagactcatattttttaccgcaagttgtttcagactacaaagatacaaacttttgaaagcaattcacaacaggtggcggaataagcaccagagccttttagttgtttcagactacaaagatacaaacttttgaaagcaattcacaacggcaaataaattatttcttttccgagtgcgttgtttcagactacaaagatacaaacttttgaaagcaattcacaacatcctgattttgatgtacaaacagcaaatagttgtttcagactacaaagatacaaacttttgaaagcaattcacaacgatacgtttacagccttcttccgttttagagttgtttcagactacaaagatacaaacttttgaaagcaattcacaacaggtcaggaaaaacatcagcaatatttagtgttgtttcagactacaaagatacaaacttttgaaagcaattcacaacgatataaatgtaatgtttgcggcgggtgatgttgtttcagactacaaagatacaaacttttgaaagcaattcacaacaatagcgacttggctatggcaggaatgctgttgtttcagactacaaagatacaaacttttgaaagcaattcacaaccaaagagaaacagaagtcgtacaagggagtgttgtttcagactacaaagatacaaacttttgaaagcaattcacaacaacagttcattcaagagatatatgccgatggttgtttcagactacaaagatacaaacttttgaaagcaattcacaaccagattgtcaaaagcaacaagagtttccaagttgtttcagactacaaagatacaaacttttgaaagcaattcacaacccttcgtccgcatacactgagcaggtatggttgtttcagactacaaagatacaaattttgataattatctacttatcgctataatgcccgtatgctgagataaccaaaacggttacagtgtcatcgttaaccatatatataagtctatgccgttgcgttattcgccgagaatacagaccgttatagccatattttagaacttcgggtttacctaagcccgtagttgggtttgtatacaactcttctatcagctgcactgcctttttataagctcgtggttcgcttttcttcaatcttgccaaatcggaattagcttctctggttatggttacagaatacattataaggtatcgaggtgttttctgagtttatcaagcgagccaaaacgcattacttgccctctccgttcgtcttcgattgctttgtctatcttttttttcatcgcttcggatatggcatttttgtctggtttatggcatatcaatcctaaagaatcgagatagttgagcagactttttccctcttttgtacgttcgttgattgtgattgtgtatgttgccataatatcaatgattaaaaagtataacagtttcagactacaaagatacaaatttttgaaagcaattcacaacgactcgcggtcgtgcatcaggaaacctatcgttgtttcagactacaaagatacaaatttttgaaagcaattcacaaccatatctatcaggtgctgctgtatataaagttgtttcagactacaaagatacaaacttttgaaagcaattcacaacttgcagtcgcctacgccgtcggagaggagtgttgtttcagactacaaagatacaattttttgaaagtaatttacaacactatgtaagaggaagttaaagtgtttttgttttttcagataataattcttatctttgtgtttcaatttaatttttaaatttatgggtattattgcaacacttattattggagccatcgctggatggttaggaggaactatctacaaaggtagtggattaggacttatcgggaatatcattgttggtattcttggaggtatcgtagggtattggcttttaggaagtgtgtttcacatctcacttggagaaggatggatcggttctatcttgacaggagctattggagctatcgttattttgttcttgataaatttgatatttaaaaagaagaaataaggaaggaagagcagatattttaatgtctggtagttttttcccatcaaatacatgaaaagccccgaaatattagatattcggggctttcttcttacattatttagaactatctttttgcgttagcagtccaggtctttccatctgtagtatacagaatgttcaacgaagaggcattgattctaattagtttcacaccatcttccaaatcgatgtttactaatgtgtgctctccttcttttttgaattttacacccttaagatcgggaataccgtctgaaaagctgaaataatagtcatttcctcctttaagaacagttactgaaccattgtcggcagatttttttgtttcaccatctgagtaagagattttacctttgtaggttcctacaaaaatgtcattgtctgccgggtcgtcatgcttgctgcaagaagcgcaagaaaaagccactagtgataaacaaatcactgaaaataaaacgattcttttcatgtttgattgaatttaaaaaattaatataaaattttacggcaataatgccatgataaatatttgttcaaattaaatagtttaaaaacaagtttttcagtctgttatcgaaaaacaaatcttattagagatgtttttcatcttttttgttcaaatatcgtttcgataaaaattgcataccatatccaaagctatagttatccatcgtttttttattaaattaaatagaaacccaagtattagctaataatttctttggagttaaactctctgctgaagctgattataaattctatactgcgttgtttcagactacaaagatacaaattttctcaaagcaattcacaacaaatcgtagcttgggtgctgtatgtagtaatgcttggtcactgcgtaagccagtgctgtgataatacttgttccgaaaatagccttagactgatagtcgaatgcaatcatttacagcacacctgttgccaactcgttagaaccacaaacggcttccactcgtccgaggttgttaatgtccgtttcatagtagaagtgatttacatccatacaattcaaatattcttctttattctatcgctatcgcttctggtatcctttttaacttaccatcatgattaaaatcgaacattatccatgatttgtctgcattctcatcaatctcattatttatgcaaattgatttaatgtagtatattaaagcgaaaccatcttgagttttttgttttttattgtattgacccatgtgttctataaacgcaagagtatctttaccaacaagatgattgtttgtaataatactatcagccatctgagctgttctctgtttcaaacatccacaactatctcttttccatatatcttcacacatattagtttcatcatctatattagacatcactatagaatctccctgcgctacagaatattgatgtttggcattttggcaactcaagaatgcacatagcacgattgtaaaaagaactctaacaacttccatctttcttaattgaaaatatttacagatttattgtttcgataatttcaccaatattactccaatacacatcgacaacattttccttggtaacgggagcagcaaggctgtttcagactacgaagatacaaatttttgaaagcaattgacaacttatagcaagtcattatctgtcagtttaaaggttttatctctatacaaaaatctttaaaacaatgagcaacgtcaacgactccttcttcgataccatactcccaagatacatatttaataatacctgaaggaatttcaatatagaactcattacctgcagcgtctctggcaaatggaatgtgcttttcagcaaaaatcttcatactgtcagaattttccttagccgtttcccacatttttgctaagtgttcaatactgtaaatgaattctatttcgagttcataatacccttcatcatcagttccttggaaatgttctgtgcttatttttgctccctccgggaaatacactccattctgagagagatagaactgtacaaattcctctttccctctgaaactttgtggtataacactttcgattatatcggctgttacgcttttgttttgaactttgagaatcaagttttggtgtttaaagaaagaactcttcatattcatttatccgattttatattccatttcgaaaaatcgacctcactttctgctttctgctcgatactatcaggcagtgcggggaagaaatcaatatcggtaatcttttgtatctcttcgacgctcattgcataagtcgataacggtttccgcccactttggttgggatacataaaagcgatagccgaccaattaccattttcgtactgcaacagcactttgaaaaaggcgtcagggacagccacattattgttaccgattgttttggggcgttgcgaaactatcggtccgcaaacgacatagattttgcctttctgtcgggctaactctcgaacctgctcttccaaatctttccaaataccactatttagtctcttgttttgcggacagatattcgagagataaaaggactctttcattgcttgctcgctccacttcatatcgcctgccggagccatatgtcctctatcccaacctgtacctttgtagtcataagtcgtcgccgattcatcggagggaacttcggggtcaggcataaaaacatcgtaacgctcaacagctcctccaacctcttcttttgtgagttcgtaagcgacccaattcggaatcttccaatccgaattataacttacggtataacctgtatgacagataatttgctccttccgacctgctatctcagcagggatttctaccttctgaataactgtatcttctgtcaggttttgcgttacgttcggttggttcgcaagcaaaaaaacggctatcacaaatcctacagctatcagaattaaattgacctttatgtatttcgaatgtttgctcataattctctattttttcttacatttggatatcgatagtacatatttcggagagtttttcgtccgtcgaatcgacctccttcgacaaacggttcgcctgtcgttctatggttttctcgaacaattctgtcagaaatcgacaaaaacacctcgtaaataaacgacacaccgtctatggtgtttcgacacaaaagattgctccatcggttcgcaaagatacgaataaataataaaataaagtcaatcgaaagtatagagataaggtgtaaactgctcggcatagaagcacctaaacgtgtagacgtaacaacggcgggagaaaagatagaatttaagggatttaattttttaccgtatacgaaattggagggcaagtaatatgaaggtaggacagaggatattaagtgtaagtgccgacgggttcgaggagcttcgacagctcgggctgctgcgttataatgcgggcagggatatagagatatacgactactatctgagcgaggtggatataacgggcagccgtatgcaggcacagacgaactgtgcgatgaggtacaacctatccgaaaaggctatacaggtgatagtgtatgggtttgagaataaactgcgaaaaggcattcagtaatttgaattactcaaaaaagagcagcccaaacctccctcgctacctgttcaggggttttctttttaggaggtgtatagttgggaatttttatgaaaagggaaagaacaaaaagtgtaaatggtggcaccgcaaaaaggatagccaacaagtcccactcccaatagcaaagtataagagttgttactgttacgattgcaattataagcaacaaatattttaaagctgttttattttcctttttcatagtgcaaatgtacgaataaattaagtaaccaccaaattttttaacacaaaaaacacatcaaaaagatgagcgacgaaaagaaggtattaatcgatgtagacataaaggcaaccgaagcattgcgagagcttgccgaactccgcataaaagcggacgagttgaaaaaggcacaaaaggagctcgacactacaaccgaagagggacggacacaatacgaagctctcgggcaacagataaaggctatcaactcagtagccaatgagcgacagaagacgatacaaagcgagataaaaaagcagaacgaacaggcgggaagtctgaagcaactaaaatcggagctatcgctgatgaaagctcaatacgaaaagatgtcggaggcggaacgtaacacggcacgtgggcgtgagttgcagaagtccatcagcgagacgtcggcgaaaaaatgctttataaagtcattttctgtccgtatccttcttcaaagtcagttacgacacatctcatttcgtcgggtagatagctcagcacattagctttgatatgctcgggtataccataaaacgcttcggcgatacttcccgttatcgcagcgatagtgtcgctatcgccaccgatagacactgcaagtctaatggcgctctcgaagtcggcactttccaagaagcaaacgatggcttgcggtacggttacttggcaggttgcgtcaaatgtatttgtctgccttatggcttggcacgattgccctacattataaccgtattggtcggctgcgagtcgttttatgtcgtctttcgacgctccgctgcgggcatgcaatatacagtcggctatacagaccgcccctttgataccttcggggtggtcgtgcgtacactctgccgacaaccgagcgtattccaataccttttcccttgtcgacagccaaccgcacggagacacacgcattgcggagccgttgccgaagctattgtaaggctcgggggcagcagaatgtatccatcgggcgaaaaggctaccatagccgcctttgggaggcgtgtattttctacaccatctaagtagcgaccgcttgaatgagatacctgtcaaaatagcatctgctacggcaaccgtacaaacagtgtcgtccgtaaaatcgcactcggacgtaaacaactcgaagtccgtcccaagatagttgtcgaactcgaaacgcgaccctataatatcgcctgcaatagctcctaacatatacccgacacaaaagtgttgtcttcggattcgacccctatgctctcaataacccccatacagcaaagcgttttcatctccctatcaatttattacttatcagataactcaatatgtcctttagccccttttctttttggttcatatcaacaccgaaccaatgttacgttgcaaatataataaatcttttcccgctccgcaaaatttactattctgggcaaaaattaaatattgttttttatttataagtttaggataaaggcgaacgaatgttcgcctttgtttttgcatggtgtacctttgtataaacgctgtgttctttgcggtaaaaacacacatccgcttaaacaattaaacgattgaacgaaacagggcgaacacacaggttcgaccctacattccttcattcctacatttcttaa

SEQ ID NO: 3370 - DNA, 19194 bp, synthetic construct
  misc_feature 1..19194: note = Synthetic
  source 1..19194: mol_type = other DNA
atcgaaaattttgaagtctttgcctttcaccagatcgttcaattcgcaaaactccattccgaaacggatgtccggtttgtcatttccgtattttttcatggcatctgcgaaagtcattctcgggaattttccgaaatcttttccggtgatatctttcaataaagttgcggtcattccttcaaaaatttccaggacatcttcctgttccacaaacgccatttcgcaatcgatctgggtgaattccggctgtctgtcagctcttaaatcttcatctctgaaacatttcacgatttggaaataacggtccattccgccaatcatcagcaattgtttgaaagtttgcggagattgtggcaatgcataaaactgtcccggattcattctgctcggaaccacgaaatctcttgcgccttccggagttgatttgatgagaacgggagtttccacttcgatgaagttttggtctgaaaggtaatttcgcactttctgcgccattttgtggcggaagatcagtttgtcttttaccggatttctgcggatatccagatatctgtatttcatacggagttcttcgccgccgtcggtttcatcttcgatggtaaatggcggaagttcggatgcgttcaggatcttcagatcttcaaccagaatctcgatttcaccggtcgggatttttgggtttttggaagcacgctcgatcacttttccattcacttggatcacgaattcgcgcccaagctttttggcgttttccaaaatttcttttggggttcggtcttcgtcaaaaaccaactgcgtgattccgtaacggtcgcgcaaatcaatccaaaccataaaacctttgtctcggatggtttgaacccaacccgaaagggtgacattctcgttgatgttttttagggataattctccgttggtgtgcgttctgaacataagttttgtttaaagcccgtctgccgacaggtagatttaaggtggataattgaagtcaaaaataccgtttgcaaagataggatttttgggtggaagcgggaagttttttcgatttaggcgaggctttggaaaggtttctcgctttgcgtgagggattggaatggtgcgaccgaagggagcagtgcgcagcggagcggagcaccggaacgaagtggagccatggaaagcccgacccgagccgtgggtttggggcaggagaggggcacgccctaattttatgaatttttagcgttttgattgaatgttttttaattaactttgtttaaatcaattaacaaaattctattaattatgggaaaaggagatcaaaaatcaaggaggggaaaaattaccgccggaacttatggcaaaaggagaccaagaaaggcgggtaaatcagcgacaacggtagcaacgatggaaaaacctgtgaaggaagccaagccgaaagcagcaccgaagccaaaagcggaaaaaccggtggaggcgaaagcggagaaaactccaaaagcggcagctgaagcggccgaatccaaaccaaaagcgaccaaatcaaagaaaaccgaggaataatccccggttttttttctgcaaatccgctttggatctgcaatggtttttttgggatatttcatgaattccggtcttgcagttcacaattcgtattgtgacctcatggtttaaaattatctttgcatccacaaaaagtattgacatgctcagcaaaattatcgtacacagagttggaaacaaaatcaatcaggaatccttgatccttgcgcaggaagaattgatgctggatgatgaaatgaaggaattgctagaagattttttctaaaggcattcaaatccgaggaacagttccgtttttatagtgattcttatttggtgaataatccggtttattcgtcagttgctgagatatttgaggataagggaaaatttgtttgggaagctgaaaatattgctaaacatctctatgaaatcactgaaaacccgcgagttcaaagcggtgaactgttcgtcgcttattttgaaggagaagaaaatgctgacggaaacaaaatagattccattgggatttttaagaccgagaataaaaccccattcttgaagatttttccgcagaatgagtctttcgagattgaaaaggattatggaatcggactttcaaagctcgacaaaggctgcatcatttataatagttttaaggaaacaggattcgctgtttctgtgatcgataataataagaatggcgacatgtactattggtttgaggatttcttgaaagtaaaacagcgcgacgatgagtatttccatacccaggaaacgcttgccgtttacaaagatttcatcacccaccaacttccgcaagaattcgaggtttcaaaggctgaccaagcggattttttgaataaatccatcaatttttttaaagaaaaggaaaagtttgattttgatgagtttgccaatgaagttctggaagacaaaaacgtgattgagagtttcagcaacttcaaatctgattacgaaaacgagatgcaggtttcaatttcggaggatttcgccattaatgaatctgcggtgaagaagcaaagtcgcggtttcaaaagtgtgatcaagcttgacaaaaacttccatatttatgtgcacggcgaccgcaaaaaaattgaaacgggacaggatgagaaagggaagtattaccggctttattttgatgaggagaagtaattttttatccacattcggggctggctgatccgcctgcatctgtaatcatttaaaaaataactttttggaatgagattttgagtggtattgctgctgagaattgctgcgctgaaccgtgaggtgatgattgaagacaacagctgttttttagaacttcttttcacggcaaaagttgcggtgctttttggggatagccagaaatgcatttcacaccagatcttgttcggcaatttgataccagctgcgacaaatttttccgatcctttttgtagttatttctttgctctactaagtggggtgtattatcttttttctaccagacgccttctaggtcgttttttttataattttatggtggttttgtggaaaaatattttctaaaaatgggtgttttcacggttacttttaacagatattaaaatgtacctttgcatgcaataaccaaaaaacacacacacagatgaaaaaaagcaacactcatttttcttattctattttctaatcgccaaatcaggagatttaaatcgcaagtcacattttagaataaaggcatcagtaaatttactctgccccaagcctagtactttcactacggcctatattctcagctgaagcaatgagccattcagtggttctgcacatttcttacaataactacaaaatctattcaatatgaaatgtaaattttcatttttgttaatgatcatctcgttcttgtttacgcttttgttttcgcagaaaatacaagcgcaactgataacgatagatggacaaactaatgattgggctgccgccctgcagtccaatacctactcaattcacattcgtgatgcgaataaaactaatgacgattcttttactcaaggatcaagtgaccccaatttaataagcacttgggcttgggagaatgggcaaaccaacagcaaaggcgatattagtaatgcagcggctgtattaataggaaacaaactttatttttctggagacagaaccgctatcaatggaaatgcacagataggtttttggttttttcgtgatgaggtagctccaaattctaattttaaatttaccggccaacaccaaataggagacatactcgtactctcaaattttaccaatggtggaggtgtttcaactttaagaatttatgaatgggttggatctggtggttcagatggtactttaaatttgattacaactacttcaaatggctttgtaaacagtacctatcaaaatacgccagcttacccgggatggacttatcaaggtgataatgttcccagtgttggtatcccacctccaaatgtatacgctacaggttcattttttgaaggttatgtagatcttggcacattgggaatcggcacttgtataggcagctttttgttagaaacaagaaactcagcttcaattacagcttcacttcaagattttgctgcaggtaattttaacgttaaacctgctgcacctagcgttgtgaatggtgaaagatgtggaccgggaatcgtgacaatgtctgcaacttgtataaacggaagtggtgtaagatggtacagttctgcctctggcggacagccattgggacaagctgatggagtttctgcagatggaaattctatttctgtcaataccaatacgaacgttacctattatgcatcttgtttttcaaatgtaggtaattgcgaaagtaccagagttcccgtaacaggtaccataaaatctcctccaacggtaacgctttctggtggtcctattttatgtcatgacggaactgctacaattactgcgacggtaactggaggttcaggaaattatagctatgcttggacaaaagatggttctccattcaccaatccgggaggcggcaatgttatccaggcaacaggtccgggtagctattccgtaatagttactgatacaactcaacaatgttcttcggcatcatcgaatgttgtgagcctgaccaaccctacccaggttgcggtaactttggccggcggcccaattctatgccacgacggtgacgtgacgcttagcgccacagccagcggaggaaacggaagctacacctacgagtggtacgtgaacaacacattgatcgccaacgcgagcggcagcacctacgttacccacgcgacaggatcctataccgtgaaagttaaggatggaaacaactgtcctgctaccagcaacgcggtgagcctgacgaatcctacccaggttgcggtaacattggcgggcggcccaattctatgccacgacggtgacgtgacactgaccgccacagccagcggaggaagcggcagctacacctacgagtggtacgttaacaacacgttgatcgccaacgcgagcggcagcacctacgttacccacgcgacaggatcctataccgtgaaggttaaagatggcaacaactgtcctgctaccagcaacgctgtgagcctgaccaaccctacccaggttgcggtaacattggcgggcggcccaattctatgccacgacggtgacgtgacgcttagcgccacagccagcggaggaagcggcagctacacctacgaatggtatgtcgacaacactttgatcgccaacgcgagcggcagcacctacgttacccacgcgacaggatcctataccgtgaaagttaaggatggcaacaactgtcctgctaccagcaacgctgtgagcttgaccaaccctacccaggttgcggtaacattggccggcggccctattctatgccacgacggtgacgtgacgcttagcgccacagccagcggaggaaacggaagctacacctacgagtggtatgtcgacaacacattgatcgccaacgcgagcggcaacacctacgttacccatacgacaggatcctataccgtgaaggttaaggatggcaacaactgtcctgctaccagcaacgcggtgagcctgaccaaccctacccaggttgcggtaacattggcgggcggcccaattctatgccacgacggtgacgtgacgcttagcgccacagccagcggaggaagcggcagctacacctacgagtggtatgtcgacaacacgttgatcgccaacgcgagcggcagcacctacgttacccacgcgacaggatcctataccgtgaaagttaaggatggcaacaactgtcctgctaccagcaacgcggtgagcctgacgaatcctacccaggttgcggtaacattggccggcggccctattctatgccacgacggtgacgtgacgctgagcgccacagccagcggaggaatcggcagctacacctacgaatggtacgttaacaacacgttgatcgccaacgcgagcggcagcacctacgttacccacgcgacaggatcctataccgtgaaggttaaggatggcaacaactgtcctgctaccagcaacgcggtgagcttaagcaatccagaacaacttagcattacagcaaatccaggtatcattagttgttcggcctcaacaacaagtgtaacatttaccccatctggcggaaccgcaccatacagtatatatatggatggaaatttaattgcgactgtcaatggtgtttatgttcaaaataatgttgcaggtggaacccacacttattatgtgaaagatgcaaatggatgtcaaacagctcagcaatctttcgtagttaatacggcattgccaatagctgttaccgttgatgctccagatgtactttgctacggaggaacatccctggtgactttgactatcactggaggaacatcaccatacaccgtggtatggttccaaaatggagtccaagtagctacaggtaaccctgttaatttaggtgtaggaagttacactgcaatagtaacagattcagtgggttgtgataaaacggttgctgtcactgtgaagctgaaatcttgccaaggtaagaccattacccaaggaggttggggcgcaccagcaaatggtggaaataacggtatgtacttgaacaaaaattttgcttctgtatttaccagcccagactatctgaccattggtgatggaagcagaaaagttagactgacttcaccagatgcgatccgaacctacatcaaaaatggaggaacagccgctattctgggaacaggtttagccgttaacccaccatgtccgaaaaatacgcttgcgagccaaacagttgcattgacgctgaatgttcgatttgatgcggccaatcctaattgggcacctaacacagataccgcattaggagatatgatagtgcttcaaggacctttagctggatacacagtaaatcaagtcttgacacttgccaatcaaattcttggaggtacttcaactcaaatgacgccatcagcaataaatagtgtggtgtcaagtatcaatgagaatttcgacaatggtactaccaataacggttatttggcttgtccatgtgtaaactatgcaaaacctattgccacaacacctgaaaaagtaaattccacagtgcaggaagctaaagttaccttatatccaaatcctacaagaggggagatcaacctgaaattcgatacggatcaaggaaaaactatttctgctcagctttataattattcaggaaaaatgttggatgatttgtcaagattggccagttggaatggtaataccgttactttcaactacaataatccgaatctgacagatggagtttatttgttgaaagtgaaaacttcaacgattgaaaaaatgattaagctaatcattaaaaagtaaatgaaatttataaatagaactgggctgcccttgtgcagccctttttttatgtacaaatatatcgactcacctttgttcagcgtttgaagattttgtaaatttgtgatactcattttaattaaatgaaggagtgtaattaatgatgaagccaaaaggtttcatgatacctttaataacaataaaaaatatattatgaaagttaccgtagttggtgcaggagcagttggcgcgagttgcgccgagtacatcgcgatgaaaaatttcgcttccgaagttgttttggtagatatcaaggaaggctttgcggaagggaaggcaatggacttgatgcaaaccgcatctttaaatggttttgataccaaaatcaccggaacaacaggtgattacagcaaaactgcaggttctaaagtggcggtgatcacttccggaattcctagaaaaccggggatgaccagagaagaactcatcgggatcaatgccggaatcgtaaaagaagttgccgcaaacttggtgaaacattcaccggaggtcatcatcatcgtggtttctaatccaatggataccatggcttacctggttcataaaacttcgggacttccaaaaaataaaattataggaatgggtggggcgctggattccgcacgttttaaatatagattggcggaagctttggaatgtccgatctctgatgttgacggaatggtgatcgcagcacacagcgacaccggtatgttgcctttggtaagtaaagccacaagaaatggcgttccggtaacagagtttttgaatgatgagcaaattgcttttgtaaccgaagaaactaaagtgggtggggctacattaacaaaactattaggaacttctgcatggtatgcacccggtgccgccgtatctgtaatggtgcaatcaatcctttgcgatcaaaagaaaatgattccttgctcactgcttttagatggagaatacggtcagtccgatatctgtctgggtgtacctgcaattatcggcgcaaacggtgttgaaaaaattgtagatattacattgacagatgccgaaaaagaaaaatttgcaaccgctgccaaagcagtaagagaagtgaatggggatttaaaagtctaagattactttttcatttttatagccaaaccctttcagaaactgaaagggttttttatttttgcgacctccttacatgacgaagcaattagggttggtaatgtccaatatttgatgtaacttgcttactttaaggtctctgataaaaaagcagggagtttctttcggccgtcatctgcaccatttcccatcttacttttttggcttttttcttctgagttgcggtaatgttatgctccggattgattttccatattcttcaagcactataaatccattataactccaatagtttattagagttataatggatctatattggagttatattggacttataggcaagaagggtgcaatgtgagtgggtgaatcgataggtttgatcagacggatgaagtgcttatgtagagcacgtcctaatttcattggttgcgggtctctgtctaattctccgcaaacatttaatttggctagcggtcggtgcgttaaattcggggaattatcattttggtgtaggatcgtattgttgtcctgactaccggagaggattatttatgctgtgaccgtggccattagcagattatttgctaactttacgttttaagtaaaataacaggactatggaaaagaaagtacatcagtgacggaatgtaaaacgcttcagagaaatgctgggtattaagcaggaagcactggcgttcgatttgggtgaagactggaatcagaagaaaatttctttactggaacagagagatgaaattgatgtgttattactccaaaagatttccggggcacttaagattcctgtagaggcttttcaaaattttgatgaggagcaggcggtgaatttaatttcttgtaccttttctgataatgccatgtttaataataaaatagaaatccagaatattaatcctgtagatcagttgatgaaaattcacgacgaaaaaatcgctttgtacgaaaggatgctgaaagaaaaagatgagatgatggggcggcttgaggcgctgattaaaaataagatgtaaaaaattaatataaaaagagcttaacctgagggttgggctttttttgtgcacgaatagatttgattttttgacaaataaaaaggcgagttgccccgccttgaatgttttcacaacggctttccttatagtaaaaaattttctattatggtttcccgtaatattggttgaaatctttttactaatttagaaagctaataaaaacagctatgaaaaaaacagtgttgggattggatttgggaactaattcgactggttcgtctttcataagggtttataaataaaaagtcaaaaaaaaatggcaactaccagaagcagttacctagaaaacttttctacggcttatagccttgttgtgaattgtctttcgtatacaaatgtataaaaatattttaataaacaaataatttatgaaaaaaattggattagatataggaagttcgtcattaggatggtttatcgataaaaataaaaaaggagtagtcacatttgaaacaggcatgtcaaaagggcagtctggtggatatacttcgcctacaaaagatcgcagagaggctcgatccaaaagaaatttaatcagggcaagaaaatacagaaaatgggagttactgaaggttctcttaaatggttatgttcctttaactgaaaccgaaatgaatgagtggtgtcattataaaaagggaaaacaaaggaaatttcctgagagtgagcaatttttaaaatggcttgcctgtgatttcacttatcaaaatggtgaaaaatataaaaacccatacgagttgcgtgttaaatctcttgatagtaatttaagtaagcacgaatttggaagggcgttgtaccatttagttcagaggagaggttataaagatattggcgaaagagatcaggaaactgaaaagcaaattcagcgacgtggagaaagtggtttccaaagtgcattagatggaaaccgcactgtagcggaagctttagtaaaaggttttttagataaaggtgaacgagcaagaaatcaatatccgtatagagaagagtatagaaaggaattagaacttatttgtgaatcgcaaggatattctactgatctaaatgacaaaggcgaatatgcggataaatttgtaaaaaatctttggaaagcaattatttggcaaagaccattaaaaagtcagaaaggaaatattggaaaatgcacattagaaccttcaaaacttcgttgtcctatttcacatcccgcttttgagattttcagagcattgcagttcatcaataccataaaatattttgatactaatggtgaaaagcaaagtttaaattcagatttaagaaataaattatttattgatttatttttaaaacaagatggaaattttaagtttcaggaaattaaaaaatttttggacaagcatagtgtttctgtttacaagtataattatcccattaatcctaaaaataatcaatacgaaacttctgtagccggaatgcctatatgcaaaagtctaatttacttatttggagattccgcacaacaagcattgctggatattgaaaagtttaatataggtaatgcgccaaagattaaaggaggatattctatttatgatatttggcacatcgtttttgattttgacgaacagcatttagagaagtttggtcaagagaaattagtcatcgaaaatgtcatccgaaaaagaaaaggagaagatatctctgtttcgccattagtagaattaaagagaaaatttttacaaggctattctgatgtcagcctaaaagcaatttgtaaaattataccttttttgaaggaaggatatttatacaatgaagctgttgtacttgcaaaaattccttatttgattggtgctgactggaaatcatttaaacaaataattttggatgtattgaaagaaagtaataaacgctaccaagagaaactaatgattgcatcaatatcaaataacttgattgataagcataaaggtcaaactagagcaactatcgacggtaatgaagatggatctttcgcttataaagatttttcatatacgattactgaaaaggatgtagaagatgtaaaaaatgcctgccgaaatcattttggagataaaacttggaatgaaacaaagaatcaggatgacatcattcaaaaagttgctttggaatatcaggattatttctatgatcagaaaagagcttacagaaaaactgaaacgcttacagaaatttttaattcattattaaaagaaaaaaatattaatcttaatggcgagctatatcatcattccaacagagagaatttgtacaacaaaaacctacatgtaaattttaaaaccggagaaaaatatttgcctaaatataaagatacagaaagggaaatccttccgatcccgtatatcgacagcatcaaaaatccaatgttcaacaaatcgatgagtattgtgaggaagcttttaaatgaattaattataaatggagaaatcgaccaggaaacagaagtaactgttgaactcgcaagagaactcaacgataataatgtaagagccgcgatagaaaggtatcaaaaggaacgcagagataatcgtgaaaaaattcgaaaatttttagaacaatacaatgaagaagaaagcagaacacttaatgtagaagataatattcctttatttgagctttggacagaacagatttttgaagaaactgaagatgaaagcaggaataaaattcaaaataaaaataggttagacatcctcagagaaaaagaagatgtaaaacgatatgaattgtggacggagcaaaaaggacaatgtatgtacactggaaagatgatttctatatcgcagttattctcaaatgaaattgatgtagagcatactattccgagaagtattttaccagataatacgatggcaaatcaaactgttgcatttgcaaaatataatagagacataaaagctgcccggactcctttttattgtgaaaacttttctaaagatactcctaatggaaccagtatttcgcctagacttgataattggagaaaattgagagactattataaaattcagtatgagaccagaagacgagcaaaaggcgcagaagatgaaaattcgaaaaataaaagaattcaggataagcattattttaagcttcacttcgaatattggaatgataaactaaatcgttttgaagcagaagaaataaaagacagctgggcaagaagacagttggtagatacacaaatggtaagtaaatatgcacgagaatatctaaaactttattttaaaaaagtggctgtacaaaaaggtagtataaccgcagaattcagaaaaatatttggctttcaggagcaggatgaaataaaaagcagagataaacatacgcatcatgctattgatgctgcggttcttacgatgattcctacaaatagcagttacagggaagaagttctgaaagaatattatatagcagtagagaataaagacaaacgaaagatggatgacctaagaaaaaaaatgattccgccatttttcaatgtgcagtctttgataaaagaaatagaatctaccactctaatagttaattatcaaaaagataaaattcttcaacaaacaagcagaacggtcagaaaaagaggaaaaattcaatatgtaaaaaataaacaaggtgaatttacacccctttaaactatttgtaataatataacagtaaacaaaaaagccaaaaaagccaatatttaaagcactttcggggtatttttgctttgcatgttggatgaaacgaaatgtaaaaatatgactgtttgctaccattttattaccgttttaaacatcatttaattaccgtttaaatctatctgctataatattcccgccaaaggtactaatattaccatttaaagtcttaaaactgctgttttgagactattttttttccagatagctaaaaaaaacggcaagtgatccgcagaaaataagcttcaaaaaaaaggaagtaaattccagtggattaacacttggattaacacttggattaacaattaacagtaaaaaagcaatcagaaacaaacgttattactgcaaataacccattaaaacagaataaaaagcgggtttggttacgcttatttgcattgtattttagttattattaatctgtatatatactgattatcaatatattatactaattaataaagaccatcagaataaaaaagatatattacttaggtcttttctttagttcaggtataggttcagcaaccaaagaataagcattttgcgcctctgatcttttattttgtaaactgatattttctgacttcagtttttctaattggtcctttagatcgatcacctggcttagcagtacattattttgtttggctaattcatataagtttttataatcaattggctgttcctccgcttctggagcctcaccggtgaccagccaatccagggatcttttcaaaatcttgcttatttccacaatttgcaatagtgtaggcatgaccttacccttttctattttagaaaattgtgaaggatccatttcaagcctgttggcgacttctttctggctaagtttcaccagctctctggcttccttaattctgtttccgatggtcatgacatgtgtatttttatttaaaaagtggaaatattttccatttttatttttttaaatggaaatatattcctttctttgcttcataattgaaacaaaaatgaaaacagacaaacctacaaaaaaaagacaatcctacaatacggaaatcatcaatgcgatttctgtggagtttggagtctccacgcaattcgttaggcaatgcatcaggaaagagaaacacagcttaaccgccgacacgatcgccaagaaataccacgagctgtgtaacccaacaaaacaggctttacaacactttaaaaataacccgatatgaaattcatttactcattcacaagacacacattttacccattaaatgggagtaaagtggaagtaagaacacagcattctatcttacgtggtctgatcacctggaccagcacaaagtcttttaataacgaattatctgtgtagctatgccacatttctggaaccatacaaatactgtcgcggtatttccggaagagcttattccggaattctggaagaaccaggcgtgcctgtcggttgaaatcagccgaaaccgaaacaatcagttcggtgttaaggcgttgcagcgcggcggtggtaagagcaggaagctgatcatcgatttcgattcacttcccaatcacatccagcagaaactgggtgatccgcgcaaagtagaacacaatctgctgtatttctacaaaaccgattctgtggcagttgatttttataccaacttcaagcgcccggacggatcttatcttaacccggatgaacagcagcgatatattacgaatgcaagtgtactgatcagtattctgaagcttcgtgataaacaccagatcgagcgtgtgaaattaggaatgtcgctgaaaggccttaacaccttcctgtgtgaagaaagcaattcattcaatgcgatccttttaaaaagattcgatattcagcacaatctgccgacgcatccaacccgttttaaagaagctttaaacgacttttcaacgccgtttaatgaatggccttacaatttcgcagcgatcattaaagatatcgaaggaaaaaggaaacagaatgccagaattgtggatgatgttacggaagcgatccttaacggattatttgccaatatttcgcataaaccaaccgcaaccgagatttacagagcttacgaagcatttttaagcggatatgcacaggtctataacgaagataccggcgaaatctacgatccaaaaggattcccaaaactatctgaaagcacagtacgcctttatctgtcttcctgggaaaacaaagcagcaacttacaagcagagatccggcgaccgccaaaagtatatggggcaatttaaaccgcctcatcaactggagcgaccaaaattcgcaggatcacttatttctatcgatgaccgccaaccaccattcaaagatcttgacggaaaccgggtttggttttacaacgggctggatgtagcatctggttgcattaccacatttgtacacggaaagacaaaggatgggataatcattgagttttaccggcaaatggtacgtaattatactgaatggggtttcaaccttccagacggccttgaagccgaaagttcattaaacagcagttttacaaagactttccttcaggaaggatatatgttccagaatgtgagaattgaagcaaataatgcgcgaggaaaacgtattgagcgcgataatggaatcctcaggtataatattgagaaaaaacgtccaggttggttggctcgaccgcatgcgaaatcagaatcaaatcaggaaggaaatgaaaaagtacctcaaattccttatgatcaaattgtgcaaggtgctattgaggatatttatgagctcaataattcttcacacatggaagatccaacaaaaacacgctgggagtactttagagatatgcaacacccggaactgaagccaaccaactggaaagcgatccttccgttcctgggatatcaccagaaatcatcatgcaacactggatatatcaaattacagggtaaagcccgcgctattgcgcaaaacggacagatctgtctgggtgaaccgctgattaacgtcatgaaatcaattgaagggaaagaagttgatatttactggcttgatgataacgccggaaacgtgatgaaagcactcgcattctatgaaggcagattcatttgcgaagtgcaggaaatgccgaaatacaacagagcggtcattgaacggacagcagctgatgatgaagcccgcgagatccagagcagctatgtttccaccgtggaaggttttatccgtcaccacgaaaaagcactgatgaaggtcaacattttccagcagccgaaaccggaaccaaaaaacggattctttatcccgggcatggagcacaaccgtttccagccacaaaccacagacgctgaaatcatcgataccgatgaagctgaaaaaatggccatggtgccatccgtaagctggcaaaactcattctttaaataacaataaaattacacaacatggaattatcattagagtacaaacagcaggttagaacggcattactcgaacgccgcccaaatttcggcggaacggacggccagtttgcaaagatctacggaattaatggagctgttttcagcagactgaataaaggcgaaatcgacggacttatctcaccaagccaatggctgcagatcggcagagaactgggcgtgaataataagaaaagcagctggaaggtagtgcgaacaaaagtatatacagagatcgaaagcagtatccatttctgtcagcagtatgcccgctccatggtccttgtggatgcttgcggtatcggcaagactttcagcgccaaaaatatcgtgaaaacgatgcgaaacgcattttatatcgactgttctcaggcgaaaagcaaacagttatttgtgagacatttcgccaaaacactgggaatcgataacaaaggaaagtatatcgacgtaaaagagaatttgaagtattacatcaatcagctcgaaagccctgtttttatcctggatgaagtcggcgacctggaatataccgcatttctggaactgaaagagctatggaattcatgcgacggtaactgcggatggctgatgatgggtgccgatggtttgagaaacaagatccagaaagggatcaataacaagaaagttggtttcgctgaaattttcagccgattttcagacgaattcattcagcttacgcccaatggagtacttgataaagaggcattttacagtgaattgcttacgcaggttgccaccgccaaccacaccggaacccaaccggtagaaactttggtaaaacaatgtttaaaaaaagaagctacactgcgtcatttggaaacgctcattaaaatttcggcgtaaatgaggacctacacagtaagtaacattctgagccggaaaatgaagatcctggaactcgtgggtatctggctggaaatcttcgggaagccggaaagaaccggaaaggtttggatcatctacggcgaagagaagcagggaaaaacgtggttcgctatgttgctggctcaattccttagcacacttgaaccggtactgtatatctccgcggaggagggtttaggattaacgttccaggaagtgatccaaagggcgcattttgacccaaaaaacaagaagttcaaagcctacggttatctgccactcgcggagcttcgggaatcgcttaaaaagcgctacgcaccgaaactggtattcatcgataatgtgactttttacagtgatgaactgaaaaacggcggtctgcaggaactggtaaaagaaaacccggataagctatttattttcttagctcatgaggaacgcggcgaaccttataccgccacagcgaagatgatcaagagaatggcggacagaattgtaagagttcagggtttggttgccacagtaggcggcagaaccaccggcggccagttcgttatcgatcaggaaaaagcaatgattctacacggatctgatattattaagtaaaaaaaacaattcacaacaatgaaaacaatcaccaacccaaacaacccaaatcgcatgctggtaaaaaaagcgctgggttacaatgactggggttacgataatctgatccatcagttttttgtcacctggtgtgaagccatggcgctgaagttctatcataaggaccgcgacctgatttcaaatgaaagcctttttgcctactacaacaaacagtggcaaatccttgtggaaaacaggatggtcaatgaatacggcgggtacatgatgaaccagatccaggattctgccaaaacgtattacaagtttctgtatgacttcgcgatggagctggaaaactattacccggcttcgctgatccgaaccgtaaaaccaaaagagagaacaaaacctaaatatcaatttaacctcaattaaaaattatgacagaagagttaaaacaagaagtgaaggacatccttcaaaaaatgagtgatgctaaagttccgtgccttttcctggcatttgatggtgaacatttcaccaatctgcgaaactgcaatctgcaacaggcggcacagctcatgatcaaccagattgaaagttcggaagaacagaatggaatctttgtaaaagagctggaattattaaatcaaccaatcccggaagaaaccgatggataatgaaaaattcccatacacagaagcggtactggatatgatgatccgcaccacgaaggaagcaatggaaacggttgaagataaagcagattatgacaaactgcacgatcagctgaaagacctcaaagaaaaaaagagacaattactaattattaataataccctttaaaaaaaatcaattatgacaccagaagaatttaaaaaacagtttgaagcacttgtaaaaaacgccccgaaaggttctacgcttttttgcacctattccaacgacgataataagcgtccaactatactt

SEQ ID NO: 3371 - DNA, 19117 bp, synthetic construct
  misc_feature 1..19117: note = Synthetic
  source 1..19117: mol_type = other DNA
attatcagtatatttatatttgtagctatccacattttgtcctaaaagactaacttctctaaatccttgttcgaaaagttcagtagcttctttcacaatcgagtctacatctcgactgcgttctctgcctcgtgtataaggcaccacgctatccccgtggcaggtgtcttcacctgacactagtttgatttgtgtcaggtgaagacacctaccacgggataaaataattcaagttggtattatttatggactttcctgatgttaaaggtgttggattttagcaaaacgaagttagaattccgagtaaaaattgggataacaacgacaaaaataaaaatatagatttgggaaaagctagtgattatgataacactccaccaccgttttaaatctaacctttatttttgttaaaaagcaaaatcaacccagcaattgagccaaaaattatggtagctaacatttgagatgaatgcaacaatgtggcacatatcaaccctatttgagctggaatttgatacagcagcaacacactctgaaccataaaatgataggctccaatgccaccttgcactggcacagccattccaaaagctcccatagtgtttacaaccaacccaactgatgcgctcaggttttgagtaggctcaaatgctaaaagtaaaatccaagtgagcaaagcataactaaaccaaatgcctaccgaaagtgcaataaacaatattcggttttgtaatttaaatacactcaaaacaccagatttaaaaccaataaacaactccaaaaccttttttatccatttgttttctgaaaatttattggcttgttttttgataattagcacaccaataaaacctaaaattaataaaatacaaactgccaaaattaatttccatacttctatatttttgaaaggcaaaatggaaagtacaaaatcataaatcacattatattctaaaaatagacataaaaccaaacacaccaaaacacacaatacatccacaatacgttcggttacaaccacaccaatcgacacatttgcaggaatttgattggtacgttgaataatggtgcatcgggttacttctcccatgcgaggcaaaattaaatttgctaaataaccaaccaccacagccaagcttgtattccaatctgatgttttatagccaactgccttgagtaatagattcatgcgaacggctcttaaataatgtgcaaaaagcatgataaaacagggaataattacgagccaaatatttgctttttggagttcatcaaatagttttttaaaatcaataagctgatataaaactataccaactaaaagtgctaaaagtacaggaaatattgtttttagaaacttcattctgaataaattttagtttctattttttcttttttcaatatatattttcctaaatattgatgaacaacaaatgccgaaactacaccaattaacgaaccaaaaaatacatcaaaaacaaaatgttgcatcaaataaacccttgaaaaagctaccaaaaaagcagctaaaaaacatttaaaacttagcaatggctttttataaaaaatcaataaaacaagtaatgtaaaaagtgtaaaagcagttgatgcatgccccgaaggaatagaatctatgctgtttaagtattcgccttcgacataatgaacaggataattaggcattgtttgtgccaaaaacatacttggtcgaggtacttgcggaaaaacaaaccatttcaaccctctcacaattatcatttgcaacaatccacctaaaataattaaaattccttttctataatcatatattaaaacggcagcagtagcaatcgcaaaaaaaataccatcgcctaaataagtaaaatacttgaaaaaaacatcaaaataaggtgtattatagccatttatgattaactctaactcgggttttgaaaaattatagaataaaaaacaacctaaaatcaacaataaaatgtatgcggttgtgaaaatatttcgtccagaagatgtaagcataataataaattacgcaaagctaaactaattttttatggataacaaagatttaccaaactgtaaaaatcaaacccaattgagcattataaagattcgttttagaaaaataattttgatacataaatccagctgtaagcatagtttttgatttttcggtttgattaatagtgtatgctacttgaaaaccaatttcgtttctaaaatttggagcatatcttccatctaaaatcacgcttgttttttctgcaattttaaaatctgtgttaaaaccatactctacaaaattgcgattggcataaacttctcggctcaaaccaactccaagtctgatgtaagtattgtattttgaaacaatattaaattgcacaatttgccaatccaaagtggcgtattttccaacaccaaattcttgcaaatgcgaatacctaaaatcagtagaaagcaaaccccaatttgctctagctcgaggcaaagccaaaatcgaacgattagggattggatatgccaaattgggcatcaaatcgagcgaaagtatgcgtggattttcttcttttcgggattgaaccaaaaatttttgatactgaaatccgcttaccaaaatttgataactaaactgaaaaacataaatcaaagcagaaatatcgttaaatgtgctgtttgatcttcgagaagttggcacagcatcagaacctgttttgatgtcattaacctgcgaaaaggatgtaaaatttaaaagaaaaactaaaaaaatcaaacaaaaccaacgcaacacactttatgatttaggtaagttattgaacgctagaaaactcaaaatgttgtgatacaagaattttgcaattgcaatgttttattgttcggtaatcataaactttgatatacaatatactttcacaatagtcaaaatcaattatttgcatttaatgtgtttccaatttttgatagtatttgtacaaaaattacacaaccagttcaacagtcacacttataccaaaaacagcaaagtgtcttttcatgaaaaagtttcacaaaaaagccccgtattggaagacgaggcagcttaattgttttcacaacggaataatccttattgtgatttgctttattcgtattcttaattaatttttaatgaaactcatgaatctcgttcctcgatttcaaaatttttatttttttatttgtgcttttctttctttgataatttcttctatttgtttcatggcaacagatctatcaacgggaacagttttagaaagtaattctttccaaacttcatcaggattgcgaccataaaatggattaccaggtttgtatctttccatgattatattttttcaatgcaaagataaattcaatttctattttttgcaataataacttttaatttcacctttagatgcaacttttacttccaaaataactcttttcgaacttggaatattggatgcaattaacaaaattctttttttgttactatatccacatacagtatgataggcttcgttgattggaaaaccttccatccattcaaacctgctatcttcatcctcaatcacacttctaatttcgatttgagttatcttatcagggtctgatactaaatttagctgtgaaaagtctagttcgaaattcatgatttattttgatgggtaaaagtaataaatgaaaataaatagtaattaaattcgtatttcaaataagaagttgttttaatacgtattttgtatttattgccatgaaataggtttttctagcttataaccatttgatttaacaacaatttgtggaaattgtccatcttttaatttttttctacctattgtcattgaaccttttgcttcgttttttatgctaatattttctctattgggagggaacgcaacaaaaactctcttgattggaaataatttatgtatggattttattggaggtactaaatcactatcgcctgtgattaagaaagcggtatcatatttatctagaaaagcatcttctaacaatgttattgcaatgtttacatcagtcatcttttcacttgcataaggataagtatttccacattttctacatgtttctatgtttgactgaaattttccataaattattttaaaatcttgcaatgtttctaatgcctctaaataaattttttgccttttttctttatcaggattattactaattctagaagtaaaataataaatataaattaattcttgatttggtttcaaaagcgataaaatcaattgctgaatatttaaccataatgtatcgtttccatttgctttcatgccaaaataaagattgaatccatctacataagcaataactttttctttttttattggttgtatcattttcttttttgtatatttgcaccacaataacagctcctaagatagcatcttaggattgacgccttagataattacttatttaaggcgtttcgttttgcaaaggtatgttaaaaatatttaattattaaaaattataaattaaattcatatatatgatattaatataaactaaaaaataatttataaacttgatataatacactacatttgaaaaaattatgctggtatatgagaaaatagaaatttcatattttgatgttaatgttgtaatttgctttctagtcaatggctaacagcataatttttacaaaaaaaaagcgactacggaagtacgcagtcgcaaagtgaaataaatcctacggcttaaagccttgttgtaatttgtctttcgttgcaaaattaataaataaattttaaataaaaaaataaaatgaaaataattggtttagacgttggcagctcaagtttggggtattctttgagagtaggaaatgaaatatataaaaaaggtgttattacttttgattctggcatgaaaaaggggcaaggtggatacagttcccctaccaaagacagaagagaagctcggtcaaaaagaagacttattcaagctcgaaaatacagaaaatgggaacttttaaaaatacttctaaatggttttgtgcctttagaaaaggaagagcttagcaaatggtgcaagtatgaaaaaggcatgaatcatatttttcctgaaaatgaaagttttttaaagtggcttgcatgtgattttagttatattggtgtaactaatacgtataaaaatccttatgaattgagaataaaagggattgacacgattttacataaacatgagtttggcagagctttgtatcatttggtacaaagaagaggttataaaaatataggagaaacggatgcggaaactgaaaaacaaatcaaaagaagaagcgaaagtggatttcaaaatgccttagataataatagaacgatagctgaggcactcaaaaatgaatttttagataaaaatgatagagcaagaaatcaatatccttatagagaagaatatgagcatgaatttgaattaatttgcaaaggacaaggttatgatatttcaaaaaataaaagactcgaatacaatgacagttttgttgaaagcctaaaaaaagctattatttggcaaagaccattgcgaagccagaaaggaaatattggaaaatgtactttggaaccatctaagttaagatgtccaatatctcatccgatttatgaaatatatagagcctggtcgtatataaacactattaaatacacagattttgaagctaatgaagcatttttggctgaaaaggaacgcaaactattgtttagtttctttttaaaacaaaagaaaaatttcaaatttgaagatataaaaaaattcttagataaaaatttcaaaaaagttaaatcatacaattatccttataatgaaagcaaaaaagaatatgattctacagtggcaggaatgccagtttgtgatggtttgatttctgtttttggagataaaataaaggaaactatagaatcattacatttatataatattggtaatgctcctaaaatagttggaaattattctttgtttgatttatggcatattctttttgaatttgataaggctcatttagaaaaatttgctgccgaaaaaatacatatttcaaatcaaaaaaataaaaatgaagaagagtttaatccatttgcagatctaaaaaatagtattactcaaggttatgctgatttgagtttgaaagcaatgtctaaaataattccatttttaaaagatggatttctatataacgaagctgcaattttagctaaaatacccgaaacgattggagttgaatcatggattttaaataaagaaactattattgataccttaaaagtgtgtaataacatttatcaatggaacaaactaattggtgctatcacaaatattttaattgatgcttataaaggacttgaacaaccatacgcttataaagattttaaatacgaactaaaaaaggatgatgatacagaaatagaaaccgcttgtaaaaatcactttggcgaacaaaaatggcaaattagaaaagataaaaataaaatcttatctgaagttagaatacaatatcaagcattttttaaagatgaacaaagaaaatattgtgttcaacccaatcatagcgtactgtttgaaactttattaaaagaacaaaatatacctattactactgacaaattatatcatcattcaaaaaaagaaaatttatacggaaaaacgattattgataaaaaaacaagattagaaatactacctgaagccagaattgatagcataaaaaatcctatgtttaataaatcgttaagcatattgagaaaattaataaacgaacttataaaaaatggtgatatagacgaacaaacggaagtagtaatcgagctagctagagaccttaatgataacaacaaaagaattgcaattgaacgctatcaaaacgagcgaaataaaaaacgaaacgagtatcgaaaatttttaaatgagttcaaagtaaagaaaaacttaaattttaatatagaagaatctttagcaccttttgagctttggaatgagcaaattttcgcagaaacagaagatgaaaataagaatgtagtctttaacaaaacacgtaaagaaatcatcgatgaaaaaaatgatctaactcgatatgaactttggacggagcaaaaagggcagtgtatgtacacgggaaaaatgatttctattactaaattattttccagtgaaatagacattgaacataccattcctagaagtattttgccagataacacgatggctaacaagacagtagcatttaaaaattacaatacagatattaagaatgaaaaattgccaattttttgtccaaactataaaatagacaccattcaaggcacaagcattttacctagattagaaaagtggatcaaaattagagatgattttaagggattatatgaaagtagggcaataaagactataaatactgaagatgaggcagcaaaaaacaaacgcattcaagaaaaacattattttaaaatgcactttgattactggaacgataaagtttatagatttttggcagataatgtaaatgacaaatgggtaagaaggcagctagtagatacccaaatgattggtaaatatgcaagagaatatttaaaaacttattttaataaagtttctgttcaaaaaggaattattacaagcgaatttaggaaaatttatggctttcaagaggcggatgaaataaaaaacagaaataaacatacacaccatgccatagatgcttctgtactaacactaatacctttaaatagcaataaaaaaattagtattttaaaagaaatgtataaaatgtatgaaaccactggcaaacaatatacagaaatgccttttaaagattttaattctcagaaattaattgaggaaatagaaaatactactttgatatataattatgaaaaagataatatactaaaacaaaccgctaaaaataaacgcaaaagaggaaaattagaaaaactaaaagataaagatggtagttttattttagatgacaacggtaatgaaatacaaataaaattagctggaaactcaatcagaagtactctttttgcacaaacatttattgctaaaataatggatgtagaaagagatgagaacgacaaacctattaaagaaccaaatggaaactggaaattcaaaaaagaaaagtttgcatttgtaaaacgagttcctgttaaagactgtttatcaaaaattaaagacattgtagatcctgtaattagaaaactagtagaacaacaaaaaaataatgatgtcatcaaagattaccaatgcaacaccattcgccatgtaagaataaaaacgggtgctggaaaagaagttaaagaaagggtaaattataaatcagaacataattataaaaattattattactcagaagctggctctattccttacgctattttaattcaaagaagtaacaatggcataattgaacgagaaatgattcctgttgcatcttttgaaattgcagaaatgtttgacttgtatctcaaagaaaaaagcataggtaatattatttctaaatttgatattcaaaaatatttagttaaaaataaaattgatatttcagatataaaagagactaagcttttaaaagttggacaaaaaataattgtattaaaaagtgataaagaatatgaaaatcggaacaaaattgattttcaaaataaacgactttatgttattacaaaattttcagaaggtagcatttggttgcaatatcatttagagtcgaatcctaaagaaatagataaaacagttaaaaatgaaaaagatagattagttcaattttatgaaaataaatataatatccctgaaataactgaagatgtaacaattaaagataacaaagctagaaaagatgattttgaagaccgaaaatataaattttcttcaatttcagattttagattggatagattagttgctgaaattggaattgaaaaaactaagaaaataatggacgaactatctcaattcaaaacgcaagctgcaacaatcgaagtagaaggcaaaactcctttattaaaaacttcaagtaaaaattggaattttctttatgaaaactatgattttacagtttcaattttagggaaattggaaatgatgtaaacaactaaaaacctcccgactcggcaatattaccaaagcttaaatccaatgcttaaacgaaccatctatttctcaaatcctgtgtatttacgtagtcaaaacgagcaattggtttttaatctgcctaatgcacagggattggatgaaataggaaagcaaaatacgattcctatcgaagatattggaatcgtaattttggatcatcagcaaatcactatttcgcatggattgatagccaaattattagaaaataatgtggcacttattacctgcgatgccaaacatcaccccacgggtttaatgcttaatttggatgggcatacgttacaatcggcacgatttaaagcccaaatagaagcatccgaacccttaaaaaaacaactttggcaacaaaccataaagtcaaaaatagccaatcaggctagtatgttgcaatatttgggtatagaaactgggaatatgcagcgttgggaaaacgatgtgaaatcgggagatgctgaaaaccacgaagcccaagctgccgcctattattggaaaaaaatattttcgcctttggtaaatcttccaggttataaaaacttggaagattttacacgtgagcgagaaggattttatcccaacaattttttaaattatggctatgctattttgcgagccacagtggctcggagtttggtcggttctggacttttgcccactttaggaatccatcatcgcaaccaatacaatgcctattgtttggcagatgatatcatggaaccttacagaccttttgttgataaacttgtgtatgaatttttaaaagaaaatccatcacaaatagaattaacaaaagaaacgaagtccaaattattacaaattcctgcactagatatattaatagatggttcaaaaagtccattaatggttggaatacaaaaaactacctattcagtttataaatgttatgtaggcgaaagcagaaaaattacctatccattattttgtacataaaaattttagcatcttaccagaaacacttatccacaacatcacgtataacctatagtaagtatatttctgttttttaatagcccctataaatatgactttattatgttggacagactaaacgaataccgaattatgtggataatggtctattttgatttgccagtagttgaaaccaaagaacgaaaagccgctacaaaatttcgtaccgaaatgatgcgagatggatttacaatgtttcaatatagtatgtatatgaggcattgtttcagtagcgaaaatgccgatgtacatattaaaagaattcaagaactgttgcctgacaaaggacatgtagtgatagccaaaatcactgataagcaatttggagatatgaaaatatttcattgccgagagcgaaaagaacgcaaagccaaccctatgcagctagaaatgttttgagatgattaaaagtattttgaatttaatttgggtaattttttgcctatatttcatcataaatggtattattatggaaggttttaagggttttttagttggtatatttattgcattatttatttctgttttttattttattttacaagacaaatcaaacagaagtgatgatagtgcatacggacctacaaatgaaaacagatcagaaaaggacgatgatggagaagaataaataaacaataatatgaatagaaacgattttattaaaaatgttacttcgttggtgggcttttctggtttgcccaaagaatgggtaaaatcgtataaaaaagtatacctattgcaattttttgtacgtggatttcagtttaatgatggcttaaaagcattggataaattgaaagataagcaacttttgaacttaaaacgagagccagaaaatccgtatgataaaaatgcaatttcactttactttaatgagtttaaaattgggtatgtccccagagaagacaacgaagttttggctcggctgatggatgccaaggtggttgagttgttagcagaagttgtgaaaataaataaaaatgtaagcagttgggagaatgtaaatgcgtgtatttatgtgttgaagcaagaaaataaacccattaatgaaaataatgtacgttgctttgaactcgaatctccaaactattttacacttagccacacagacgatagctatatttcaagagtaagttataagaaaaatgagaatagttttggcgaaaatttctatgatttattggttgaaaagagtaataatgatagtatttatgatttaattcataataattttagcagccaagaatttgatttggcatttgaaaaagggatgtttgtgattgatataagtaaaattaaatctaaagttttggaagatattcaaaaaacagaagatttgatttattatgaactaaataagagtaaatattatatcacttctggagcggattttgtagccgaaaacatcaatgaaataaagagttttagcaaaattaaaactgcgacagaagaaattttgtatgaaataatatggaaaaaaacataatgaagcatctgatttgaaacaaaaaatgctcctattacaggagcatttaaagcaaaagacatcttaatttttaatcgtaattttgactataaacaactaataatgagaaatatacgcacatttagttgtttaagaatgtcaaagatacgattttgaaagcaaatcacaacctcatcaactacttttattattttatctccgttgtttaagaatgtcaaagatacgattttgaaagcaaatcacaacatgcctactgcgtttaattgattagcctctgttgtttaagaatgtcaaagatacgattttgaaagcaaatcacaacctccataacttttccatttgatacgagcttgttgtttaagaatgtcaaagatacgattttgaaagcaaatcacaaccctgttacagttactaaatgtaatgcaggggttgtttaagaatgtcaaagatacgattttgaaagcaaatcacaactagtacgcaatgcgtacctttatagcataggttgtttaagaatgtcaaagatacgattttgaaagcaaatcacaactcttctacattgatagtagatggctcgaacgttgtttaagaatgtcaaagatacgattttgaaagcaaatcacaactgtggtgttttgtccaagtgattttattccgttgtttaagaatgtcaaagatacgattttgaaagcaaatcacaacttattaaagaatccatatatttgatataaagttgtttaagaatgtcaaagatacgattttgaaagcaaatcacaactgttttgctgttactcctacaatagttaaagttgtttaagaatgtcaaagatacgattttgaaagcaaatcacaactacattctcagatttctttcttcctctgctgttgtttaagaatgtcaaagatacgattttgaaagcaaatcacaacgttgctcctgttattgctgtgtttttttgagttgtttaagaatgtcaaagatacgattttgaaagcaaatcacaactaatacgtaagtttaatttttaatttctttgttgtttaagaatgtcaaagatacgattttgaaagcaaatcacaacaagcgttcttgtataagttctttacactcagttgtttaagaatgtcaaagatacgattttgaaagcaaatcacaaccttgctgtttatttgcttcgtgttcatcatgttgtttaagaatgtcaaagatacgattttgaaagcaaatcacaacactattcccatctttagataatattaaaggagttgtttaagaatgtcaaagatacgattttgaaagcaaatcacaactaatagatatgtattatctttgtacaaaatgttgtttaagaatgtcaaagatacgattttgaaagcaaatcacaacggtaaaattaatgaatattggaaattaattgttgtttaagaatgtcaaagatacgattttgaaagcaaatcacaactattccctgtaattttcctccgattctaatgttgtttaagaatgtcaaagatacgattttgaaagcaaatcacaacaagtggcaatattttgccagtattcatcagttgtttaagaatgtcaaagatacgattttgaaagcaaatcacaactacaacttgataccattgaaaggttgatacgttgtttaagaatgtcaaagatacgattttgaaagcaaatcacaacatatgtgttagactatgaatttacggcagagttgtttaagaatgtcaaagatacgattttgaaagcaaatcacaaccggtatacaccgtttgtgtatcaagcccttgttgtttaagaatgtcaaagatacgattttgaaagcaaatcacaaccattcattaggattgaaagtgccaggagtggttgtttaagaatgtcaaagatacgattttgaaagcaaatcacaacatgcagacgaaggtgctatttattatttgcgttgtttaagaatgtcaaagatacgattttgaaagcaaatcacaacgcttcttgcttatctccgtaagtaaaacttgttgtttaagaatgtcaaagatacgattttgaaagcaaatcacaaccactgggcaataagcaatgaatgtatcttcgttgtttaagaatgtcaaagatacgattttgaaagcaaatcacaactgttttgagcatccgaattgccaatcacagttgtttaagaatgtcaaagatacgattttgaaagcaaatcacaactaatccaagtttatgagttttttgccataggttgtttaagaatgtcaaagatacgattttgaaagcaaatcacaacggtttttgtatatttctttggctttggcttgttgtttaagaatgtcaaagatacgattttgaaagcaaatcacaactacaacggttaggaagataaataataagagttgtttaagaatgtcaaagatacgattttgaaagcaaatcacaactatctgctccgctctcattacaatatctgcgttgtttaagaatgtcaaagatacgattttgaaagcaaatcacaacaacagcattagactacaaaaaacgcatcaagttgtttaagaatgtcaaagatacgattttgaaagcaaatcacaactcatctcttcggttgtagccatagcgttgtgttgtttaagaatgtcaaagatacgattttgaaagcaaatcacaactaatacgtatagtttaatttttaatttcttgttgtttaagaatgtcaaagatacgattttgaaagcaaatcacaacatagcacctaagattacaccatgttcacatgttgtttaagaatgtcaaagatacgattttgaaagcaaatcacaaccccgaacccgttatatgcaagcggggatacgttgtttaagaatgtcaaagatacgattttgaaagcaaatcacaacgtcagttgcgatttggaaatttcacacaatgttgtttaagaatgtcaaagatacgattttgaaagcaaatcacaacgttttctgatattttaattaattgattcatgttgtttaagaatgtcaaagatacgattttgaaagcaaatcacaacattaacggttatcgaatgtccatgccctccgttgtttaagaatgtcaaagatacgattttgaaagcaaatcacaacagtagtaacagtccgcttcttcgccaatacgttgtttaagaatgtcaaagatacgattttgaaagcaaatcacaactgttagtaaataccgaaaaagatgcagcgggttgtttaagaatgtcaaagatacgattttgaaagcaaatcacaaccattagccattgtatcggttgttattaaagttgtttaagaatgtcaaagatacgattttgaaagcaaatcacaacaagataaacgatgttcatattatcctgattgttgtttaagaatgtcaaagatacgattttgaaagcaaatcacaacaatggagtaaaaaaggtgaacaaccagtgagttgtttaagaatgtcaaagatacgattttgaaagcaaatcacaacccttacacgaatttaatatttgtgaactttgttgtttaagaatgtcaaagatacgattttgaaagcaaatcacaacataggtgcatcaataagggcaatacctttagttgtttaagaatgtcaaagatacgattttgaaagcaaatcacaacgtcagttacgacttggaaatggtacacaatgttgtttaagaatgtcaaagatacgattttgaaagcaaatcacaacattcgaccaaaatacatttgacaataaaatgttgtttaagaatgtcaaagatacgattttgaaagcaaatcacaactgtgatctcttttcggttgtaaaaaatctgttgtttaagaatgtcaaagatacgattttgaaagcaaatcacaacttataatggtgcttagatatgttgaagtttgttgtttaagaatgtcaaagatacgattttgaaagcaaatcacaacaatcagcacttgataatgttaatcgatgttgttgtttaagaatgtcaaagatacgattttgaaagcaaatcacaacattagtccagtatcatatttgtatgtgtcgttgtttaagaatgtcaaagatacgattttgaaagcaaatcacaactaaaggtactggcaaacttactactgagagttgtttaagaatgtcaaagatacgattttgaaagcaaatcacaacctaagaccgtattgagccatgtttgagcggtgttgtttaagaatgtcaaagatacgattttgaaagcaaatcacaaccaagcaatagatttcactataaatgatatcgttgtttaagaatgtcaaagatacgattttgaaagcaaatcacaacaatgtaacatttccaagttttacggatttggttgtttaagaatgtcaaagatacgattttgaaagcaaatcacaacaacgatgaatttataagaccactttgtgatgttgtttaagaatgtcaaagatacgattttgaaagcaaatcacaactacactcaaagcattcataatttactttatgttgtttaagaatgtcaaagatacgattttgaaagcaaatcacaacggtggagtaaatggaataagtaatttacaggttgtttaagaatgtcaaagatacgattttgaaagcaaatcacaacttgtggtgttttgtccaagtgattttattcgttgtttaagaatgtcaaagatacgattttgaaagcaaatcacaacatgtaaagcgagatgaattacaatatattggttgtttaagaatgtcaaagatacgattttgaaagcaaatcacaaccgtgtatcatttttaactaatttaaaatttgttgtttaagaatgtcaaagatacgattttgaaagcaaatcacaacatcttttcggatgtcaaacttttgaaaaaggttgtttaagaatgtcaaagatacgattttgaaagcaaatcacaaccaaagtgggaggattgattttaatgtaccagttgtttaagaatgtcaaagatacgattttgaaagcaaatcacaacgtataatcgttttggcttaatcctttaccagttgtttaagaatgtcaaagatacgattttgaaagcaaatcacaacttagtatgggttcttcgttttcagtataaagttgtttaagaatgtcaaagatacgattttgaaagcaaatcacaacaacatttcaggttgttggatttacctttttgttgtttaagaatgtcaaagatacgattttgaaagcaaatcacaacctggtatctaaatcttcaaatacggtttttgttgtttaagaatgtcaaagatacgattttgaaagcaaatcacaacgtaattcttttgttggtcaaatcccaatatgttgtttaagaatgtcaaagatacgattttgaaagcaaatcacaactacaaataatactttcataaatgattactgagttgtttaagaatgtcaaagatacgattttgaaagcaaatcacaaccattacaaggtctcgttttcgtttttgaagttgtttaagaatgtcaaagatacgattttgaaagcaaatcacaacattttccatttgtctatttttataagtgatgttgtttaagaatgtcaaagatacgattttgaaagcaaatcacaactgtttggcagttactcctacaatagttaaagttgtttaagaatgtcaaagatacgattttgaaagcaaatcacaactatcaatcgttttttcaggcagagaaagtagttgtttaagaatgtcaaagatacgattttgaaagcaaatcacaacaaggcgaaacagacaagttattgagaaaacgttgtttaagaatgtcaaagatacgattttgaaagcaaatcacaacacttatggatttatctgaataagtttaacagttgtttaagaatgtcaaagatacgattttgaaagcaaatcacaacgtaattcttttgttagtcaaatcccaatatagttgtttaagaatgtcaaagatacgattttgaaagcaaatcacaaccgtttcaaagataacaaaacatccaaataagttgtttaagaatgtcaaagatacgattttgaaagcaaatcacaacgctacaccttgtgctattataactctgtttgttgtttaagaatgtcaaagatacgattttgaaagcaaatcacaacgctaattcaataccgttcccaatcacaaaagttgtttaagaatgtcaaagatacgattttgaaagcaaatcacaacactatctcttacggtatctatttttgctttgttgtttaagaatgtcaaagatacgattttgaaagcaaatcacaacttatctataaaatattgtgataaagaaatagttgtttaagaatgtcaaagatacgattttgaaagcaaatcacaacaacatttaatgggtttcaaataatatcatcgttgtttaagaatgtcaaagatacgattttgaaagcaaatcacaactgtcaggcaagtctacttcctctgccgaagttgtttaagaatgtcaaagatacgattttgaaagcaaatcacaacgcagaaacagcaccaccatttacagcaacgttgtttaagaatgtcaaagatacgattttgaaagcaaatcacaaccagaagtacatgctaaatctaaatcaacagttgtttaagaatgtcaaagatacgattttgaaagcaaatcacaacaacagtattacatttaaaaaaacaaggtgcaatgtcaaagatacgattttgaaagcaaatcacaactatcaggcaagtctacttcctctgccgaacgttgtttaagaatgtcaaagatacgattttgaaagcaaatcacaacatagaaatgttaacaacattgaatctattggttgtttaagaatgtcaaagatacgattttgaaagcaaatcacaaccagatttggtaattggagaaactcagtttggttgtttaagaatgtcaaagatacgattttgaaagcaaatcacaacgcttattactgcaatttcccaaattaacctgttgtttaagaatgtcaaagatacgattttgaaagcaaatcacaactatcaggcaagtctacttcctctgccgaagttgtttaagaatgtcaaagatacgattttgaaagcaaatcacaacaaagaacgtgaacaccaacaaatgcttactgttgtttaagaatgtcaaagatacgattttgaaagcaaatcacaaccatggttaattatgctttatattcttcgcgttgtttaagaatgtcaaagatacgattttgaaagcaaatcacaacttatgtcttctattttcattttaatttatggttgtttaagaatgtcaaagatacgattttgaaagcaaatcacaactattagtaaataccgaaaaagatgcagcgggttgtttaagaatgtcaaagatacgattttgaaagcaaatcacaactattcattctgtcataaggattttttcgagttgtt

SEQ ID NO: 3372 - DNA, 16044 bp, synthetic construct
  misc_feature 1..16044: note = Synthetic
  source 1..16044: mol_type = other DNA
atgtgttctttactctgattgctgagccttccttcggaaaccttactcaggtacgacccgatttcaacttccatccggtcgctaatgtcttcatatttttcgagccggttgtaaagtttaagaaacttcttgtcgttatgatccatattggtcatttttttgacaaatccaaacattttttgtgcacgcttggcatacatttccatttctttttcggcttgaaggatagaaagctccgctgtggaaagcaaccccgtagagataaattgaagtgcaaactcttcgtcttcttcttctccctttctgtgacgaattactttgaggcagattttttcgtataagttcacaaaccatatcattacgaatacgttggatacattgaacatggtgtgaaagagcgaaagtccgtaagaggtagctgcctgataagacatgaaagtttcatacttcggcactaagtgagccggaagttccgattttgagagtgtggctatttgattgtactcttcgggagacaaggaatttaagaatgttttcatcgctgtaggatctcccgggccaaagtttagaactatttgttcaaccatacccacaaaaaacttaaagacaagcaatacccaaatcactccaaatacattgaacaggaagtgcgaaaatgcagctctttttgctgatatgttcgcagggattgcagctaaatttgcggtaatggtagttccgatattttcgcctaaaatcattgccgctgccgatgggaaatctatccatcctttagttgccataataagcgtgagggcaaccgttgcactcgacgattgaacaataagtgtaagaaccgtaccgataagcaggtagaacaatgtcgaccaaatgcccatatcggaaaagttttggacaaacgacaaaacttcggggttgttttgcaagtcaggcatcgaagcctttaagtagtcaagccccaaaaaaaggaatgcgaacccgaaaataaactctccaaatgattttcgcttgtttttcgatgagaaaataagtggaatagcaatccccattagcggaatggagagcgcactgatagaaaacttaccaaatccgaacagagaaatcagccaggcggtggcggttgttccgatattggcacccataatcacaccaatggattgaaccaggctgagcaatccggcatttacaaaactaacaaccattaccgtggtggcggatgaagattgaatgattgccgtaattaaaagtccggtcatgacacccataacccggttttttgtcatcgctgacaagatagtgcgcagtctgtcaccggcaagtttctgcagcccttcgctcattattttcattccgtataggaatagtcccaatgaaccgacgagttttaaaaagtcgaagaatgtatattccatattcaataaaaacgtataaattagcgacaaatataaggcaaataaaagaagcggcaaagagttgttaaaataattttaaaaaagtataaatacctgatactgtgtaaattcattaaaaaataagataaaagttttgtttgttgcatttattatgtaagaaaatatgggctatttgtaaacaacccttatttttaaatttgttttgtttagttgcagagttagttcttttttaattttaccgattctactacgttgatgatatagtcgcccattcgctcacattcgcttacaatatccatatagaaaacactgttttgatacgaatattctagattgttgagactttccacgtttttacgtttcagcaagttgcgttgttcgtttatagcctcttccatgctttggctcacaataaactctttttgggttatatgaggtaaagtaagcacgtgctgcatattcgataaagcatcgtctaaaagctgatatatggagttgatattttcaatgatggtttcttcaaataccgtttcagcatccattttacgtttcaagtggcgaccaatgttgcaacaagcgtcagcaatgctttcaatttcagtaacggcacgcaaaatggtacgtatgtgctctttactttgatgactcagtcttccttcggcaactttgctcaaataagaaccgatttctatttccattttatcggaaatatcttcatacttttctatccgattatatagtttgaggaattttttgtcgttatggtctatatttgtcatcttttttacaaaaccaaacattttgcgaacgcgctgaacgaaaacctcagtctctttttcagcttgaaggatagagagttcggctgtggaaagtattcccgtagagataaattgaagtacaaattcttcgtcttcgtcttctcctgcttttggacgaattactttgaggcagattttttcgtacaacttcacaaaccatatcattatggatacgttacaaatattgaatagggtgtgaaagagcgaaagtccgtatgaggttgccgcctgataagcgaggtaagctttttgtttcggcactaaatgagtcggaagttccgactttgagagtgtggttatctgatgatactcatcggcagataaggagtttgcgaaatttgatatttctgccggatttgctggaccgtaatttgttaccagctgctcaacaatattcacaaaatatttgaatacgaagagcatccatataactcccatcacgttaaacaggaaatgagcgaatgcggctctttttgccgatatatttgccggaatggcagccagattggcggtaatggttgttccgatattttcacccataatcattgccgccgccgacgggaaatctatccatccctttgttgccataataagtgtgagagcaactgttgcacttgacgattgaacaatgacggtgagaacggtgccgataaaaagataaaacagtaccgataaaatgcccatgttggagaagttttgcacaaacgacaatacttcggggttgttttgcaggtcgggcatagatgatttcaacaaatcaagacccataaaaaggaaggcaaacccgaaaataaactctccggttgattttcgcttgcttttcgatgagaatataagtggaatagcacccattattacgccaatggactgaactaaactgagcagcccggcatttacaaaactaacaaccattactgtggtagcggatgaagactgaataagcgcagttatcaatactccggtcaagacacccataacccggttttttgtcatcgcggacaaaatgtcgcgcaatttatttccggcaagcttttgcagcccttcgctcattattttcattccgtacaggaatagtcctaatgaaccgatgagctttaaaaagtcgaagaatgtatattccatattcaataaaattgtgtaatttagcaacaaatataaagcaaaaaatagaagctataaaagatttgtaaaaataatttaaaaacgaaaagtgtaaatgcttgatactgtaaaagttcattgtttaaatacaaatgagcaaaaagaggtgcctgttggctcttcgttgaaacaattaattgaaatatttgaggtagaaacgccctatctaatcgcgaatgcgagagtaaacaacaaaacagagtcgctctcttatcgggtttacagaccaaaaagggttgaatttgtggatattagaaacaattccgccatgcgcacctatgtacggtcgctctgttttatattggcaaaagcggtgaatgatgtgttgcctaatgctaaaacttatattgaacacgcggtgtcgaaagggtatttttttgaaatagattgtgaagtggaggttggtgaaaccgaattgaatgccatcaaaaagcggatgcgtgaaattgtggatgctgatatcccttttgtgcaagtggaagaggagaccgaaaaagtagtaaatctattccgcgagcacggcatggaagataaagcgttgctattggaaacatctgattttctctattcacgatactctatgctggataactatatagattactactacggaagtttgatgccttcatcgggatatattaccatgttcgatatacaaccgttgaacggtggctttttgcttcgtgttcccaatcgggaaaatccggtggatttagagccttttgtgcgtcaggatatgttgttggaagtgtatcgtgaacatttgaatttcttgaaaataagcaaattggataatgttggcgatttaaacaaagccaaacgcgaagaccgcattcacgaagtaattcaggtagctgaggcttttcagtcgaaacaaatcggaaatattgccgaagagattacacgaaagtttgatgatggagtaaggattgtacttatttcgggaccttcttcatcggggaaaaccacattccgtaaacgtctcgaaattcaattaatggtaaactcgttaaaacctgtgggtatttcgctcgacgactactttgtaaatagagatcaaactccgttggatgagcagggaaataaagattatgagtcgctctacgcgttggatttagagttgttagagcaacatttaatcgctctcttgcaaggggatgaagtggagttgccgtcttataactttgtgaagggaaaacgcgaatataaaaacaattttctcaaaatggagaaaaagagtgttctaattgtggaaggtattcatgcgttgaatcccgaactgacacgacatattccccgtgataagaaatttatggtctatgtttcggcgctcacatccatatcattagataatcacaactggattcccgctttcgataatcgattattgcgcagaataatccgcgactatcgttatcgcggttattcggctcaggaaaccatttctcgatgggagagcgtgcgtcgtggagaagacaaatggatattcccgtatcaggaaaatgccgatgtgatgttcaattcagcaatgatttacgagttggctgctattcgacgtcatgccgaaccgattctcatgcgggttccacgcaccgttcccgaatattccgaagcctatcgcttgctcaaattcttaaactatttcaataacattaccgaccgtgaacttccgccaacatcgttgttgagagagtttctgggaggaagcagttttaggtattaaacaccccttagtcccctgaaggggagattggggcatacaataatatgggatgagtgatgattataaaaatatgttttacggggctgggccgattttatttgagttcgcgaaaaatttaagaaataatcaaacagaagcggagcagtatttgtggaattatttgaaagggaatcaaatactgaatgttcgttttaagcgacaacatcctgtactgtattttatggcagatttttattgtcataaagcaaaacttgttatagaaatagatggtggttatcacagattgccaaaacaatatgagtacgatatgtgtagagattcagaactaaatcgattgggattagaggttcttagatttacaaacaaagaggtgtttcaagagacagacaaagtgataaagataattatcaacgcggttaaacaaagacttgaagatgaatagacaagatatattatactccccttcaggggatttaggggtcattaccgctatttccactccttcgggtatgggtgctattgctgttatccgattatcgggtgaagggagtattgctttgacagataaggtttttcaatcactttcggggaggaaattggcagagttgaaaccgaacagcgcgcttttcggcaaaattattcgggataatgaggtgctggacgaagtggttgtaacagtttttcatgcaccacactcttttacgggtgaagaaacggtggaaatttcgtgccacggctcggtttatattcagcagaaaattgttgaactgctacttgccgaaggtgcacgattggcgcaagcaggcgagttcacacgtcgtgcttttcaaaacgggaagttcgatttaagccaagccgaagcagttgccgatttaattgcttcttcgtcgcgtgcgtcgcatcgggtagcgatgaatcagatgcgtggcggttttgctcacaaattgacgcaattgcgtgatagattgttgcaatttgtatcgttgattgaattggaactcgatttttcggaggaggatgtggagtttgccaatcgtgagcagttgtatgagctgaccgaaaatatcgaattggaaataagtaagttagcaaattcgtttcaattgggaaatgccattaaacacggaattcctgttgctattatcggggagaccaacgtgggaaaatcaactttgctgaatctgcttctgaacgaagagaaagccatagtatctgacattcacggaacaacgcgcgatgtaattgaagacaccgtaaatataggaggtgttaccttccggtttatcgatacagccggaatcaggaacacaaccgacacaatagagtcgttaggaattgagcgcacgtttcaaaaaatagagcaggcgagtatcgttttgtggatgattgatttaaccacttccgacagagagattgaaacattggctcaatccattgttcccaaactcgatgaaaaacaggtaattctgctatttaataaagctgatttgttttctgacgaacagttagccgaaaaatcaaaactcttatctcaactacaagccgaacggctatttatttcggcaaaaaaacaccggaatacaaacaaacttgttgaggtgttgttgaaagttgccgaaattccaagcattggcgagaatgatgttattgttacaaacttgcgtcattacgaggcattagtgaaagcgcttgaagcgattcatcgggtaaaagatggtttgaatatgggaatcacaagcgatttcgtttcgcaagatattcgcgaatgtatgttctatttaggcgaaatcaccggacaaatctctaccgatgaggtgcttggcaatatctttagtaagttttgtatagggaaataacaacccaggaactggcttagagccagctcctgggtaggcagttcctgggtaggtttgtatatctttttacatataaaatcatctgtttccctgtttttatatgcttttgaatataattttatatctttgttccaaaataactgcaaaagcatataattatgacattaagtttagctgcgtttgttaagacaaaacgaaaagaagccaatcttacacagcaggagtttgccgatagggcaggggtggcgcttaccgttgttcggaaaatagagcaaggtaaggagaatcttagtttggcaaaagtcaatcaggttttaatgatgtttgggcataaattagctcccgtaaattataaagaaattgatccatgagagaaggaaaagtgttttataaagacgattttgccggaataataacggaaaccgatgacggagaatatctattcgagtacgataaagaatatatcaatcgatttccaaatcagccgataacattctcaatgcccgtttctaataaaatttataaagataatcggctattcccattttttgaaggactgattccggaaggttggttgctggatatcgcttctaaaagctggaaacttaataagaacgaccgcatgggtttgcttttggcatgttgtaataattgtatcggcgctgtatcggtaataaaccaggaactggcttcaagccagctcctggatggattaaataaagaccatgagtaagaaatgtttatattgctataaagaattggatatggaaggagattttcatccttcctgtagccttcaaatttttggcagtacggaaccgccgactttgaattacaccctgtcagaaatggcaaacttagccaaagaagtggtagaaagttcggtaactgttcccggtgtgcaaccaaaactttctttgggttatatcaaagatgttttgaaagatggctacaaaggacgattaaccgtaatgggagcattgggtggaagttacattctcaaaccacaaaatgaaacttaccctcaaatgcccgaaaacgaacatcttactatgcgaatggctgagctttgtggtatttccgtagttccatctacgctgattcgattgaagtcgggcgaactctcttatcttacaaaaaggatagaccgtacggaaacaggagaaaaaatccacatgttggatatgtttcagatattagaagcatttgataagtataaaagttcagtagagaaggtgggaaaagttgttgcagaacattcatccaacacgttgcttgatttacttcgactttttgaagtggttattttcagctatatcacgggaaataacgatatgcacttgaaaaatttctcgctaattctactcaatgaaaattggactttggctccggcttatgatttgttgaacgtaaacctgcatattccgcaagatacggaagagacggcactcactattgacggcaagaaaagaaaacttacaaaatctgattttataaacttgggattaagttttcaattgacagaaaaacaaatttcaaatacatttaatcgatttgtaaaagcagagaaaaaaatgaaaaaagagattgcatcatcttttctatcatctgataatcagataaaatatattgagttattggaaacgaggttgagtttgttttaatccaatccaggaactggctaagagccagctcctggatataaaaataatttttaatcaaaaacaatggcatccatcaattacaaagaaatagagcaaaagctgcaaaagcttaaagataataccaataccgatgaaataggttatttaattatttctacttttggcatatctgatacttatatacgtagatacaaaacgggtaaaggtaataaggcgtgtgatggcggtattcttttcaagaaaagtttagcatatcaagttgcaccgacattgcaaatgaccgaaacgcttgaaagtatgaagttcgacgagtatattgctcgccaaaaaaccgcatactcgcgttagtgatagtaaagcattgtagtgtatgacccgctcataggaaaaatagtttgctgatattcagtatcgcaaaaaaattagcactaattgtatcccgctaaatattagtgggtttcttgttttaaaatattgttattgcttttctatttattggagaataataacgaaacttatggacaaaaaaatgccccgcagataggcgaggcgctaaatgttttcacaacggaataatccttattgtgaattgcttcaaaaattgtatgacaaaaatacaacttaattgtataaaaaacaaggtttttgaaaaaaatagttaactttaccgataaaatattctaatacgtttccaattagctaattagaaactcctatcacattatggacagagcaacatttataaaaattatgggtgcggaagccggaagttttttgttttcgggcttggaaatgaaagctgagagtttaagatacgaccttagaaaaataaaaatttacgacaactatgtacgcggagtgaatttcaggaaaaacgactttctctctcatactcccaaaataaacgatgtacttcaattagaacgagaagctgacaataaatatgaccgttttgcaataaaagtgatgaaagatggacgatttttgggatatattgctgcttatgaaaatattacattggccatgttgatggatcaaggcgtacacttggaagcctctgtcagtaaagtggcagatgaaattgacgataaaaagtatttagacaaagtgttttccgttcaggttttcgccaaacttcttgtaccgttcgaccacttaaaagtaaacgatttaggaaaggagcgagcagatgacgcggaagacatgtatagaaaaggaaaagtgataaaataagaaaccctacggagtacgcagggttttagagacaaatatcctacggcttatagccttgttgtgaattgtctttcaaaggcaaaagtaattattttagttgaattaaccaaataaaaatacaaaaagtacaaatatgagaaaaataggaatagatttaggaagctcgtcacttggctttgtagtgatggaagatggaagaatcataaaaaaaggggttatcaggtttgacaccggaatgatgaaaggacagtccggtggatatgtatccccaactagagagcgaagaattgctcgttcaaagcgaaatttaattcgagcccgaaaatacagaaaatgggaattgttagaaattcttgtaaaagagaattatgtcccattgaacaaacaagaattagaaatttggagcaaatataaaaaaggacaaatacgaaaatttcctgaaaatgaattattccaaaaatggcttgcttgtgattttacgtatgagaatggcaagaaatacaaaaatccttataagttaagagtaaatgctttgaataaaaataaaaaagtgagtaaacacgagtttggaagagcattataccatattttacaaaggagaggctacaaagatattggagaaacggatagtgaaacagaaaaacagaaagaacggagaggagaaagtggttttcaaaaagcattaaatgacaacgagaacatcatatcaaaagcattattaaatgaatttttaaataaaaataaaagagcaagaaatcaatacccatacagagaggagtatgaatatgaacttgaacaaatctgtaaagcccaaggctttgatatttcaaaaaaagaaaacggaaaatatacaagtgaatttgtcgagaaactttggaaagcaataatctggcaaagagatttaagaactcaaaaagggaaaattgggaaatgtactttagaaccaaagaaattacgatgtccaatatcacatcctgttttcgagatatttagagtgtggcaatttattaacaccataaagactatcaatgaagatggcgagaaggaagagttaccacttttattaaaaaacaaactatttgagttctttttgaaaaaagatgacaacttcaagtttgagcaaattagagtgtttttagataagcagtttcattcaaaaaagaaatataattatccaataaacagcaatgagaaaaacaaaaatgagaattatacggatggaacttatgaaacttctgtggcaggaatgcctatttgcaaaggcttaatagatgtttttggagaagacgcgaaaaatgcacttgcaacaattgaacaccaaaatatttcacaaagagataaaaatggtggatttggaagtgcgccaaaggttattgctaattattccatcaatgacctatggcacattttgttttcctttgataaaaaatctacaaaagaaaagaactttttggaaatttttgccaaagaaaaactcatcctaacagatgaaaaacagattgcaaaatttgtcaaactaaataataaaatatcacaaggatacgcagatttaagcgtaaaagcgatgtgtaaaattattccttttctaaaagaaggatatttatataatgaagctgttgttttagcaaaggcacctgaaatattaggtaaggattgggaagaaaataaaaaagggattctctcggcaattaatgaggcaaataaagaatacaattggaataaagttattgttggaacaactaataatttaatcgacaaatacaaaggagacccatattttgcttgcaaagactactcatatcaattaagtgaacacgattacaatgaggttgagaaagcttgccaaggttattttggagaaaaaacatgggaaaaacgtgatgacaagtctgagattattgaagatgtaaagcagaaatatcaagagtttttccatgatgaaaaaagagtatatagagaagttccaacttttactgatatttttaacgaaaagttaaaatcaaagaaaatcaatcttgatgcttatcaactatatcatcattcaaatatagaaaatatctatcttaaaaaatgtaaaataaataaaaagacaggagagcgaaaattaccacaagcgacaaacatccatggaattaaggttgatattttaccgggagttcaaattgatagcataaaaaatccaatgtttaacaaatcaatgagcattcttcgtaaattaatcaatgagcttattaaagaaggaacggttgacgaaaatacagaagtggttttagaggttgctcgcgatttaaatgacaacaataaacgaattgctattgaacgttatcaaaatgaacgtagaagtaatagagaaaaatatcgagagtttttgacagaatataagaaatctaaaaaacctgacttaaatattgaggagaacatccctaaatttgagatgtggacagaacaaatatttgaacaaacaatagacgatgaaggtgttgaacattcaaacaagaatagaattgaaattctgaaagaaaaagatgcgataactcgttatgagctttggatggaacaaaaaggacaatgtctatatacgggaaaaatgataccaattgggaagttgttttctaatgaaattgatatcgagcatactattccacgaagcaaattaccagacaacaccatggcaaatcaaactatctgctacgcatggtacaatagagacaagaaaaaaaatcaaatacctactcaatgtgataattattacaaagatgaggaaggctggggaactagaattgagccgagattaaataaatggaaaacaataagggataattggaaagcacgatatgataaaagtgctaaaccaagaggaaatgaagatgaagcagctaaaaacacgcgtatccaagaaaagcattattgtaaaatgcatttcgactattggaatgataaaatagagagatttgaagctacggaaataaaagatagttgggcacgtcgtcaattagtcgatacgcaaatggtaagtaagtatgcaagagagtttttaaaaacgtacttccttaaagttgctgtgcaaaaaggaacagtaacagctgcatttagaaaactatttggctttcaggatgaagatgagataaaaagtcgcaacaagcatactcaccatgcaatagatgcattggtacttacacttattccaacaaacagcagtcacagagaacgaatattgaaagactatttcaaatatattgaggagaataagaaagataaaataaaagaactaaaagaaaaagaaattccagaaaacttcaacgttcagaagtttatttcagatattgaaagttcaactctaatatacaattttgagaaaaaatcaatcacaaaacaaacattcaagattgttcgaaaaagaggtaaatgccaatacttaaaagataaaagtggaaactttattttagataatgaaggaaaaaagattttactcatctcacgtggtagcacagtaaggagtgatttgtttgctcaaacatatttgggaaaaataaaaaatgtagaaagggacgagaaaggaaaaccaattagagaaggagatgattggaaatataaatcaggaaaagacgaatttagtttcgtaaaacgggaagatattaataaagtaaaatcttctgaaaagctgattaactcaatagttgatccaattattcgagaattagtaagaaaacaaaaacgaaattcagaaataaaagattatcaaggaaatgttattcgtcatgtcagaatacaggttaaagcgggaagagaagtaaaagaacgtgtgaactatcgttcaaaacacgactataaaaataaattttactcagaagcaggctcagttccttatgcgattttattgcagaaatcagaggaaacaggcgttaaacgtgagttgctatcaatagcatctttcgaaattgcgaaaatgcgtagggacacaggaggatttgatgttgaaaagtatgttgaagattacaatcccgaatacaaagattgggaaaagcaattattgaaagtcggtcaaaaggtatttgttcttaatgaagacagcgattatgaaaaacgttttgataaatcttttcaaacaaatagattgtatgtaattactcaattttcagaaagtatatggttgaagcaccacctttgtgctttatctcttaacaatataaaggatgctgttagtttagcaaaagatgaaataatgactaaatatgaaaaggagttaaacattcctcctgttgttgaagatcatagcattatagataacaacgaaagaagaaatgattatctaagtcgaaaatacagatttgatacaatcaataatagttttagacttacacgacttcaagcaattgtcggcaccaaaaagacaaaggaaattaagaaagaattagataaatataaagctattccgtcaaaaattgaggttgaaggacatacgtatttactcaaaatgtcaaaagaaaactggaattacttaattgaaggaaaagactttgagatgcgattagacggcagtatagaattttttgattagaaaattatgataaaaaaaactctctacttcggcaatcctgcatatcttagtttgcgaaataagcagttagttatccaattacccgaagttgtaaaaaatgagacattgcctgaaagttttaaaacagatgccgtaaaaactattcctgtggaggatattggcgtggttattttagacaataagcagataactattacccacggactgatggaggctttgcttgaaaataattgtgctttaatcacttgcaatagttctcgaatgcctgtcggcttaatgctaccgcttgctggaaataccacgcaaaccgaaaggtttagagaccaaatagctgcatccgttccgcttaaaaagcaactttggcaacaaacggttcaagcaaaaatccaaaatcaggcttatgttttggaaaacaaatcgaaagcggtggtgaaaaatatgcttgtttgggcaaacgatgtaaaaagtggcgaccccgataattacgaagcacgtgcagcagtctattattggaataatatttttccctacattccgggatttgtacgtggaagagaaggcgacccacctaataatctgctgaattatggatacgccatccttcgggcagtcgttgcacgctcattagttgccagcggacttttgcctacgttgggtatttaccatcgcaacaaatacaatgcttactgccttgctgatgatattatggagccttatcgtccatttgtggataagttagtttttgaaattatggaaagcggaatagatatttccgaattaacgcaagagataaaagcgaaactgcttactattcctattcttgatgtggtgattaacaatcaacgaagtccgttaatgattgccgttggacaaaccacagcatctctctacaaatgtttttcgggcgaaatccgaaaaattaaatatccatcttttgaataaccgacttcactttatgtaagttgtaagtaataattatggaaaggtttagcgaatatagaattatgtgggtacttgtatttttcgatttgccgaccgaaaccaagaaagaccgaaagatatatgcggactttcgtaaaaaattgattgaaaacggattcactatgtttcagttttccatctatttacgacattgtgccagtagagaaaatgcagaagtgcatatcaaacgagtaaaaagctttcttccacccgccggacaaatcggtatcctttgtattaccgacaagcaatttgggaatatggaattgtttgtcgggaaaaaggaaaaagaagtcaaaactccctatcaacaattagagttgttttagcataaataaatcccgccttttgagcgggatttatcgcatccgaacaacgattttttaattctaatattctttacaacttactgtgtttgagtaaaatattgatatcctgttgttcagaatatcaaagatacaattttttgaaagcaattcacaacttggttgaaagaggttaattcgctttcactgttgttcagaatatcaaagatacaattttttgaaagcaattcacaacgggtcaattgcgattaacttttgcggtttcgttgttcagaatatcaaagatacaattttttgaaagcaattcacaac

SEQ ID NO: 3373 - DNA, 14705 bp, synthetic construct
  misc_feature 1..14705: note = Synthetic
  source 1..14705: mol_type = other DNA
acaggccttggattgattctttgcaaagagtttgtagaaaaacaccgagggaaaatctgggcagagtccgaaaaagatcaaggatccactttttatgtttcactgcctaggtgagtagaatttcaaatattctattccaggcatttcgatactttgcctatagatcaatccgaggatttatcttatttgaataagagagaaaatgcacttgataaatcccgggttttaataggataaaggtatttttgagtatgaagaattctaaaaaactcatttttctgatcgcctttctttttcctgttttgggtttttcccagcaggatttcaagcttcattcccacaatgattaccttcgaaaactccctttttgggaagcatttggtgctggtgccgcatccatcgaagtggatgtgattttgcaaaacgaccaattgatggtcgcacatgaggctgccagcatcaaatccgaactgacacttcgctcgctttacttcgagccaatccagaaatcggtagaacaagggatgatccaaaagtttgatttccacctcctcgtagattgcaaaacggaaggatacagtacgctggatcaggtagtgaaagatgcgcgagcttttgaagaaatcctttactccaatcaaaatcccggaggtttaaaactgattatctcaggaaacaggccgaagccggaggattacaccaagtatcctgaatgggtattttttgattaccagagcaaaaccttaacatctgacctcccttgggaaaggatcgggatggtcagtttgagttttagacaattttcgaattggaatggggaaggtagtatgggcgaagcggatagggagaaactattggagttcatccatttggtccattcgttcaataaaccggttcggctttgggcttcaccggacaataattccgcctggaaggaattctacgaaatgggtgtcgactacatcaacactgatcagcctatccacgcccaaagctacctgaatgtgctccttggaaaagatgcctccccaaatccgggaatcaaaaaaatccaaattaactagatcagttagttgaagacaagaatacttgcctttccaagtcaaatgtatttatacctctaccgtaagaatgtttggggatatctcttattttcactaaatacagatgtaaaatcgaaattatattttttgccttaacctactaaaatggagaataacacaatttcccctcatttgtttgatcttttagctgaagcgcccgagaaagaatttgatgaggtcacggcactggcttccacgatctgccaagttcctgcatcgctgatcactattctgaattcagaaaaacagcttttcaaatctcaacatggcttagatctcaaagaaattgcacttgaggattctttttgtagccatgcgctattaaatccaaatcaggtgatgattatcagggatgctcgagaagacccccggtttaaggaaaatactttagtcactcagataggagtggtcttttatgccggaatcccgctgacttccacttcgggaattccttttggggtactctgtgtactggattatgagccgagagaactctctggtgaaaatctgaagtcgcttcaaattctggccaatcaagtcgtgagaatttgtgaactcaagaaaaacaaacttgatctcatccaaacagaaaaccggcttaaagaagagcgtaaacgactttggaatatcattgacgccacccaagtaggaacctgggaatggcatattacttcagacctgttgatctacagcagaggttgggcagaaatgatcggatatacactggaggaattgggtacaatcaaccgggataccagaaatcaatttgttcatcctgaagatttaacatcttccaatgacattctcaaccaatacctcaattcccaaaagggactctatgaatgtgaggtgagaatgaggcacaaaaaagggcattgggtgtggattctagatcgggggcagatcatgagttgggaccaggaaggtaagccgcttacgatgtttgggactcacaccgatatcaccgcccaagtcaccgcaagtgaacaattgtaccttcgggaaaaacggttcaaaaagctcatcgaaaacagcgatgatgcgatagcaatacttggcctggacggaaagccaagttatgtgtcaggctccattcaacgggtattgggatataccgaggctgagggactggaactgagtctgagcaccttggttcacccggatgatcttgaagaattggtaaatcgaaagcaaatggctttgggaaatccgggaattccgatgagtggcaccaatacgcgggttcgccacaaggatggaagttggcggtatctcgcaacaacggtcaccaacatgctgcatgatcctgtgattaatggattcattaataatttaaaagatgtaacagaggaggttttggccaataataggctgattcagcgtgaaaaggtttttaggatcttggcgcaagaaggtgcggatctggtttgtattttggatttggaggggaattatcactacctaagccccaactatccttcctatcttggactgtctgtcgaagagctattgggcaaaaattcttttgaatttattcaccccgatgatcaatcccgagttttggctgaattctccaatatcctgaatcaaaagcaagttaaatcccttccatttagatttaagcataagaacgacggttggcgctggattcaaagtgtaggcaccaatctccttgctgatccggatattcagggaattgtaatcaattcggtcgatgtaaccgaagtgcttaccgtccaacatcaattgaaggcaagcaatgaacgctttgaactggttttaagagcaggttctgaaagtatttgggattttgatcctcaaaccaaaaatctctttttgtcaggcgggtttcgggaaaattttggaattgaaatacgttctgaagagcacaacaatgatttaattaattcattgattcaccccgaagatcgagatcaggtaattcatgatttccgggtgattcttggtcaaaagggaaaggaagtgtggacgcgtgaatttaggcttcgccaaggcgatggacggtatgcccaagtcaaagacaaggcgatcctgttgagagatgagtcggggaatccggtgagagtagttggagtactgaaagatgtgacacgggagcattttgacaataagttggatcaaatcgaaagagaggtaatgcaggcaagtatttccgaaaatgccttggaaagagatttattttttaaatacctcagtgatctggaagtgctgctgccggggatgaaggcttcaataatgagaattgaaaattcaaaactggccaactttgtatctccttcccttgacaagaaattgttgaaaatactggaagggctcccgattggtgaaaatcaaggatcttgtggtactgcagcttttttaaaacaaaaagtgatcgtagagaatgtatttctggataaacgatgggagaagtatagtgacttagctaaggaattctcaattggagcctgctggtctttcccaatagttaattcagaaggaaatgtggtagccacattggccaattattttccacatgccaaaccaatagaggagaaagagctgcaagtattggagcgaacatccaccctggtgacgatcctcatggctaagtttggctacttggagaaaatcaggcttaacaatgagcgctacgaattgatcaacaaatctaccaatgaggctattttcgactgggatgtcgctcaaaatcgctttgcttggggggaaagctttttcagagtttttggtcatgatttttctcataaaacattcaccttggacgattgggttgcgatgatgcaccctgatgatgtggggttaaaagaggagcaatggcaagggtttttgaaagattcaagccagaataaatggaccaatgagtttaggatcaagaaatcggacggttcctatgcctacataggagaaatcggatacatgatccgggacgaaaatggtactccaattcgaatgattggagccctgcgggaccaaagtgttcttaaaaccgaacaaatcagcaaggagcttcaacgggaagtcacggagattttcaagggtcaggctagccttggggagttactgaccgaaataattcgcctgctatccgataagggagcctatgtcgcagcagaattttggctttcaggacttgagaattctcggttgattctggcagccaatcacttgaaaattccaagccatcaaggtttctatggagatcctttgattctcgagcgactttcccttggagaaggacttccaggcaaggtgtggaaatcttcagaaaatcaattatgggaagaactggaggaccatagcgagtttattagaaaaaaaggggcaaaaaagtatggatatagatcagcaattggacttcccgtaatcttcggagatcaggtattgggtgtattgattttgttttcggataaaaatcttggtcatgatcaaaacagcatcctgattttgaatgcgctcaaggactttctgggtaaagaaatcaaacgaaaacaacaggaagaggagcttcggcttttctttgagagtgcaccggaaatattggctatcgcttcacctaacgggtatttcaccaaagtcaatccggcattttgtaagttgttggggtatacgatggacgagttgacacatgttccctttgaatactttttgcatcccgatgacatcaaatctacggttcatgagttttcggaaaccattactgccgatctaaaggcgaataatttcacgaatagataccgggccaagtcaggcgattaccgctatatctcctggaattcttctgatgtttatggacaagacggctatgtctttgcctatgggagggatgtgacggagtttagaaaacttgagaatctattggacacggctactaaattggcaaaagtgggaggatgggaagtggatcttaccaaggatttacacagttggtcaaaaatcacaaaggatatttttgaaacttcggatgattttttactgaattttgagaaagcatttgacttttacagggaagattataggcagtttgtacaggagaaagtacaaaatgcaatcacattgggcgaaaatttcgattttgaagttcccatcatcacagccaaaggaaatgaacgctgggtaaggtcaatcggtgaagcagaatttgtggagggcacttgcacccggatttttggatctatccaggacattcacgaccgcaagcaagtcgaggaccgactcaaaagtgtctcggataatattcccggggtaatcttccaatatgttttaagaacggacggtagcgatgaactgcggtttgtaagccaaggatcaaaactgatttggagtttggatccgagagattgtgttgaggatatcagtaaagtctggtcgcaggttatacctgcgggtgatttggaactcctgcaaaagtcgatgatggattcggctacctctttggataactggagttgtgagtggagaaatctgtctcctgatggcaaaatcagatggcatcagggaatagggactccaagacgccaatctgatggaagtatcgtgtgggattccttgattatggatatcaccgaacgaaaagcgtatgagcaatcccttcaggaactcaatcaaagcctcgaatttcaaacaaaagaactcgcaatttccaattctgaattggagcagtttgcctatgtagcatcccatgaccttcaggaaccacttcgaatggtgtccagcttcctttcgctgttggaaagaaaatacaaaaatcaactggatgaaaaggccttgcaatacattgattttgccgtaaacggggcagtacgcatgcgacagatcattttggacttgttggagtattcacgtgtgggaaaacagaacgcacagttggaatgggtgcaattgcctcatgtaatagaggaaatcaagcaacttcaacaaaagctgattcaagagaagaaggccgaaattacgttccggggaattgaaaccttgtggacatttaggcctcgcattgcacagatcattcagaatctgatcgggaatgcgctcaagtattctaaaccaaatgtggctccaaaaataagtatccttgccatcgacttgccccgatgctggcaaatatccgtaagtgacaatggcttaggtataaaagaagaatattttgataaaatatttatcctgttccagcggcttcatcgaaaagaagaatatgaaggaacaggaattgggctggccatcgtgaaaaagatcgtggagggacttggaggggaaatctgggttgaatcagaataccaaaaaggaagtatatttcattttactatagctaaatcaattacctgatgggacatattcatattctgttagtcgaagacaatgagggtgatattttgttgatgaatgaagccttactcaagcgtccgtctgttaaaaaagtgtcaattgctaaaaatggacaggatggaattgattttgttaataaagaaaaaagctttcaggcggctgaaacgcctgatctgatcattttggatatcaaccttccattgaaaaatggatacgaagtgttaaaagccctgaagggaagcgagaaaacgagaatgatccccattatcgtatttaccacatcctcaactataaaggatgtcgacaaaagctatgaggcacttgcaaatctgtttgtctccaagccgagtaatatcgaggaaattgagcaggcagttgatagtctggaacgcttctggacagggctgattaagctacactccaacccggattaaatttaatcgggtacagccccaacctccaggcagttttttgattttatatttccgttcttcgttttagctacttagaataaggatataagttcgagaaaacaaacttttttcagtcgacgattttccgcagacattttctttgatttgcttttctcccaagtttaaggattgtcatttgtttttttatatcctaattgtagcgagcagctcgcgaattccgtcttcctgaaaagcgtgtttatggtatcctttttcaggttggctttcgttttatttctttgcagttgcactttggatgatgggcaatcagattcccttgtaccgttcttttatcaagtagaaggtccagggtataagtttactgtcgatgcacgcgcctaccgagaaatagacttcaacagaggaagagcagcgttttgcgggattgatacagaaatcaaagcgattagcaggcgcagcaatatgcttacattggaaattctgaaaccgaaaaactgcaatgggacataccaattgctatgggatggtaaatggcaggaatcaaatccaagaagtatccagatttatctaatcagcgtatttccttcctgttcagctacaggagagatggtgtcggagacgatagcggttgatttggcaaaagtactctcaccaagtgggcagtatggtcaaacacccttttcgatttacattcgtgaacaatgtaatgccagagattatcactgcgaaggcgactgcgatatggtaaatcgaagttgacaaggaaataattaaaagaaaatataaagtctattgaattggtctgaccaggaattgattgacggttgcaaacgtcggtcaaagaagcatgaggaatttttgttcaaaaagtactatggctttgtcatggggatcagtttgtcctattccaaaagcagggatttggcacaggaaatcaccaatgactcttttatgaaatgcttcgattcattcggcaagatgaatcaagtaccatcactcaagccttggctcaggagaatcacagtcaacactgcgatagattattaccggaaggacaagcgtctgcaaaatcacctcgaagcagacggtgaaaccccggtttatgatgaagtatatgccccggatcagctggcatttgaagatattctcaagcttctccaccagcttcccgaggatcagcaattgatattcaacctctatgaggtggaaggttatagtcatagggaagtggcggagcgtctcgagatcagcgaaagctcttcccgagtttacctgacgcgggcaaaatccaaattgcgtcagttgatacaaaaacacatgaaagaatatgcaggaagataaatcatttaaatggttggctgccaagctgcgcaagcagcaggaagaaaacccgcttccttatgaattgggggcctgggaggactttgagaaaaggcgggctgccctcagtccaaaaagaaccagatactgggtatccggtgttgtcgcttcgcttatcctcttgctggtggccggagggctttggcttgggcagttttcagattccgatgatgctcagctttctgatcagcttgtgcttcaggagaaattgcagtccgcagatgctattggacttgaaaggcttccaaacccggatgcaattcttgtcgaacccaatgaggtgacagtttcaggagcaaaagaaaaaattctggcagaaaatcagttttctatatccagcactaaaaataatactccgaaaggatcaaattcagcaaacaccaaatctcccgtttttgggaccgaatcgactgttacctcaagttccggttcaaaatcgaatcctccggcacagcagccaaatcaaatccaagccctgattgatcagtctaaaacagctgaaaaggaagctttgatcgctgtaaatgaaaaagcagaaatggaaacgctgaagaatgcactgacttcccctgtgacagaattgccgaaagaaccacttatggcaaaagaagaaatagccgagatattggagacgaaaagcacaaggagattagcattgggcctttttccggggtatggggcttcgcaaagtaaaacgcaggccaccagtggctcaagtttaggcttgggtgtaatggtcgatatggatatcgccgggaaactgatgatgggctcgggactggcggtcaactacctgaatcaggcaagtgaaagtcaaagctatgcgcaggtggcaggattctcctcaccggtcaccgagcgaaatgagatagcccaagtgcaggtggatattccgctttatttcaaatatccggtcacttccaatcaatccatttctgtgcaggcaggattttccaacttgatcaccttcagtcaaggtgcagagcagcagtcctccttcacccggcaggtggcagtgtttgatgccagttcggccagcgcgaattccttcaccttgagatccgaatcggtaaatcagtcctccgtgttggatgttccgcaaaaccgcttctatccgctagctacggccaatttgggagtgaatatccgcttgtttgaatccaaaaagacgagctatgcagtcatgccgttttacaattaccccctgcaggagatttccggatatggcgaaaaactcgggattttcggagcctcattcaaggtgacctttacgagcaccgataagaaataaaatatgagtatccgcaaagatgcaccttgggtaaaaatcggcccagtaagttgcggatcctcgtccacggtatatggtctatggtccatagcttagcaaatctgtcctccaatccaaatttcaaaggctatgtacaggttcgcggagacaaataaaataaaataaggaactaagccagcgatatgccacccgagagcgatcttgggtggttttttttgaggcggacagacctgtcaggttttaaaaacctgacaggtcttgattgaatattgcgacaatatatgtccgagaaagttctatttatcgcataaaatacccagtactgggtatagtaatcttagtttgaagtgctatcttgtaaatgaaaggggggggtaaaaaaagcgactacaagatgcagtcgcttaggaaagattcctacggcttatagccttgttgtgaattgtctttcaatgtcgaatttactaaaatttaataatatgcaaagactcggtttggatttaggtagttcatctatcggatgggcgataagagatgagaacaaaatagaaaaaagaggagtcattacttttcaatctggcatgaagaagggccaaactggtggctattcttcacctacaagagatagaagagaggcacgttctaaaagaaaattaattcaggcaaggaaatacaggaagtgggaattgttaaaaatccttttatgtgagtttgtaccattggataaaatcgaactagaattctggagcaaatacaaaaggggacaaattcagaaattccctagcaatgaaaattttctaaaatggcttgcctgtaattttacatatgaggacggtataaagtataataatccgtatgaactacgtgtaaaagctcttgataacaaattgagcaatcatgagtttggaagggtattatatcatttggttcaacgaagaggatataaagacataggcgaaactgataaagaaactgaaaagcaaattgaacggagaggagaaagtggttttcaagccgcgttagaagcaaataggactatagcggaagcattaacaaaagaatttctggataaaggccaacgggcaagaaatcaatatccatacagagatgaatatagacatgaactggatcaaatatgcaaaagtcaaggttatgacatatccaaaagtggtaatggggaatatataaatgaatttgttcagcagctatggaaagcaattatatggcagcgacctttaagaagtcaaaaaggaaatattggtaagtgtacgttagaacctgcgaagccacgatgccctgtttctcatcctatttttgaaattttcagagcatggagtttcatcaacactatcaagcattatgatgacaatggagaaaaacaatctttaccccctgattcaagaaaccaactttttgaattctttctcagaaaggataagaatttcaaattcgaggaaataagaatctttttggataagcaattcataagcaagaagaaatacaattacccgattgacaaaaaaactggcaaatatgacacctctgtttcggggatgcccgtttgcaaaggattgattgatgttttcggagatgaaataaaagaagctataccaagcattcacacttttaatataggcaacgatcctaaagttattcaaggctattctgtttacgacttgtggcacatcctttttgagtttgacgaaagtcacttaaagaattttgccattcagaagctaaacgttcaaaatcagaaaacaaaaaaagggcaagagtacaatcctttcgcaaaactaaaaaaccatgtagaaagtggttattcagacctcagcttaaaggcactgtgcaaaattattccattccttaaagagggttatttatacaatgaagccgttgtactcgccaaaataccagaacttttaggggatgaatgggaagccagaaaggaagatgtttttaaaatcataaaacaatcaaataaacaattcaattggagcaaatctattgcgggcattgccaacaatttaattgaccaatacaaagggttggagcatgaagagaggtttgcctacaaagactttaaatacagacttgattatggtgatataaacgatgtggaaaaattctgtcaaaggtactttggagaaaaatcgtggaaagacagaacagataaaactgaaattcttgaagccgtaaaggagcaataccaagcatttttcaatgaccaaaaacgtgcttaccgtgaagtgcctttacttacagacttatttaaagaaaagttgaaggaaaataaaatcaacttagacggaaaaatttatcaccattccaacagggaaaatatatacggcaaccctgttacggacaatagtacaggtattgatattctccctgaaccaagaattgacagtatcaaaaatccgatgttcaataaatccatgggtatcctcaggaaattaataaacgaattaattatcaatggaactattgacagcgacactgaaatagttattgagctagcccgcgaactaaacgacaacaacaaaagggcagctattgaacgctaccagaacgaacgaaggaacaaccgtgacaagtaccgtgcatttttagaagaatttaaagaaaaagaaaaaccatctataaatgtagaaggaagcatctcaacttttgagctttggacagaacagatatttgaagaaatagaagatgaaaaaggaaagaagataaataaaaacacttctattctcaaagaaaaagaagctgtgaggagatatgagctatggatggaacaaaaaggtcagtgtatgtatactggtaaaatgatttccattacccaacttttctcaaatgatatagacattatgcatacaattccacgaagtttgttgcctgataatacaatggcaaataaaactattggattcaagaggtataacacggatttgcaaaaacaaaaattaccaacacaatgtgacaattattacaaagatgtagaaggatggggaacaagaatagagccacgcttggatatctggatagaaaaaagagataattacaagaaacagtatgaagacagacttaaacccaaaggcaatgaggatgaaaaaactaaaaacacaagaatacaggagaagcactactttaaaatgcactttgattactggcatgacaaggtagatcgtttcacagcagaagaaattaaagaaagttgggcaagaagacagcttgtagatacgcagatgataagcaaatacgcacgggaatttttgagaacttatttcaaaaaagtggccgtacagaaaggaagcattactgccgatttcagaaagatatttggatttcaggaagaagatgaaatcaaaagcagaaacaaacacacacaccacgccattgatgcagccgttttaacgcttatccctgtcaacagcagttatagagataatattctgaaaaagatgtatgagcaatatgaaattggaaagggacaatacaccacatctccttttgaggggttcaactctcaaaaactgattcaggatattgacaacaacacacttattgtgaactacgagaacgacaaaattctgaaacaatcatacagaaatgtaaggaagcgcggtaaacttcaatatgtgaaaaacaaacaaggtgtgtttgtccgagataaggatctaaacaaaatcatcaaaaaagcgaaaggagacacattaagaagtgtgttgttcaaagacacttttgtggcaaaaattagggatgtagaacgatacagtgatgggcaaccaattcgggaaggtaaagactggaaatacaggcaaggtaaagacgagtttatttataccgttcgtaaacctataaaagatgttttgtcaaaaatcgatgacattattgacccggttataaaaaaacttgtatctgaacaaaagaataataatgagatcaaggactatcaaggtaacgttattcgccacgtccggataaaaaccagtgcaggacaacctgtaaaagaccgagtgaactaccgttcttcacatgaatataaaaaccagtattactctgccgcaggttctttgccttatgccattttacttgaaaaaggtagttcaagaaataagttaacaaaagaaggaaatatacccaatgaaaaaacagagcgtgtaatgtttcctattgcttcttttgaagtggccaaaatgtacaaacaatctggaaagcttgatatagagcaatatattaaagaacaatatcctgattatgctaattgggacaagagattattgaaggtgggtcaaaaagttatggttctaaataatgatcttgaatttgaaaaaagaaatgatctttcctttcaagtcaacaggctatatatcataacacaattttctgaaggtagtatttggttgaaattccatatggaggctaaatcaaaagatgaagttaaggagtctgttagtcattttaaggatactttgcttcgcaaatttgaaatttcattagaaattccagaaataattgaagacaaatcaattattgatactaaaaagagaaaagaggattttgaaaatagaaaattcagatttgatactattaataatagtttccggctaatgcatctggctaacaaaattggaatagaaaaaacgaaagaaattaaaattgacttagataaatacaaggcaatttctggttctattgaaattgaaggaaatactcctttattaaaaatgtcaagtaaaaagtggaattttctttatgagggagatgattttgaaatgaatttttttgggaaaatcaaattcctaatttagactgatttttcccattttgcgtaacaattttatttaaagcttaattcagcaggtttgttctaaatgaatttcatcctgtatatatatagtccaatggtttcaaaaatatcttttgggagaataagtaggggttattttctctcaattactcctgccaacctatataataggtttataccaattgaaaaggtaagtttaggtcatttatttaaacctatataaaatggaaccgggacaaccctaccctatctacaaccacgccaatggctcagaaaacatcttccgggaggatgagaattatcggttttttctacagcagtatgccaattacctcggtgaggtggtagatacc

SEQ ID NO: 3374 - DNA, 8869 bp, synthetic construct
  source 1..8869: mol_type = other DNA
  misc_feature 1..8869: note = Synthetic
aaacttgaaaaaagaaaatccaaaacttaaaaatgaattaaatcttggatttttttatcgattattttataatgccttaaattctgaatgcgcccaatatgtcgggagatttttaacatacgctcattacttagtgcggaagaaaaatctgtaattatcttgtgtatgcaggttttgttttattagtttttcttacatttatactgtgtttaacaccaatcaataaaattaaatttgtattgcatttcaaacaacttaattttcagttataattctaggaaaaacaaattgcataaatatttaaaaataaaatgcccattacaaaagcaatgggctagaattttctctacggcttatagccttgttgtgaattgtctttcagtctgtaaatatataaaaaataaagaataaatgtcaaaacttggattagatttaggaagctcatcggttggttgggcaaaaaatgtaggtggtaaaattgtaaaaagcggtgtaattacttttaatacaggaatgtcaaaagggcaatcaggtgggtatgtttctccaactagagaaagaagagaagcacgtgctaagcgaaacttgattaagtcaaggaaataccgaaaatgggaattattgaaagttttggcagaaatgaaatttgttccattggatgagcaagagctacaaatttggagcaaatacaaaaaaggcagcacacgtaggtttcctgaaaatgaaaaattcttaaagtggttggcttgtgactttacgtatgaagaaggtgaaaactataaaaacccatatgtattacgagtgaaagcacttaaccatattgtaactaagcatgaatttgggcgtgcattataccatattgtacaacgtagaggctataaagatattggagaaaccgataaggaaactgaaaaccaaattaaaagaaggaatgacgatggttttaaaaaagctttagatatacacggtactgtcgctaaagcattaaatgaagaatttcttaaaaagggaaaaagagcaagaaaccagtatcctcttagggaggaatataaacacgaattggaggaactatgtaaagctcaaggatataatatacaaaaagaagggaaagaaggttataaaaataaatttgtaaaaagtttatggaaagccattatttggcagcaaccactgaaaactcaaagaggcaatattggcaaatgttccttagaacctacaaaaccaagaagtccgatttcacatcctatttttgaaatatttagatcttggcaatttattaacactattagatattatgatgatgatggagaaaaacaagttttatcccaaaaaataaaacaagccctattttacgagaaattcttaaaaaaagattcaaatttcaaatttgaagaaatcagaaaatttcttgacaagagatttcaaaaagcaaagagatacaattacccaatagacagaaaaacaggaaaatatgatacttctgtttcgggaatgcctgtttgcaaagggcttataaatgtctttggtgaaaaagcacaatctgcacttgacgatatggaattgtatcaaatcaataacgcacctaaaattattgataaatattcaatatatgatttatggcatatcatattcgagtttgatgcagaacatcttgataagtttgcaaccgaaaagctcaaaattcagaataaaatagtaacaaggaaaaagaaacaaatttcaatttccccattggtagaattaaaagagaagtttattcagggttacgcagatttaagtttaaaagctctatgtaaaattataccatttttaaagaagggtcacttatataatgatgctgttattcttgctaaaataccagaattgctagatacacaatggcaagaaaaaagagatttgataaatgaagtattagagaaaagtaacaaactatacaatgaaagaaaagcaataatcaatattgcaaataatttgattgataagcataaggggttaaatcactctgaaaaatttgcatacaaagattttgaatatgctcttgtacccgacgatattgaggaaatcgaaaaagcttgtgtagggtattttggagaaaaatcttggataaagaataaaaaaaaggaagaaatcataaaagaagttggatttgaatatcaagactacttccacgacacgaaaagagcttatcgtaaatttccaaattttacagaaattttcaaagatgacttaaaagaaaatggtattaatttgaaaggcgaattatatcatcattccaatcgcaaaaatatatatgataatacactagaaataaatcatgaaacaggagaaaaatacttgccaacttataaggatactggaatagaaatattacctgttccatatatagatagtataaaaaaccctatgttcaataaatcgatgagcatattacgaaaattgattaatgagttgattgtagctggtgaagttgatgataacacagagattattgtagaacttgcacgggagctaaatgacaacaataaacgtgcagcaattgaacgctatcaaaatctacgaaaaaataaccgagaaaagtaccgggagtttttaaaagaatttaaaaatagagaaaacatcaatctaaatgttgaagaaagtatttcggcttttgaactatggtcagagcaaacgtttgaagaaactaatgatgaaaatggaaaaaggatatcaaacaaaggccatattgaaatattaaatgaaaaagcagctctaaaacgatacgaattatggatggagcaaaaaggtcaatgtatgtacacagggaaaatgatttcaattacacaattgttttcaaatgatatagatattatgcacactattccacgttggttgttgccagataacacaatggcaaatatgacagtaggattttctaaatataatcgtgatttgcaaaaagaaaagttgcctaagcaatgtgataactattctgtagatgtagatgggtggggaacaagtattgaacctaggttggaaatatggaagaaagagcgagataaatggaaaagtttatttgaaagtagaagaaaaccaaaaggtaatgaagatgaagagaagaaaaacaaacgaattcaggaaaagcactattttaaaatgcaccttatttattggaatgataagattgagcgttttgaagcagatgaggtaaaagatagttgggcaagaaggcaattagtcgatactcaaatgatcagcaggtacgcacgtgaatatcttaaattatattttaaaaaagtctccgtacaaaaaggtacagtcacatccgattttagaaagttgttcggatttcaagaagaggatgaaataaaaagtcgtgataaacacacacatcacgctattgatgcatcagttttaaccttgattcccgttaacagtagtaagagagaacaaattttaaaaaattattttaaaagtcaggaggacaaagataaattgagccttaaaaaactcagagccagtgtaaagccatcttctgattttaatcctcaagaattgataagaaaaatagaagaaaaaacactaattgttaattaccaaaaagacaaaattataaaccaatctataaaaaaagtaagaaaaagaggaaaaattcaatatgtcaaagataaacaaggagaatttgtattggacaaagagggtaacagaatcattaaatatgctaaaggtgatactcttaggagtgaattgtttgcacaaacctatttaggtaaaataaaagatgttgaaagatatgatgatagtagcccaaaacgaaataccgaaaatactgattggatatataaaaaagggaaagatgaatttatttttgtcaaaagagaaaatatagataaggtaaaatcatcagataaattgattaaatcaataatagaccctgttattagaaatttagtagaagaacagaaaaaaaacactattgtaaaagattatcaaggtaacgtaattcgtcatattagaattagaacaaaatcaggtagggaggtgaaagaacgaataaattaccgttcacgatacgactacaaaaataaattttactctgaagctggaaaaataccatatgccgtattacttcaaaaaagcataaatggagaaatagaaagagaaatgattccagtagcttcttttgaagtagctaaagtatttaaaaaacatagaaagtttaatccagaactttacatgaatgagtttcatccagatattggaaattgggataaaaaaaattggcttaaagttggacaaaaagtaattgttttaaagaatgataaagaatttgaaaaaagggatgacattgattttcaacataagagaatgtatgtaataacacagttttcagatggaggaatttggctacaataccatttaaatgcacaatccaaggatgatgtaaaaaaatctataagccttgcaaaagataagttgcttcgtaagtatgaaattcaatataatattcctgaggtaattgaagatgaatccattcaggacagaaaaaatcgtactgctgattataataataggaggtttagatttgatacaattagtaaaagttttaggctaacaacattaatggaaacgattggagaaaaaagaacaaaaaaaataaaagcagaattagacaaatataaagcgattccatctagtattgagattgaaggtgaaacggctttattgaaaatgtcaaaagaaaactggaattacctttatgagggtacagactttgaagttacaattttaggtaaattaaattggttgtgaaatgataaaacgcaccctatttttcggtaatcctgcctatctcagtacaaaaaatcagcaattggtggtcaattttcctgaagaagacaaggacgaaaaaaccatccccattgaggatttgggctatgtagttttggaagatcctcaaattaccattacaaacggattactgagaaagttagtagaaaataaaactgccgttattacctgcgataaacagcatttaccttgttcgttattacaacccttagtagggcacaccgaacagaccgaacggatgcgctaccaattgaatgccagcatacccttaaaaaagaacttgtggcaacaaacggttatcgcaaaaattgataatcaagccaatcattttttattgcgaaacaaaaatgcactacggttaaaacgttatgttaaagaagtgaaaagcggcgatttagacaatcaagaagctattgcagctgctttttactttcaaaatttatttgatatagatgattttagccgtaaccaaaaaggcattgcaccaaataatttactaaactatggttatgctattttgcgcgccgttgcagctagggcattggtaagtagcggtttgttgccctcggttggtatttttcatcacaacaagtataacgcgttttgtttagcagatgacgttatggaaccttaccgcccttttgtagatgccctagtttacgatatcgtagaaacaggctgccaaatagaggaattaaacacaagcataaaagccaatttattaatgatccccgctatggatgttattattgatggcaaacaaagcccattaatgaatgccatgagcagaacaacaacaagcctttatgaatgttttgagggcagtagacgaaaattattatatcctgagtttaaatcctctttggaggcttttgcgggataaaacctagattccgcatcaagtgcggaatgacaagatagtgagctctttaactaaaatacaagagtatgtatggaatcttatttaacacgattaaaccaatataggtgtatgtgggtgcttgtattttttgatttgcctacggaaaccttaacggaacgaaaagccgcaacgcggtttagaaaaaatttattagatgatggttttggcatgtttcagtttagtatctatagcaggttttgccccagtcgcgaaaatgccacagtacacattaaacggaccaaaagggcgttgccaaaaaaaggaaaagtctgtatcatgcaaattaccgataaacaatttggaatgatggaattgtttcatggccaaaaagaagccaatttagaagcaccatcgcaacaactagaacttttttaaacacactctgtgatgctgaacttgattcagcatctcacgattatatctagaatttaaaatgtaagacagaacgcagccttagtccatttgaaccacaaattcttaaaatcctaaaccataccataaaaaacaggatgccagcctattacagcaagcatcctgtgaattctccataaatttaaagaactgaaagcaattcacaactaccatctcaacctaaatataattcagtttcctgtgaattctccataaatttaaagaactgaaagcaattcacaacatctaaaggtgctaaaatttcaaacgaaaacctgtgaattctccataaatttaaagaactgaaagcaattcacaactacaacggttagtataaaaattgaagccgtcctgtgaattctccataaatttaaagaactgaaagcaattcacaactaaacaaagatttagcttattctggtgctgcctgtgaattctccataaatttaaagaactgaaagcaattcacaaccgagtgttcaccaatgtatttaatagtgtacctgtgaattctccataaatttaaagaactgaaagcaattcacaacttaaatccaaaattatggttgagggatatgcctgtgaattctccataaatttaaagaactgaaagcaattcacaactaagagataactctataattcgttacctaacctgtgaattctccataaatttaaagaactgaaagcaattcacaaccgcatcacttgtgtagttctcgcgatgtgtcctgtgaattctccataaatttaaagaactgaaagcaattcacaacaattgagtgagatctatttatgcaaccgagcctgtgaattctccataaatttaaagaactgaaagcaattcacaactagaggttccgtctattctagctccgttttcctgtgaattctccataaatttaaagaactgaaagcaattcacaaccgtactttaatgcgcctttcgtcttttgttcctgtgaattctccataaatttaaagaactgaaagcaattcacaacataaatcgtcctgttgcagtttcgttcttacctgtgaattctccataaatttaaagaactgaaagcaattcacaacacgacttaatttttctcaccaatgaaataacctgtgaattctccataaatttaaagaactgaaagcaattcacaactgaaatggataatgttaaggatatagagttcctgtgaattctccataaatttaaagaactgaaagcaattcacaacaaacatcgcataataaagcaaacaaaaaatcctgtgaattctccataaatttaaagaactgaaagcaattcacaacaagaactcataatgcgcttttgtacgctctcctgtgaattctccataaatttaaagaactgaaagcaattcacaactaattggctggtcttgtgttggttggtagtcctgtgaattctccataaatttaaagaactgaaagcaattcacaactcgcccgtaatagtaccgttgttaaagttacctgtgaattctccataaatttaaagaactgaaagcaattcacaactttggatgcaaaataaatctaaaataccagcctgtgaattctccataaatttaaagaactgaaagcaattcacaacgaatttaagcttcttcatatttgaacattgcctgtgaattctccataaatttaaagaactgaaagcaattcacaacaaaatcctgctgatgaatacacagtagtttcctgtgaattctccataaatttaaagaactgaaagcaattcacaacggtaatcttcgtctgaagtaataagtaattcctgtgaattctccataaatttaaagaactgaaagcaattcacaacaaagccctatcgacaaaagcaccaccattacctgtgaattctccataaatttaaagaactgaaagcaattcacaactgctctagtgttacagttttgttaaatattcctgtgaattctccataaatttaaagaactgaaagcaattcacaacctgttctagcaaaggtaagggctattgcatcctgtgaattctccataaatttaaagaactgaaagcaattcacaacgcgaaatcacattaataaatgtactaatgccctgtgaattctccataaatttaaagaactgaaagcaattcacaactcaattacaagtaaaggatttactgttacacctgtgaattctccataaatttaaagaactgaaagcaattcacaacgatacgcatttaggaagtggttcaatagctcctgtgaattctccataaatttaaagaactgaaagcaattcacaacctacacaaccaaataaatggcaactctgttcctgtgaattctccataaatttaaagaactgaaagcaattcacaacacaggcggttacggacttaatgccgattatcctgtgaattctccataaatttaaagaactgaaagcaattcacaacataagagacaactctataattcgttacctacctgtgaattctccataaatttaaagaactgaaagcaattcacaacaacaattcaaaaacatcagtagcatcatcacctgtgaattctccataaatttaaagaactgaaagcaattcacaactcgtcatctgttacggttgcgccctgctctcctgtgaattctccataaatttaaagaactgaaagcaattcacaacagcaaaaaaacaaaggttttttagtagtaa

SEQ ID NO: 3375 - DNA, 8278 bp, synthetic construct
  misc_feature 1..8278: note = Synthetic
  source 1..8278: mol_type = other DNA
agccatcaatatatgcaataactttttcgatattgtttgattccataaatattagttttatatttgcatcacattaacagctcctcagatagcatctttggattgacgccttgggtatttatacttgaggcgtttcgtttatatgaatatgcaaatataaagaaaaaataaacaatggtatttcataatattgaaaagtaactataaatttgcaacacataaccaatttattaatcaatattgtggttgtaatttgctttcaattaattgcttttgaatcttttgatatatttttcatggattcaaaagcataaattattttaagataatatggaaatttaggcaaaaaaatagcgattacggagtacgcaatcgcttaggaaagaaatcctacggcttatagccttgttgtaatttgtctttcaattgcaaatgtaaataaaattattaaaaatacaaaaaatgaaaaaacttgctttagatttaggtagctcatcaataggttgggcattaagagaaaataacgaattaaatgaaagaggtgttattacttttgatgcaggaatgcaaaaaggagcaacaggtggctatacttctccaactaaagatagaagagaggctcggtcaaaaagaaatctaattcaagctagaaaatatagaaaatgggagttattgaaaatccttgttaatgaatttgttccattagacattacagaacttgaaatatggagtaaatataaaaaaggacaattgaaagcatttcctgaaaacggaaactttctaaaatggttggcttgcgatttttcttatctaaaaatcataaatgaatacaaaaatccatacgagttaagaattagtgcacttgacaagatgcttagtaagcatgaattaggtagggctttatatcatttagtgcaacgaagaggattcaaagatattggagaaacagacaaagaaaccgaaaaacaaatagaaaaaagaagtgctgaaggttttgaagatgcattaaataaaaatagaacaatagcagaagctctacaaaatgaatttttaaataatggaaaaagagctagaaatcaatatccatatagagatgaatatgaggatgaattattgttaatacttgaaagtcagggctttgatatttcaaaaaatgaaaaaggtaatttcagtaatgattttgttcaaaaagtatggaaagcaataatttggcaaagacccctaaaaagtcaaaaaggtactattggaaaatgtactttagaacccactaaactaagatgccctatttcgcatccaatttttgaaatttttagagcttggagttttataaatactataaaattttctaaaaaagacaatgaaatggagtttttggattcaaatactagaatgcgcctttatgaaaatatatttttaaaaaacgataaaaatttcaaatttgaagaaataaggaagtttttagataaagaattgaagtctaaaaatacatataattatccttttgatgtaaaaaagcaaatatacgattcttctgtatcgggaatgccaatttgttgtggcttgataaaagtatttggcgaaaaattatcatcagaacttttcaaaatcaaaaattacaatatcggtactgccccaaaagtttataaaaattattctatttatgatttgtggcatgttctttttcaatttgatgaagaacatttaaaagattttgccattattaaattagaaatcaaaaatataatagacaaaaaagagcaagaacaaaatccttttgtaaacttaaaaaagttgatttcaaatggatattctgatttgtctttaaaagcaatggttaaaattataccatttttgaaggaaggtttcctttataatgaagccgttgttttggcaaaaatacctgaattaatgggggagcaatgggaatcgaaagaagaaattatcaagaaatatattaaaacatcaaatgatatatataatgctaataaggtaataattgggataactaatggattgatagatatttataaaggagaggatttaaagtacggtgattatgattttacttacaaactagaaaataaacatgacgatgaaatattaaatgcttgcaaaggacattttggagaatctaaatgggagaaaaaaagaaataaagagcaaatttttgagagtgtaaaaaaaatgtatcaagaatttttaagcgataaaaaaagaatgtatcgagaattgccgcttttaacaaccattttcaaagatttattaatgaaagaaggtttagagattaaaggaactctttaccatcattctaacactgaaaataaatttttgaaaaaatatattgatgcaagaagtggaaatataaaattaccatttgataaaaaaactggaacagaaattttgccggagccaaggattgatagtatcaaaaatccgatgtttaacaaagccatgtttattttatataaagcgataaaagaattaattgttaatgaaaaagtagataaggataccgaaataatagtagaattggctcgggaattaaatgataataataaaagagctgccatagagcggtatcaaaacgaacgaaaaaacaatcgagaaaaataccgagcttttttgaacgaatttaacgaaaaaaagaatcaaacaattaatgtagaagataatatttctgtttttgaactttggacagaacaaatatttggggaaacatctgatgataaaggaaaaaaaacgaatataagtacaagtataattaaagaaaaaaacgctttaaatcgttacgaactttggatggagcaaaaagggctgtgtatgtacacaggtgatatgatttctataagtaccttattttctaatcaaattgatattgcacatacaattcctcgtagtttattgcctgacaatacgatggcaaacatgacggtttgttttgctcgttacaatagagatattcaagaaaccaaaacacctttatattgtgttaactattcagaagatatagaaggtattggaactgccatcatgcctcggttagataattggataaaaattaaagacagttatcaagaacgatatgataaaaaatgtaaacctgaaaatggagaggattttgataaaaaaaatgcaagaatacaagaaaaacattattgcaaattgcatttagattattggaatgataaaataagcaggtttacagcaaccgatgtaaaggatagttgggctaggcgccaactaacagatacccaaatgataagtaaatatgctagagaatatttaaaaacatatttcaaaaaagtaattgtacaaaaaggaagtgttacagcagaatttaggaaaatatatggatttcaatctgtagacgacattaaagacagaaatttacatacgcatcatgccatagatgcaactgtgcttacgctcatacctacaaacagtagcaaaagggacaaattgctaagaaatatgtttgaaaaaatggaaattgaaaaaaagcaatttaccgaactgccatttgaaggttttaattctcaatttattataaatgaaatagaaaacaaaactttaatcgtaaattatgaaaaagaccaattacaaaagaaaacaaaaaaaatagtaaggaaaagaggagaaattcaatttgttaaaaacaaaaatggtgaatataaattagataaaagtggaaataaaatcgttaagatagctgatggagatactgctagaactgttttgtatgctcaaacatttttaggtaaaataaaagatgtagaaagatttgatgatggacagcctatacataaagatggtgattggaaatacaaaaaaggagattctgaatttatttttgttaaaagagaaaagatagataaagtaaaatctagcgataaattaatatctgaaattgttgaccctgtaataaaacaactagttgtaaatcaaaaaaacaataccgaaattagagattatcaaggtaatattataaggcatgtcagaattaagactaacagtggaaaagaagttaaattaagattaaattataagtctaaacacgattataaaaataaatattattccgaatcagggtcaattccttatgcaattttacttcaaaaaaataattcaggaaaaattatcagagaaatgatccctgttgcttcatttgaggttactaaaacaagtaaaaaatctactaaatttaatatagagagttatttggaggaaaatcattcagataaaaaagatttttcagacaaaaaacttttaaaagttggacagaaagtaattgtattaaatgtagattcagaatatgaaaagcgaaataatatagattttcaaaaaaacagattgtataaaatagagcaattttcagaaggtagtatctggttaaaattccatcttgaagcccaatctaaagaccaaatcgattcttctataaaaaacatgaaggatattgcattgagagaaattgagaaaaaatataatattcctgaagttatagtagactcaactattaaagatgcaattactcaaaaagaagattttgaaaaaagaaagttttcatttgatcaattaaaaaggtttcgttttgatagattaattaaaatattaggagaagatgaagttaaaataataaagaaacaacttgatctatacaaaacacaatcttctgtcgtagtggaaattaataaagaaaacaaatctcctttattaaaaatatcaagcgaaaattggaattttctttatgagggttatgattttgaagtgtctttattaggtaaaattacattcttagaaaaatctatttaaaccaccttaaaaacccaatattattacccaaatctcatgggacaaaatgtctcacgtttcaataacgtgggacatttttggcaaaaatgtcccacgttattttttcatgggacaaaatgtcccacgttattttacccttttttgagcaattcatataacttaatattgataaaaatggcttcttttccttcaaattgaggctctatgaccttgatttcttccaaaagactcaaataccgtgaagcagattttcgttcgatgcgtaaattggaaaccaaaaattcgtttttacaatagggatgaataaaaagttgctcgattaaatcttttgaataaattttggggagtttttcttgaaccaatagttgggtttctttaaataaatcatttattttttttatctgacttatggtatttaaggcagtatgctcaatggctttgagtatatacataatccattcctcccaatttttcttcgttcgcacctcttgcaacaatcggtagtaatcgcttttggttttgatgatgtatgagctcaagtacaaaaccggctcatctaacaaatctttcataatcaaataaagcacattcataattcgtcctgttctgccatttccatcataaaacgggtgaatgctttcaaactgatagtgctgaatggctaattttatgagtggagaaatttcgtctgtatcgttattgaggtacagttccaaatttgacatcaaattgctaatgctatcaaaattatcgggaggcgtataaataacttcgttggtaaggtcgtttatcaatgcagtacccggcaattttctaaggcccgcattgttttgttctaactcattttgaatggctataataccgtttgtattcagaaatcctctttcttttaccaattttgttcccatcaaaagggcttctctataacgcaacacttctttggttgccacatcgggcttagcagacttagcatacaaggcgtgataaagtttatcttgagtggtaatcacattttcgatacccgaactggcttgagcttctttcaaaataacagcattaatcaaaatagcaggattgggcaatgtgtttacaagccctttcaactccgccaaagccactgcagatttgctttcctgcctaagcacagcgatagtttccaccaaagtttgtttgggtggaagcaatggcatattattaaatgcgttatttgttttggagaccattttaattgcaatgcatgaaataccttttttattaaatacaaaaataacaattatttctaaaaattagattttcaatcgcaatcgctaaattttattaaaaagaaaataagttcaaattggcattccatattaatttattttagattgtaaccgttattaaaataccaaacttggaggtttataaataaaaatagtatgctcaaacgaacgcttagtttttcaaatcccgtgtacctgcgcaccaaaaacgaacaattggtttttaatttgcctagtgcaaaaggtttggacgagattggcgaactcaataccattcctatcgaagacattggaattgtgattttggataatctacaaattacgatttcgcatagcttgattaataaacttctggaaaataatattgcactcatcacctgcaacgacacccaccaccccacaggtctgatgctcaatctggacgggcatacgctgcaatctgcccgatttaaagcccaaatagaagctagcgagccactcaaaaaacaactttggcaacaaaccatcaaagccaaaatcacaaatcaagctgcggttttgagtcaattaaaaatagaatctaaaaatatgttaaggtgggctgaggatgtaaaatcgggagacagtgataacctagaagctcgagctgctgcatattattggaaaaatatattaaaatttatgcccgatttttcgggttttaaccgagagcgacatggcgagtatcccaacaattttctcaattacggctacgccattctgagagcaactatggctagaagcattgtggcatcgggtttgttgcccactttgggcatccatcatcgcaatcaatacaatgcctattgtttggcagacgatattatggaaccttaccgacctttggttgatatgatagtttgcgatttgataaaaaaacaccctgaccaaaaagaaattaatgttgaaataaagaaaatacttttacaaattcccgctatggatgtcaatattgacgatgctaaaagtccgctgatgctcgctactcaaaaaaccacatattcgctatacaaatgttttgatggcgaaacccgaaaagtaatttatcccaaaattgcacctaaaacataaaattgtagtatattactcaaataactaaaaatgcgattttagatttaggcttctgtatcatgctcgaacgacttaatcaatatcgaattatgtgggtgatggtttactttgatttgccagtagtggaaaaagcagagcgaaaagcggctgctaaatttaggcaagatttgctaaaagacggctttacgatgtttcaatttagtatgtatatgcgacattgttttagcagcgaaaacgcagaagttcatattaaaagggtgcaagtattaatgccagaaaaaggacacatcgtggttacaaaaattacagataaacagtttggcgagatgaaaatattttattgtaaaaagaaacaaaaacccaaaggcgacccacaacaattagaattattttaaaaaatggatagaagtttatttttaaaaagcatcattagccttgcgggtgtgcaagcattgccaacaaaatgggttaaaaattaccaaaaaatatatcttttgcagttttttgttcgtggatttagatttacggatggagcgaaaattttggatgaattgaagcaaaattacatcctcgatttggtacgagaacctcaaaatgcgtatgatgaaaatgccattgccctatattacaatcaaaccaaaataggctatgttccaaaagaaaaaaacgaaattttggcaaaattaatggatgcacaggttatagatttggtagccgagattgtcaaaatcaataccgaggctgcagcttgggaaaacgtaaatgccaccatttatttactcaaagaagcatatttacctttggcagaaagtgcaaaatatttattagaacttgaaaatcctcactattttacattgagtagagacaaagattatattaccaaaattgatgtaaatcattgggaaaatgatgtggatgattatgataatatttgtgtaaaattgatagataacatctccaacgacaatgtgtatagttggatatttgaatgttttcccagagagcaagattttcaagaggcagtagataaaggtgtgtttttgataaataaaaacgatttgccagccgaattgctaagtgaaataagtgaaactgcagaactaatagaaattcaa

SEQ ID NO: 3376 - DNA, 7543 bp, synthetic construct
  source 1..7543: mol_type = other DNA
  misc_feature 1..7543: note = Synthetic
caatatgtcgggagatttttaacatacgctcattacttagtgcggaagaaaaatctgtaattatcttgtgtatgcaggttttgttttattagtttttcttacatttatactgtgtttaacaccaatcaataaaattaaatttgtattgcatttcaaacaacttaattttcagttataattctaggaaaaacaaattgcataaatatttaaaaataaaatgcccattacaaaagcaatgggctagaattttctctacggcttatagccttgttgtgaattgtctttcagtctgtaaatatataaaaaataaagaataaatgtcaaaacttggattagatttaggaagctcatcggttggttgggcaaaaaatgtaggtggtaaaattgtaaaaagcggtgtaattacttttaatacaggaatgtcaaaagggcaatcaggtgggtatgtttctccaactagagaaagaagagaagcacgtgctaagcgaaacttgattaagtcaaggaaataccgaaaatgggaattattgaaagttttggcagaaatgaaatttgttccattggatgagcaagagctacaaatttggagcaaatacaaaaaaggcagcacacgtaggtttcctgaaaatgaaaaattcttaaagtggttggcttgtgactttacgtatgaagaaggtgaaaactataaaaacccatatgtattacgagtgaaagcacttaaccatattgtaactaagcatgaatttgggcgtgcattataccatattgtacaacgtagaggctataaagatattggagaaaccgataaggaaactgaaaaccaaattaaaagaaggaatgacgatggttttaaaaaagctttagatatacacggtactgtcgctaaagcattaaatgaagaatttcttaaaaagggaaaaagagcaagaaaccagtatcctcttagggaggaatataaacacgaattggaggaactatgtaaagctcaaggatataatatacaaaaagaagggaaagaaggttataaaaataaatttgtaaaaagtttatggaaagccattatttggcagcaaccactgaaaactcaaagaggcaatattggcaaatgttccttagaacctacaaaaccaagaagtccgatttcacatcctatttttgaaatatttagatcttggcaatttattaacactattagatattatgatgatgatggagaaaaacaagttttatcccaaaaaataaaacaagccctattttacgagaaattcttaaaaaaagattcaaatttcaaatttgaagaaatcagaaaatttcttgacaagagatttcaaaaagcaaagagatacaattacccaatagacagaaaaacaggaaaatatgatacttctgtttcgggaatgcctgtttgcaaaggcttataaatgtctttggtgaaaaagcacaatctgcacttgacgatatggaattgtatcaaatcaataacgcacctaaaattattgataaatattcaatatatgatttatggcatatcatattcgagtttgatgcagaacatcttgataagtttgcaaccgaaaagctcaaaattcagaataaaatagtaacaaggaaaaagaaacaaatttcaatttccccattggtagaattaaaagagaagtttattcagggttacgcagatttaagtttaaaagctctatgtaaaattataccatttttaaagaagggtcacttatataatgatgctgttattcttgctaaaataccagaattgctagatacacaatggcaagaaaaaagagatttgataaatgaagtattagagaaaagtaacaaactatacaatgaaagaaaagcaataatcaatattgcaaataatttgattgataagcataaggggttaaatcactctgaaaaatttgcatacaaagattttgaatatgctcttgtacccgacgatattgaggaaatcgaaaaagcttgtgtagggtattttggagaaaaatcttggataaagaataaaaaaaaggaagaaatcataaaagaagttggatttgaatatcaagactacttccacgacacgaaaagagcttatcgtaaatttccaaattttacagaaattttcaaagatgacttaaaagaaaatggtattaatttgaaaggcgaattatatcatcattccaatcgcaaaaatatatatgataatacactagaaataaatcatgaaacaggagaaaaatacttgccaacttataaggatactggaatagaaatattacctgttccatatatagatagtataaaaaaccctatgttcaataaatcgatgagcatattacgaaaattgattaatgagttgattgtagctggtgaagttgatgataacacagagattattgtagaacttgcacgggagctaaatgacaacaataaacgtgcagcaattgaacgctatcaaaatctacgaaaaaataaccgagaaaagtaccgggagtttttaaaagaatttaaaaatagagaaaacatcaatctaaatgttgaagaaagtatttcggcttttgaactatggtcagagcaaacgtttgaagaaactaatgatgaaaatggaaaaaggatatcaaacaaaggccatattgaaatattaaatgaaaaagcagctctaaaacgatacgaattatggatggagcaaaaaggtcaatgtatgtacacagggaaaatgatttcaattacacaattgttttcaaatgatatagatattatgcacactattccacgttggttgttgccagataacacaatggcaaatatgacagtaggattttctaaatataatcgtgatttgcaaaaagaaaagttgcctaagcaatgtgataactattctgtagatgtagatgggtggggaacaagtattgaacctaggttggaaatatggaagaaagagcgagataaatggaaaagtttatttgaaagtagaagaaaaccaaaaggtaatgaagatgaagagaagaaaaacaaacgaattcaggaaaagcactattttaaaatgcaccttatttattggaatgataagattgagcgttttgaagcagatgaggtaaaagatagttgggcaagaaggcaattagtcgatactcaaatgatcagcaggtacgcacgtgaatatcttaaattatattttaaaaaagtctccgtacaaaaaggtacagtcacatccgattttagaaagttgttcggatttcaagaagaggatgaaataaaaagtcgtgataaacacacacatcacgctattgatgcatcagttttaaccttgattcccgttaacagtagtaagagagaacaaattttaaaaaattattttaaaagtcaggaggacaaagataaattgagccttaaaaaactcagagccagtgtaaagccatcttctgattttaatcctcaagaattgataagaaaaatagaagaaaaaacactaattgttaattaccaaaaagacaaaattataaaccaatctataaaaaaagtaagaaaaagaggaaaaattcaatatgtcaaagataaacaaggagaatttgtattggacaaagagggtaacagaatcattaaatatgctaaaggtgatactcttaggagtgaattgtttgcacaaacctatttaggtaaaataaaagatgttgaaagatatgatgatagtagcccaaaacgaaataccgaaaatactgattggatatataaaaaagggaaagatgaatttatttttgtcaaaagagaaaatatagataaggtaaaatcatcagataaattgattaaatcaataatagaccctgttattagaaatttagtagaagaacagaaaaaaaacactattgtaaaagattatcaaggtaacgtaattcgtcatattagaattagaacaaaatcaggtagggaggtgaaagaacgaataaattaccgttcacgatacgactacaaaaataaattttactctgaagctggaaaaataccatatgccgtattacttcaaaaaagcataaatggagaaatagaaagagaaatgattccagtagcttcttttgaagtagctaaagtatttaaaaaacatagaaagtttaatccagaactttacatgaatgagtttcatccagatattggaaattgggataaaaaaattggcttaaagttggacaaaaagtaattgttttaaagaatgataaagaatttgaaaaaagggatgacattgattttcaacataagagaatgtatgtaataacacagttttcagatggaggaatttggctacaataccatttaaatgcacaatccaaggatgatgtaaaaaaatctataagccttgcaaaagataagttgcttcgtaagtatgaaattcaatataatattcctgaggtaattgaagatgaatccattcaggacagaaaaaatcgtactgctgattataataataggaggtttagatttgatacaattagtaaaagttttaggctaacaacattaatggaaacgattggagaaaaaagaacaaaaaaaataaaagcagaattagacaaatataaagcgattccatctagtattgagattgaaggtgaaacggctttattgaaaatgtcaaaagaaaactggaattacctttatgagggtacagactttgaagttacaattttaggtaaattaaattggttgtgaaatgataaaacgcaccctatttttcggtaatcctgcctatctcagtacaaaaaatcagcaattggtggtcaattttcctgaagaagacaaggacgaaaaaaccatccccattgaggatttgggctatgtagttttggaagatcctcaaattaccattacaaacggattactgagaaagttagtagaaaataaaactgccgttattacctgcgataaacagcatttaccttgttcgttattacaacccttagtagggcacaccgaacagaccgaacggatgcgctaccaattgaatgccagcatacccttaaaaaagaacttgtggcaacaaacggttatcgcaaaaattgataatcaagccaatcattttttattgcgaaacaaaaatgcactacggttaaaacgttatgttaaagaagtgaaaagcggcgatttagacaatcaagaagctattgcagctgctttttactttcaaaatttatttgatatagatgattttagccgtaaccaaaaaggcattgcaccaaataatttactaaactatggttatgctattttgcgcgccgttgcagctagggcattggtaagtagcggtttgttgccctcggttggtatttttcatcacaacaagtataacgcgttttgtttagcagatgacgttatggaaccttaccgcccttttgtagatgccctagtttacgatatcgtagaaacaggctgccaaatagaggaattaaacacaagcataaaagccaatttattaatgatccccgctatggatgttattattgatggcaaacaaagcccattaatgaatgccatgagcagaacaacaacaagcctttatgaatgttttgagggcagtagacgaaaattattatatcctgagtttaaatcctctttggagcttttgcgggataaaacctagattccgcatcaagtgcggaatgacaagatagtgagctctttaactaaaatacaagagtatgtatggaatcttatttaacacgattaaaccaatataggtgtatgtgggtgcttgtatttttgatttgcctacggaaaccttaacggaacgaaaagccgcaacgcggtttagaaaaaatttattagatgatggttttggcatgtttcagtttagtatctatagcaggttttgccccagtcgcgaaaatgccacagtacacattaaacggaccaaaagggcgttgccaaaaaaaggaaaagtctgtatcatgcaaattaccgataaacaatttggaatgatggaattgtttcatggccaaaaagaagccaatttagaagcaccatcgcaacaactagaacttttttaaacacactctgtgatgctgaacttgattcagcatctcacgattatatctagaatttaaaatgtaagacagaacgcagccttagtccatttgaaccacaaattcttaaaatcctaaaccataccataaaaaacaggatgccagcctattacagcaagcatcctgtgaattctccataaatttaaagaactgaaagcaattcacaactaccatctcaacctaaatataattcagtttcctgtgaattctccataaatttaaagaactgaaagcaattcacaacatctaaaggtgctaaaatttcaaacgaaaacctgtgaattctccataaatttaaagaactgaaagcaattcacaactacaacggttagtataaaaattgaagccgtcctgtgaattctccataaatttaaagaactgaaagcaattcacaactaaacaaagatttagcttattctggtgctgcctgtgaattctccataaatttaaagaactgaaagcaattcacaaccgagtgttcaccaatgtatttaatagtgtacctgtgaattctccataaatttaaagaactgaaagcaattcacaacttaaatccaaaattatggttgagggatatgcctgtgaattctccataaatttaaagaactgaaagcaattcacaactaagagataactctataattcgttacctaacctgtgaattctccataaatttaaagaactgaaagcaattcacaaccgcatcacttgtgtagttctcgcgatgtgtcctgtgaattctccataaatttaaagaactgaaagcaattcacaacaattgagtgagatctatttatgcaaccgagcctgtgaattctccataaatttaaagaactgaaagcaattcacaactagaggttccgtctattctagctccgttttcctgtgaattctccataaatttaaagaactgaaagcaattcacaaccgtactttaatgcgcctttcgtcttttgttcctgtgaattctccataaatttaaagaactgaaagcaattcacaacataaatcgtcctgttgcagtttcgttcttacctgtgaattctccataaatttaaagaactgaaagcaattcacaacacgacttaatttttctcaccaatgaaataacctgtgaattctccataaatttaaagaactgaaagcaattcacaactgaaatggataatgttaaggatatagagttcctgtgaattctccataaatttaaagaactgaaagcaattcacaacaaacatcgcataataaagcaaacaaaaaatcctgtgaattctccataaatttaaagaactgaaagcaattcacaacaagaactcataatgcgcttttgtacgctctcctgtgaattctccataaatttaaagaactgaaagcaattcacaactaattggctggtcttgtgttggttggtagtcctgtgaattctccataaatttaaagaactgaaagcaattcacaactcgcccgtaatagtaccg

SEQ ID NO: 3377 - DNA, 5429 bp, synthetic construct
  misc_feature 1..5429: note = Synthetic
  source 1..5429: mol_type = other DNA
ttagattattcgttatttttggagacaggctaaaattagatgtgacaccaagaaaaaaagcgatccagtttacaccagaccgctttaaatgttttcacaacggaataatccttattgtgaattaatttttgttaataaataaagggatagataggtttaacttttggtaataaaaaaagcaattacggaagtacgcaattgctaagaaatttctacggcttatagccttattgtgaattgtctttcgattacaaaagtaaataaaatacaataaataaaaaataaatatgacaaaaaaattaggaattgatttaggaagctcctcattgggttggtttattagagaagataatcaaataataaataatggagttgttacttttaatactggaatgaagaaggaacaaggaggttattcatcgccaacaaaagacagaagagaagcacgctcaaaacgaagattgatacaggctaagaaatatagaaaaattgagttgttaaagattttagttgaaaatggatatgtaccattatcaaatgaagatttggatgtatggagtaaatataaaaaagggcatcttcgtaagtttccggaaacaaaagaatttataaaatggctttcttgcgatttttcatatcttgaaaatggtaaaaaatacaagaatccttataaattaagggttaaagctattgataacaaattatataaacacgaatttggaagagtattatatcatttagtacaacgaagaggctataaagatattggtgaaagcgataaagaaactaatacacaaatagcaagacgagtcgatagtggctataaagctgcaatagagaaagcgaataatagaacaattggagaagctttatcgaatgaatttcttgaaaaaaatattagagcaagaaatgaatatccttacagagtagaatatgaagcagaatttaaaactatatgcgaagcacaaggttttgatatttcgcaaaatgaaaagaaagagtataaaaatgagtttgttagaaaactacgaaaagctattttgtggcaacgacctttaaaaagccagaaaggaaatattggcaaatgtactttggaattatcaaaacaacgatgcccagcatcgcatcctatttttgagatttttagaacttggagttttattaatactattaaaacagttagcgaaacagaaggctataaaactgtaaaagaaaacatccctcttaaatttaggcaacaaatttttgaggatgtttttctaaacaaggaaaaaaacttcaaatttgatgttattcaaaaatacttagacaagctttttgagaaaaagaaaacttataattacctgaatagaagtacaaaaaagtatgacagtacggtgtctggtatgccaatatgtaagggcttgattaaacattttggagataaagtaaaacaagaactagaacaattacatacatataacattggtacaaaagagcataaaattctcggaaactattcaatttatgatatatggcatctgatttatgaaaccgatgatgagcacttagaagattttgcaataaataaattaggtcaatcaaacaacgaaagaacaaacaaaaaaggtaaaataattattgaaaatcctattgttaaatttaaaaaagccaatttctctacaagctttgccgatttaagcctaaaagcaatgtgtaaaataataccttttttacaagaaggatttttgtacaatgaggcagtattgttggctaaaatacctgagcaattaaaaagtgattggaaagaaaaaaagaagataatttataagttgatagagaatgtaaataaaaaatacatttctcaaaaaactattataggaattgctaacaatctaattgataaatataaatctttaacctatgaggacagatttgctcataaagatttttcatacaagcttaaagatattgattttgaagaaattgagacagccagcgtcgtgttttttggagaaaagacatggattaaaatcgatagcaaaaatgatattataaagaaggtaagtgcttattatcagagtttctttgctgataaaaaacgaaaatatattgagctaccaaccttaacaagtttaatagaagaagaatttaaaaataccagtattgaaatcgatggagaaaaattataccatcactcagttagaagaaatatgtatcccgaaccaatttatagtaaaaaatacaataaggaaatattggaagtaccgttaatagacagtattaaaaatccgatgtttaataagtcgatgagtgtattgcgtaaattaatcaaccaattaattacacaagaatatgttgacaaatatggcgtaattcaaccatatatagacgaggacaccgaaataattgttgaagttgcacgagagttaaatgataataataaacgtatagcaattgagcattatcaaaaagaacgtagagataacagagaaaaatatcgtcaatttattaatgaatttaaagacaacgaaaacagaccaagtttaaatatagaagataatattcctgtttttgaaatgtggacagaacaaacattcgaagaaactattgatgaaaaaggcaataaagtcacaaatagtaatcctcatgaaataagaaaagaaaaggatgctataaaacgatacgaactttggtctgaacaaaaaggccaatgtatgtacactggtaaaatgattggcattgcgcaacttttttcttctgatattgaaatagaacatacaatacctcgcagtttattgccggataatactatggcaaatcaaacagtttgttattcaaaatacaatagcgatattaaaaataataaaatcccttctgcttgtccgaattatgagaatagtacaaatgagggctccgcaatagaaccaagactagaaaaatggaagaaaattagagatggtttcaaaaaacaatataaagatagaacaaaaccttttggaaatgaagatgaggccaaaaaaaataaacgtattcaagataaacactattttagaatgcactttgaatattggaaagataaagtaaatagatttactactgaagaaataaaagatagttgggcaagacgacaattaacagatactcaaatggtaagcaaatatgctcgtaaatttttaaaaacatactttaaaaaagtagttgtacaaaaaggtagtacaacagcagattttagaaaaatatttgggtttcaaaacgaagataaaattaaaagtagaaataaacatacacatcatagtattgatgcggctgtattaacacttataccaacaaatagcagtaaacgagtaagtatgttaaacgccatgtatatggcacatgagaataagcaaaaaattaaaagaaaaatcccagatggtttctcaggttttaacgcacaaaagttgataaaatatattgacagcaataccttaattgtaaattacgagaaagataaaataacagaacaaacttatcgtaatataagaaaaagaggcaaattacaatatctaaaaaagaatggggaatatgttttagatcaaaatggtgatagaattcttctaaaagccaagggcacaacaattagaggtaaactatttcaagagacttttattggtaaaattagaaatgtagaaagagataaaaaaaataaacctctcagaaatgatgataattcttggaaattcagaaagggaaaagaagaatttttaaatgttgtaagaaaacccataacagaggctaaaattggggagattgttgatccagacattcaaaaacgtatccaagatcagttagagaatggagttagcagaacttatcttaaagatcatcaaggtaatattatcagacacgtaagggtaaaaacaagtacagggaaaatagtaaaagagaggttaaattataaatcaaaacatgattataaaaatgcgttttattctgctgctggagaaataccttacgctatttttataacgagccttgtaaatgccagagtagaacgtaaaatgattcctgtaccaatccacgagatagcaaaagtgtttaaagaaaatcataaattcgatattaagaattatttaaatatatttcataaagatataaaagattatcaggatattaagctattaaaagtaggacaaaaggtatttgtactaaaagaggatagtgaatttgaaaaaagaaaaaatatcgaatttcaaattaataggatgtacaagattactcagttttcagatggaaatatctggttaaaatttcatttagacgcaagagaactaaatgagatcaagaaagatgtaaaaaacaaaaaaagtgaaatcgtttttgttaaagagaaagaattgaatataccgatagtaaaggaagatgaaactatttctgataggctatcaagatctaaagattatgaagatagaatgtttaaattttcaagtattgatgattttcgtcttaataggattaaagatgtagtaggagaagaagaaactaaaaatttacgagataaattaaataaatacaaagctttttcatcaaagattgaaattgaaagagagacgccattattgaaaacttcaaaaaacaattggaattttctttttgaaaactacgattttgaaattgatattacaggtagacttaagtggattgagtccggtaatgaatcagaatttaattgaatagaaccagattaggacaaattgtaaaagttggggaatattaaaccgaaaacaattcaattcagggcttaactcaaagtcaaaccctgaatacaaaagctgaataatggaattccagaaagatcacatttaccatatttataaccagggaaataaccggcgggaaatcttctttgaacgagaaaactatttattttttctgaagaaaataaaaacttatgtttcgccttatgtcgatattttagcctggtgccttatgccaaatcattttcatttaatggttttggttaaggagctaagtttggagttacccaatagtcagggtttgactcaaagtcaagccctgactggccaaagccaagcactgactaaccgaagcctcaacaattcaatagggataatgctgcgatcatacaccagggcaattaacaaacaggaaaaactaagcggatcattatttcgaaagaatacgaaagctgaatgcattacatgtcctgaagggattgcgccatcctggtttatggagaatgggataactactttcatcaacttattacccgacgatgattatccacaagtttgctttaattacatccacaacaatccggtaaaagccaaactggttaaaaaggcagacgaatgggagttttcgtctgcaatggattataccgggttgaggaacggacagctgataaataaaaaaactgcaattgagtttggactctgactaactaa

SEQ ID NO: 3378 - DNA, 23237 bp, synthetic construct
  misc_feature 1..23237: note = Synthetic
  source 1..23237: mol_type = other DNA
tgagcccgactccgcctcgctcgaaaccttgaggtggcagccgccgcatttgccgccgcgcagaggcaccaccgcgggccattggcgcccggctacgcgatcgtaaacttttaacgcatagggcgtcgccggctcgcgggccaaggccaccgccgcctgcacctcggtcaactccgccagtaaattcaccagacgctcggacagcacggtgagcttcttttcgtgtcccgtgatgttggccttgagcgtggactcggccgccgcgaagcgaacctttgcctcatcaatgttatacatgatgccgagctcctgctcctcgaagctgcttatctgtttcaccatcgtatcgatttgatggccaagggcgtggtattcgtcgttcttcttcaccgccatctgctgggtgcggtatttgccgagcagggtttcggccgacccgatctcggtctcgatcagcttctttttcgtctccagctccttcacttcagtgcgggctgagtcaatggcggccttctcggaagcgatggccttttccaccaccgagcggtccaccggcacgaccgcgatctgttgttccaattgtcggcgacgggtgtcgcgctcctgcacaataagcaactgaaccaggacggcgtgaggcataggcctcttcgatgtcttgaggacgccgccggttcaacgctcgattctggcaaacctgaaatacacgccgttaggcgcactccgctgaccgccccgaagactcaaatgtaatacatttcctcaccagtccgcaccgccagctgcgccagggtgacctcgcgacatttttcttcaagcgccgcacgcacctcacgccaggcccgcgcaacgctctttcccgactggccctccaccgcgccacccagctccagaacatcgccttcgatgagtttaacgatatcgtagagcgacacctcctcgggccgcttcgccagtgcgtagccaccctgcttgccacgacggctcatgatcagccctccgttgcgaagctcactgaggatttgcacaaggtagttcgcaggcaccgcttcgatgcgggcgagctcctcgatgtgcgccaactccgcacgcccgtgcatgcgcgtcaactgcaccaaaacacgacacgcataatcgacttttacagagagtttcacgggaaaaaaagaggcaatcgagaatcaccgtggcggtgtgtctctcgccctgcaagcgtttgcccagtcaagatgactcctgggcgtaaatcgcccacaataagggttgtcgcgccctctagattcagatgtttttaaagattagattttaaacctgtttccccctctccaaatgcccgacgcccaagacccgcagccgccctccgaatcctacgagtttaaccctctccccgacgcctccaacgcggccgattacgactcatccaagctcggaaaactcgagggcctcgaggctgtccgcaagaagccgggcatgtatatcggcggcaccgatgagcgcgccctccaccactgcgtctccgaggttttggacaactccgtggacgagcacctcgccggccactgcaaaaaaatcgacgtcaccatccacgtggacggctccatctccattcgcgacgacggccgcggaatccccgtggacatccaccccgtttacggcattcccggcgtagagatggtgctcaccaccctccactccggcggcaaatacggccagggcggctacaagttctccggcggcacccacggcgtaggcgccaagtgtgtcaacgccgtctccgaatggttcgaagtcgaggtttcccgcggcggccacgtccaccacatgaagttcgcccagggcaaggtggtcaaaaagctcgaggtcatcggcaccgcaaccggcaccggcaccgccgtcaccttcaagcccgaccccgagatcttcaaactcaccacggtcttcgtcttcgagaccgtagccaaacgtctccgcgagctcgccttcctcaactccggcctcgagatcaactttaccgacgagcgcccggccgttcccaaggtggagaactactactacaaggacggcgtcgtcgagtttgtgaagcagctcaacaccggcaaggaagctctccatccgacccccgtgcgcatccacaaggaaatgacgaccaccctcgatgacaaacccatcgagatccacgtcgaggtcgtcctccaatacaatgacacctacaacgaccaggtcctctgctataccaacaccatccacaacccggatggcggcacgcacctctccggcttccgcagcgccctgacccgcaccatcaacaccttcgccaaggtcaataatctcctcaaggacaaggatccccagatcactggcgacgatgtgcgcgaaggcctcgccgccgtcatttcgatcaagcactccgaccccaagttcgaatcccagaccaaggtcaaactcctctcccccgaggtcgagggcatcgtcggctcgctgagctacgagggcctcacccagtatttcgaaacccaccctcaggtcggtaaacgcatcgtcgataaatccctcaacgccgcccgcgcccgcgaggccgcccgcaaagcccgcgagaccatccgcaaaggcgcactctccggcggcggcctccccggcaagcttgccgactgctccgagcgcgaccccgctttgggcgagatctacatcgtagagggcgactccgccggcggctccgccaaacagggccgcgatcgtcgcttccaggccatcctcccgctccgcggcaagttgatcaacaccgagaaggcacgcctcgacaaagtcctctccaacgaggaaatcaggaccctcatcaccgccatcggcgccggcatcggcgagggcggcgaggctataggcggcttcaacgccgacaaggcacgctatcacaaaatcatcatcatgacggacgccgacgtggacggctcccacatccgcaccctcctgctcaccttcatctatcgccagatgaaaggcctgctcgagcgcggctacatctacatcgcccagcccccgctctaccgcatcaagcgcaagaagcgtgaacaatacgtggacaacgacgagcagctcaaccgcatcctcctcgagctcggctccgaggacgtcatcctcacccgcgtccgcgacggccacatatttgcgcccgcccagatcgaccagatcgtcgagctcctctccagtctcgaaagcctcggctccggcatcacccgctacggcgctaccttgtctgattacctcgaccagcgtgatcaaaccacccacgaactgcctcgctacctggcccgcatccgcgagggcaacaaagagacccacgccttcctccgcgacgagtccgcccgtcgcgactggctcgccgagcaaaacctcgacgccaacgtcctgccaatcgccgcccccgaggtcctggacgaggccggccagcccgttcccgccgcagcgcccgccccggtcgtcaccggacgctacgcccccgccgccaagcgcatcaccctgcacgagatctacgagagctccgagatggccaagatactccgcgccctcgccgccctcagcttcgacgtgaaccacttcagcgccggcaccgaaccccgctacaccctcaccgaaaacgccggtctcaaaacagaggtcaaaaccgacctcgccaccgcactcgacatcgtcgcccagatccgcgccaacggccgcaagggcctcagcatccaacgctacaagggtctcggtgaaatgaaccccaagcagcttttcgaaaccaccatggaccccgacaagcgccgcctcctcaaggtaaacatcgccgacgccgccaaggccgacgccctgttcaccctgctcatgggcgacgaggtccccccccgccgccagttcatcgaagacaacgccctcaacgtccagttcctcgacgcctaagcgactcccccaaccaagtagccgggattcaggagtcggcattcagtaagctcacccgctgaatcagctccttctccgacttctgaattctgactcctgacctccccctctccggcatgtcctacacttccaacgaaaaactcaccaccgccaacatcaccgacatcatgcagtcggcctacatcgagtattcgatgtccgtgatcgtggcccgcgccctccccgacgcccgcgacggcctcaagcccgtccagcgccgcatcctctacgcgatgcttcgcgagggactgctccacaaccgcgccttcgataagtgcgccggcgtcgtcggcgaggttcttaaaaactaccacccccacggcgactcctccgtttacgacactctcgtgcgcctcgcccaaaactgggtcatgcgctacaccctcatcgacccccagggtaacttcggttcggtggacggcgatccgcccgccgcctaccgttacaccgagtgccgtctcaaggacgtcgccgagcacctcctcgccgacattgaggaggacaccgtggacttcgcaccgaactacaaagagtccactaccgagcccaccgtattgcccgccgcgctgcccaacctgttgatgaacggctcgaccggcatcgccgtcggcatggcgaccaacatcccgccgcacaacctccacgagctcatcgccgccatcgtcaaggtcctcgacgaaccagccaccaccaccctcgacgacctctgcggctacattcagggccccgatttccccaccggcggcgttatcgccggtcgcgaaggcatcctctcctatctcaagaccggcaagggcatcgtccgtatccgtggcaaagcccataccgaggaaatgaagggcggcggcgagcaactcgtcatcaccgagatcccctacaacgttaatcgcgccaacctcgtcatccgaattgccgagctcgtcacccaaagggagattgagggcatacgcgacgtgcgcgacgagtccgacgaacaaacccgcgtcgtcatcgagctcaagcgcggagaacaggcctcgcccatcctcaacgcgcttttccaaaagaccgccctcgaatcctccttcggcgtgaccctgctggccctcgacaagaagcgcccgaagcagatgaacatccgcgagctgatcgattgctatatcgaccaccgccgcgacgtcgtcacccgccgcacccagttccgcctgcaaaaggccctcgaccgcgcccacattctcgagggctacatcatcgccctcgataacctcgacgacttcgtcaaaatcatccgcgcctcctccaaccgcgaagaggcaaaggtgaagctgatggccaagtatccgctctccgagcgccagaccgactccatcctcgaactccgcctctaccaactcaccggcctcgagcgcggtaagatcgaggccgagtatctcgaactccaaaccctcatcgccttcctcaaggagattctggaaaacgactggcgcctgcgcgaggtcatcaagaccgagctcctcgccctcaaggaaaagttcggcgaccagcgcaagacccagatcgtcgccgccatgggcgagttccgcatggaggacgtcatccccaacgagggctgcgtcatcaccatctcccacgccggcttcatcaaacgcactccctccgccgactaccgctcccaaaaacgcggcggcaagggcgtcatcggtgcggaaacctacgaggacgatttcgtggagcatctattcaccgcctccacccacgacaccatcctcttcgttaccagtcacggccagtgtctcgcgaaaaaggtttacgagatccccgagggcgcgcgcaccaccaagggtaaatcagtcagatccttcatctcgctcgacgagggcgagaaaatcgcctccaccgtctgtttccccgagttcgcggaagaccgctatctcgtcatggcgaccaagatgggcacgatcaagaagaccgctctcgccgactacgccaactccacccgtgaggccggcctcatcggcatcaacctcgacgagggcgacatcgtaatcggctgcgtgctcaccaccggcgccgacgagctcatcctcgtctcgcaccagggcctcgccgttcgcttccgtgagaaggaccccgagaccggcgacatcctcttccgcgacaccggccgtgccaccgcaggtgtcacgggtatgcgttttaggctcccgagcgattacctcgaggtgctcgaagtcgtggatcacacctcgaaattccttgtcgccagccaggccggtcttggcgtgcgcacccgcttcgaggattaccgcctcaccgcgcgcggcgccaatggcgtttgggccatcgacctgcccgaggataattccatcaacatcgccggcgcactcagtatcaaggacaccgacgagatcatgctcctcaccgccaagggacagagcgtgcgttgcccggtgaacaccatccgcgaggtaaagcgcggtggtaaaggcgtgaaacttctgaccctcgccgagggcgacaaactcctcagcatcgccaagatcgtcgagaccgaggccgaacagctagccgccgccgactccgtcgcatccgtatcagcctcggattccacctcggccgatcaaagttccagcgaaacacccgccgccgaataataaccccattcccgccacgccacgcttcgggctggtcactggtagcgccgttttcaaaaacgcgctaccagcatggatttagacacaaaaaagccgtcgagccctgcgggctagacggctcgatcaccaaggggtttaatccttagttattgtagctgatggtgcgagcgccagcgacgccttcagcagtcacgggctgaccttgggtgaggttcgtggagtaggtctctttagcgacggtggagatgaccttcacgtattgggtggagttcgtgccgacgaggtcagcagaagcaacggtggtgacaccattctcgaggtagtattggtcagcgccggaagagagctgacgaaggttgttcgtgaccgccttgtcttgcgagttagcgcggactttttggaacgcggggatcgccatagcagccaagaggccgatgatgacgacaacgatcatgatttcgacgagggtgaagcctgagtttttacgggttttcatagtattgcgtatttatttattattgttcgctatatgcgaattggcaaaaatcatcaactaaatgtgattcgggacaagataaaagtattgtttgaaattggttcagtagaggtaaaactacattttacttggcggatttctttgccgtttttttaattttagttgttggtttagatttacttaccttaacctttgggaccggcttagcaatcggctttgatttactcgatttaacctttgagctcgttttcttggaaggtgttgcgggggcttttaccctgtcagatttaacacgctttgccgctttgcccgcacctgtaagcaccgctttacccggtgcccgctttgttttatcaatcgccttcacgtcgatctgttttgcatcacgccagagcttctccaaggcatagttttcacgctgctccgcagtgaaaaaatggatcataatctgatatgcgtccactacagtccatccactaccaaacccgccctgatccatgccggcgatctgcaccttggcggcatccaagactttttcagcctcgatacgcagcgccctgaggtgtggctcggaatttcccgtggccagcacaagataatccgtgatgttggactgggcgctaacgtgcagcaccgtgagattttccgccttcttttcctcaaaagcggagatgagactgcgcaaaagcgcgagggtttggaggtcggtatcggtggtaggcgccataaagttcaggtatagaggctgttttcctgaatgtattcaatcaccttgtccgacaccagtccctgaatgacttcaccccggcggaggcgctcacgaatcagggacgaacttatcggccagagagggccttcgacgcgatgaaccctcagaccaggaatttgcggtggagcaaccggcggatacccggggcgggagtagcacacaaactccgtaagaccgcacaatgccgcaggctccgaccagcagggcagtcgcgccaactggtcctcgcccagtatccagaagaaatcatccgacggatgccccttctttagagctcggagcgtatctacagtataactgatgccgcctcgctgtatttctatttccgatacaaatagattatcgtttccggacgtggccagacgcaacatggccgtcctatgacgaccatcggtgcgcacggcgtctgtccgcaagggagcctgggcggcggggatcagccacacctgatccagtgcgagagcctgcgccacggtgcgcgccacggcgaggtgcccgatgtgcacaggatcaaaactaccgcccataaacccgattctcatcatacactcctgcctcgcatccccgcccggctcaagcttaggagctataaccagttccggcccgtcgcctcacacgcgagttgacgcgacgcaaacgaaccccgagaacaccagaggagccgtaacaggcgtccttgccctcgtggtggaatggtagacaccagagacttaaaatctcttggccgtaaggccgtgccggttcgagtccggccgagggcaccactatgcagcgcaagtgtttacgggattttgagcgtcgagattttgggtggtgattttttgctgtgtcccgtttgtgtcccactttttcacctctgctttttcgggcacggtgcgctcaacgcgaaaccaacggagcgcgaaactggaaagatttcagatgccagtgcagtccagatgccggtgggggtggtaaacgtctttacgacttcatcgctgttgaacacagtaagccatgcgctcaacggttctatcggttttcattttttccgttttgcaacttttcgcgctggcacagacgccccccgcttcacccgttcgtaatttcaagggggttgccttcggcacgtctgcgacggtattcgccaaagcttacaagccgtcgggagaatgggggaacaatcgcctcccacccgaagcctattatgacccaggggatgccgctatccgcctaactccaccgattccgccgctaactaaacaacaaagagaggcgactttgaataccacttacccaactcgactcagtgatgcgataggggggattagttgtgaggtgacttttatctttgccgttcaatccccgacggacgttaagattttgactaaaggcatgaaccgggaggcagcgagtcgtgctctttttcgtgaagtgcgggggaaatttcagcgaggcgaattcgctcaaatgctccaaggtgtaaccaccaaatacggtgaaccgacagtagccgacacggaatttggccggtttgagtggcgagtggaatcacttcatattttattgcgttacagagatagagattcgcccagctattcatccatcagcatcatagatacgcttgtcccgtctctcgccgggaaggtcgcagccagtgatatgtgaaaacgccccgccccggcgcgaagtcttctttgtcgagccgggcaagatcggactcggcaggggctatcatggcgcggcgggtgtccgcttcgtagtgcttggtaagggttgcgcctagtgcctcgcgcttggcgaagtattgaggcagcggcaggaaggggcggtttcgtcggatcgcgactttccacagtttagactgagcaagtttgcgagttgtagagccattttgggttcgggttttgaggaatagtttttttgagaacgacgcggtggcggtgatgagtcgaaaaacttaaacacccccccgcctcggttgagtagccttccgggggtttgggtggcatggggaaagacggcggcacggtttgcccgcaggaggcggcggaatcactatggagaatcacgtccatgcacccctaattgtttgcatcgagactatgcttagattggcatcgggttatgtcacaagtaaccggtttacccttggttttggcatttgatctcggcaagggctcaattggtgaagccgtccgacttgggaacgattttgtccatgtggcctcatggctcataccccaagatctcgcggcgcgcgggccatctgcgaaaccaggcacgccggcttcccgctatcgagcttggcgcacccgcgttgctcatcgcgaacgcgaaaacgccctgcgtcgcatttgcgccgacgccggtatcgaagtgctcgcggccaaacgcgtcgcccgtgacgccgcagacaagaaaaaatggatcgtggtcagcaaggccgatgaacgcctcacccgcgaattccccaaaaaaggcgactccacttgttacaactccgctctgttgcgcatccaactcttgcgcggcgtgaagttggagggctggcaggtgttcaaggccctgcatgctgccattcagcggcgcggttacgataacgccgtcccctggaaacatcgcgcggttcgtgatacggaaactgaagaagatggcatcacccagcaacgcgccgactcctactgcctcgcccttgagcagatggctccaaataaacccgaatgccaactgccctcctatcttgatgcgcatcgtctcggtctttgggacgcgagtcgtcccgacgaatatatcctgcgcatcgaccatcatgtcgctcccgctcgcaatcgcgagcatcccgacaacacgcccatcgtcgccccgcgtgaactggtcatcaaagaaacccgtgcgctgctcactgccgcagccaagtttttccccaagctcgccggtcgggaagacgagattcttttcggccgtggcggcaaagcctacgcctcctacttcgacgacgttcgccgcgcgcatagcctgcgccttggcggtgccaatgattgggacggcatcctcggccaaaaagttccacgattcgacaatcgcatcatcgccaagtgcgcgctcatcccccggctcaacgtctgcaaagcgacgacacgcaaggacaagactggcgcgatcatttcagagtcactgctgccctccgaggtcacgtttcttttcaagctcaagaacgtccgcgtgcagcggcctgacaaatctatcaccgggcttaagcccgatgaaattcgcacgctgtttaatgatccgaaacgcgaaccggaaaaactcagctacacgaaaaagcaatggagcaaagagatagctcggttcggctgcgaagcggctgcgggtcatgaagaaattgccgcgcccagcttcggcggacgcagccgtttctgccgtcccgcgctggagattcttaaaaaactgatcctttccggggagagtccggccactgcccattcccgtgaacttgccgagcgcgtcaagggcaacaccaacccgcagcaagggctggtcgtttcggacttggatttcctttcgcctgcccgcatcggcgagacatgggatggcattcatgtggccgaccaacagcacggcgcactcctccggctcgccgccgagcaaggtccggaagtcgccattcgcgcgcttatcggcaaggtaaataacccggttgttcgccatcgtctggaggcgttctggggtcggctgcgcgccatcgaagccgatcttaagaagcgcttcggacgcggtcccgacgagatcgctatcgaattcatccgcaccgatttcatggggccaaaggccaaactggctctcgccaagttccaaagcgaacgcgccgaagctcgcgaggacgcgcgcgctcaagtcggcaaaatcggagccgatggccgcgcttcgccgctcaaatatgaactatggaaagcccagggtggcatctgcctttttgtcggcgagagtctcgcgcccaccgacatcgaatcactggaaattgagcacatcgtgccgcgctcacaaggtggttcggatgcgttcataaactacgtcgtgaccacgaaggccacgaacaaactcaaagacaaccgcaccccctatgcttggtttgaagcaaacgggttcactggctgggatgcctacgtgaaacgcgtcgaagcctgcgctaccgccctgcgtaacaaaaaggtgcgtctactcaccgctcccgacgccatcgaattagtcgaacgttacaccgcacttgctgaaaccgcctacatcgcccgtctcgcgcaaactgtggccgcgttgcattttggctggccgatcaacagccagcccggcgagcgccgcatcactatcgtcaacggcggcctcacggctcgcgtgcgccgaaactaccgccttaactcgctgctcaatccctgccccactggaaaagaccagaaagaatgggaggaagacgcagacgtggagaagaaccgcaaggacgaccgtcaccacgccctcgatgcgatggtcatctccttcattcctgcctggacccgcgatccgaagaaagaaaagttcttccgcctgccggatggcgtgacaccggagacgttccaagaacggttggaggaagtcttgccgcgacagcttcactacgaacggtcagaacttgaagcgacggcattcggacaacgcacgttgggaggaaaactatacggcgtggctcgtgtggacttctgtaatctggtggtgaaggtcgcgttaaacggcaaccgttcgctaaacatcaagcctgatggatcaggcgaagcggacactatagtcgatcaggctattcgccgcgatgttcaggcgttcatagatcaaaaccgcgccacgattactttggctatttgggatgcatgggtgagtagctaccataggggaggatcgaatggcccactggtcaaaaaagtcttagtcaccatcaccaatcccgactcgctggaggaatacgcagatcttgccaaagatcaaagcggtcagcttcgcagagggaaaaagcacaagggctactggattttgcgcattctaagtcccaccaaaaaagacccaaccaaaacgaccctgcaagtgagacctatttatgcacatgccaatcctcatgcgcttaaagcagaaattggggaagatcacggatgtgagatcatactcgaacttgaatcaggctgtttagttcaaatcgacaagccgatagcccacgcgaaaacgccgttagccgcaggaatctacaaattgaactctgtgtggacgcaggggaatgtcgtcgtctcaagccagtcgggggtgacttccgcccctattggtctggccaagttcatcgaagccggcctgcgccgcctaaagtaatgctatgagccaccacatcctgcatgttctcaccccgttctgcacgttggccaaggagcgtggttttattgtctgccgtcagcaaaatcatcaggaacgacgcctgccatatgatgacgtccgcgccgtcattatcgccgcgcgcggcgtcaacctgacgtcgtcttttatgaccgcgctacttgaaagcaacgcgatcatccttcactgcgatgagagttaccaaccgtgcggcatcaccgcgccgctttctcgggtgaccgaccgtgaagcgtttcttcgccaagcatcgcgccccaagcgcctcaacgaaaacctctggcagactttgctgcggggaaagacggtcaaccaacaacacgtcctaacccgccaggaacacccaagtccgcacctcgcccgcgcgcttgatctggatttgttcgacgagggcaactgcgccaagcgttactggcagctctactttcccgccatcggctgggtttccaccaaacgcgagcggcgcgaagattcgccgccgaaccagatgctcaattacggatacgctgtgctctcggcgctgtgccatcgcagtttggttctctacggtctgtcaccgcagttgggtgtaaaacacaccacccgttacaagagcgatcccttggtttacgatctaatggagcccttccgccccgtggtagatttattgctggccgagttcatggtgggcgaggacgtgagctttcgttcttgggcacgcaagattggtggcgatttgcgtgaacgtcgggtgcaacacgaacgctacaccttgaagttgatggacgcgattgacgcctcggcctgctcgcttgcacgcagctatgcagaaaactcggcgaaacccttctgggttcccgaactccccaccctcactaaggctgcgtgagatcaagcgccttcagtatgggctgggttctcgtcatgttcgatcttcctgtcggctcggaggaacaacggcacacggcgacccattttcgcaaggggttgcttgatgctggctatctgatgattcagttttcggtttatgcgcgcccctgcgtgagttttgacagcctggaaagtcacacgaagcttctggagaaaacggttccgtcggccggtaacgtgcgagtgatgttttttaccgatcagcaatgggcgcgtgcctttaccgtgaccggtcccaattacaaccaaggcaatcgcgtgattgatccgacgatgccccaacaggtcgagttctgggaatagaaaaaggaagcgccgaccaagacgtgcgaggcagagatctggtcggcgctgtatcagttaagacttcccccccctgagaggtcggacttaagagaactaaactgcttaaaaagaacttggtcggcaagacctattatgtccgacctctcaggggggggaagtcgaaacaacattgcgcatcacggttacgtcattaggattatgtccgacctctcagggggggaagtcgaaacactagtttttgtgagttgatcgaccacgttattatgtccgacctctcaggggggggaagtcgaaacaactcgtaaacaccagtctcggcgtcgtaaattatgtccgacctctcaggggggggaagtcgaaactttgtccacgtgattgcttcgcgcaaagctattatgtccgacctctcaggggggggaagtcgaaacctctcatccgagcgggtggatctgctaggaattatgtccgacctctcaggggggggaagtcgaaacagcgcagcgtgctcaaagacttggaaggtgattatgtccgacctctcaggggggggaagtcgaaacccattaggtgtgacggtgtttgccttgatgattatgtccgacctctcaggggggggaagtcgaaaccagattcgcccacgatgcgtctgaacacccattatgtccgacctctcaggggggggaagtcgaaacactatagcacaattagacatggcttgcctgattatgtccgacctctcaggggggggaagtcgaaactcgcctccattttggccgccgttgccgcttattatgtccgacctctcaggggggggaagtcgaaacctcaactctggccgtgatgccaccgagtttattatgtccgacctctcaggggggggaagtcgaaacaaacaattaaaatgaccaaaacccaaccagattatgtccgacctctcaggggggggaagtcgaaaccgtcacccgtgtttatgcgtgcggcgggcattatgtccgacctctcagggggggggaagtcgaaactggctcgcttgttacagggtcgtgcgcgccattatgtccgacctctcaggggggggaagtcgaaacacgtgacacgttgcggacacgtcacgttcaattatgtccgacctctcaggggggggaagtcgaaacataggcagcgcactcggctgcggctgcggcattatgtccgacctctcaggggggggaagtcgaaactgcaattacggtgagtttctcggcacatatattatgtccgacctctcaggggggggaagtcgaaaccagtccgtaacacggaaaaacacggctaagattatgtccgacctctcaggggggggaagtcgaaacttggttaattccatctccaacggttatttgattatgtccgacctctcaggggggggggaagtcgaaactcgcgatcggcgaggagctgggcatcggcgattatgtccgacctctcaggggggggaagtcgaaacacgccatcgagtatgtcgtcggcgaggtatattatgtccgacctctcagggggggggaagtcgaaaccgtgatgatgctggtgccgacctctggcgattatgtccgacctctcagggggggggagtcgaaaccactgagaagctgctcccctggcaggagacattatgtccgacctctcaggggggggaagtcgaaacatgctccaagcgagccgttttcaaatatcaattatgtccgacctctcagggggggaagtcgaaactatcgccgacaatgcgccactggcgggcagattatgtccgacctctcaggggggggaagtcgaaacgatggtgaataatctttgaacttaggttctattatgtccgacctctcagggggggggaagtcgaaacaacgtgtcaagttcctgctctcgtaggatattatgtccgacctctaagggggggaagtcgaaacagcggtggtgggaacttaaatggtgggggcattatgtccgacctctcaggggggggaagtcgaaacaggcttttgtcagcaccgttccagtatcgcattatgtccgacctccgcaggggtgcggagggtgcggagggtcacttttcccaaaccgtttccctatactatattttcccctgttttcttccttcacctataaattgaagattttgaccctccgcaccctccgcagggggtgggctcggcttgtgcggaggagggtgcggagggtcggtttttgcggttggtctccctgttcaaagcaaatcctcccgctcaaccgtccaacaagcgcgggcgcggttggcgtctcgtccgccttcgcgtcgcgtcgtctttctcaaccggccgcgccactccgccgactcggcgagttttgccagcatccggccaaggtgtttcgggccggtgcaaatccggtgccgagcgagccctcccggcgtcgagacgtccaaggcggtgtaaaggtcaaccgtcggcagttcaacgtgggcgacctcgtccccccatccttcaatccagctttccaaggcgtcacaaaagggccgcagggggtcgccctcgcgcagcaagtcgagaacggcggggtggtgccactccgtcaccccgaaccgccccttgctgagtgcgggcggaatcgcgaacgagtccacagcggcgaggaacgccgggagatcggcacgcaatgcagccgcgaagccctcccgcgccgcgtcgtcgtcggcgttgaagaaagggcggggcggtaagtagcatttaagataaatgattttgtccccgaaagccccgtccaaggtggggaggttgcttgcgctttcggcgtcgtcatttgccgagagggtgacgcgccaaacggggcggaaggtgagggcgtcgcgcccctttgggtgcaatggatagccgggcgaggcgacaactctcttcagttcgtcccgtagggtggcacgctgtgcgccggtgaggtcaagcgacttgtccgaaagcgcgaggtgttccgccccccagaggtcggcgttgaaggtcgtttgacccgtgaagaaaagcccagggtcaacctcccgcccgccgagagcgggggtgataagctgcgattgaagcagacttttgccacagtcgggcgggccaaccagggcgaggacttggccggggcggtgctcggttgggtttgccaacgcgacgcgagcgacccgcagccaagaaaagaaaatggcgcgttgagtctccgcgtgggggtcgcctgccgagcgtccgaaaagatcggcgacaaaggaagcaatgcgcccccactcgcccgcagcgggtgcgatgggtgacgcgccacgggtgacaagcacgcgaagtccgttttcatggtgaagcccgacagggcgaccacaaagcgggccggagtagtcaacgcggttgcggtgttggagttcgtgaagccgcgaatcgcacggggcggggtcgccggccttggacaagcccagcgtgttaaggtgaagccgggcgtcctcacggcacagcttgccaaacgcgccgtgccgttcgcgtcgccaataggcggagccgtcgaaatacaagggagccgctcccgtctcgccgtcgagttcggcgagggcgtgccccgcctcccgctcgcgctcggcgtcggcgtgcgcccggacggcggcgcggaaggtgacttttgcatagccgagcatatcacgggcgactttctccacgtcggcgaaggcgaagggatcagcgtcgagagcagcggcgagatggacaagccgcgcccgtgcctcgtcccggtgggtggggtcaagcccacgccgagcagcgtcgagattgcttgtgagcaggtgagcagccaatgcggggcggggcttgctcggctcggcgtcgagagcggaaacccatgcggcggcgagtcccgccccccacgtctcggcggggaaccactcgcgagcgtccgcccccgctttgattgaggcgaccgcgtcgggggcgtgttgcttggcgatgaagtaaagcgagccggtgccgacgcgccgcagccggtgccgggctttctcgcgatactcgccggcccgttcctccgggctccattttgcgagggcttccgtccccgcctcaatgccgagagcgtcccaaacggcggaagcaattttgagccattccccgtaatccgggcggggaggtatgcagccgagcaacgcagcgacggtctcggcgtcgggcttgcccccgcccccctgccgggtctcggcttcgtccaaggtgtcggcggtgtccgcagcatggggggcggcggtgcctcccgtgccgttgaccgtgtccgaaagcggcagcgggtgggcgtctccattcacgaacgccgacgggtcaaacgagacgaagcacagccgagcaacgtctttgccgctctcgtccaggaacgcgccacagtcgggggcgaggcggagaacgtgcgccttcgcgtcggcgaaggtctcggcatgggtgcgacccggtgccgagcggtaaacgattttaagccccgtccccgtaggggagaggaaggcggcgacggtgtgcttgtcgccttcaatggcggagcggagcggcgcgagccggtcgccgaggtggtcaaggtcaacgacgataagccccgacggggtcaaaagaccttgctcggcgcggtgggtaaacgtccccgcagcggtgaatccgaggagttttttcttgagagggcgggcggctttgcttccgtcggcgtaagcacggcggacgcgttcaatggcggcgcggtgtgtgccggtctttatctcgtccaaaatagccgagagcgggcgggcgttagtcggcgcggtggcggtcgcgctcgcgaaataggaaacggaagtctgaagggtgtcgggtgccttcatttcgcgaccctcccggccacaagagcgcgaacgctcgattcagaatagcgaatgacccgttcgtttatgcggacggctcgaatctttccggcacgggcgagccgcaaggcggcgtgtcctgttttgcaagcgttgccggtgagttcgtaaacgcctctgaaggtcaaaagcctatccgcttgggcggtggcggtggtgtcctcatttgagccggaggcggcttgtttttgcgtaaggtttggtttcattgcgtcccctagcgaacggaagcgcgcagaaagagggacgggcggttaaatcatttaatgtccgcttttctcggcggtctcccgcgccgcaggttcacgccaaacttttccaccaaacggccaagggttcgttcgtcgggtgcgccccctttgcctagtttgtcccgtgcgggccatgccgcgccgtcgagaatggccgcacaggtgaagcgatgcgtcggcggtttgctccgcacgaagtcgagaaaagcggcttcagtctccgaccgggcaaccggccaagctccgccccgttctcgcttcaccacgtcggcgaagtattcgaggaaggcggggttcccgctttggattgcagcgagcagccgaggggcggcgaggtcgcgcagcatggcgagggcgcgagcctcggcacgggcggcggcgggcgagcccttcgcgggcggagcggtgcgcgggggcggagcgtccccccacgcggcggcgggcggttggtttaacgtgagccaaacttgttcaacgatgccagccgcagcggtgccggtctcggcaacgtgtgccgagcccttgccgtgccgtgctcggctcgcgttttcgtccaaggtcgcgccctccctcgcctcgcttgtccgggctcccgtagggcgaccgcgcccgctcggcttcaatagggctttaatctttttgagccgagcggaagcggtcgcccgttcgttttcgtccccgccctttgcggcggcttcgagatcggccaaggcggaagcaaggggcgaccgtgtcgcgtgtttcgtcttcattttgcgcccttctttttggcggcgagatccaccacggcggagccggtcgagacgtagcttgcggcggtggtggcaacggtcgagtgccctaggtggcggcgggcggcttcgagaccggcgacagcgtaaacgaaactgcccgacagcttgcggagggcgtgcaaaggcgtgatgtccgccatgccttgcgttttgagccatgcggtgagcggtgcccacgcctcggcgcggtattcgtaaccgtaagcggcaagcctcggtgcggatccgttgagcacgaaggcggcggcgggctcggctttgcggcgagccttcaaccgcttcaccacgtcgggcggcaagggcacggtgcggaaagactctttgcttttcggccggaagtgctcggtgacgtcgattcgcacggttccggcggcgaggtcaacgtgtgcccacggcagggcgtcggcttcaccacggcggagaccggcgcaaagtagcaggtcgaaggcggtgcgggtgtcggggtcgagaccggcggcggcggcatagagtttgcgcggatccagctcgcaaacaaagcggcgggtggtggcggtggcggcgatgccttcaaacggcaacggtgagggcaaggtgagcgtctttcctacctcggcaacgattgccttggagaacagggcgcgggcgttgcggaggtgacttgccagcgtgtgcgcacggtggtctttcgccacctctccgccctcggcacgggcggcgtcgagatcctttttctgccaagccctaacgtcggcgggggtgatttggtcgaggcgcacggcgtcaactttcgccgcccacgcgaggcggtcggctcgcttgtcggacttcgaggcaatgccgcgcacgcctgcaatcactcggcgcaagcaggtctgatacttcgacaggacaacagggcgcacggtcgcaaccgcctttgcggcggcgacgtagtcggcgaaggtgcaagccttgtccgccttcgcttccgccttggggtgaaactcggcaagtgcgacgtcgagacctttggacttcacgtttaaccagagtgcgcgggctttaccggcggcgtctgctttgttggcggtgtcgaggcaaacccaggtatcgcgcccctcgtcccgaaaacggacgtaaagctcggcggtcggcacgccgcgaacgacacgcggggagaccttgtttttccaatactcaatggacgatttggcggcgcggtcgggctctctttcggtcttcgcaaggtcggcggggaaacgggacacaacggaagtgtgtcccgcttgtgtcccacttttttcgttctcaacgtgttttttggcttcgcttgtgttcgttctcatgtttggtaagttgcttgtaagtaagttaaaagtaaatgctttagcgcacaattacgaaaacttgcgaatagacaatgtaacgacttaaaatctcttggccgtaaggccgtgccggttcgagtccggccgagggcaccactttgcaatccgatgaggagtatgtgacagctggtcgtcacttggaaacacatcactttagggagagtttctaataggcttttctcgcgtctgcccccacattggcgcaagctgatttgcaataaattcggcatataagtccccgcaccgttcgaacggtgacctcggattttcctgccaacttaaatctcccctccttacagtcccgccacccgaaactacatggaccacgttccgataagcgtttttctggcccctctttttctactatttgagggattgcagctggttgctgcggaaaaattactcgggatcaagcagatcgaatcgggtttagtggaacgcgataaagtccccggtgaggccgtcgcagtcttttggtcactcggtatcatcgccgaggccgcctggtgtctttggctgctcgccaacgatatcacacgtgttcacgccgggtgcgtgctactgatcagcctatttggtttttccatgcgcaatagctgccggctcaagtgggtgctagtaatcatgaccatcgagggcgcttgccggatggggctgatggtctcgatgctgggaagtgcgtggagaaacctataacccatagcactggagatttttataaaatattaataaaattaaaaagccaatgccgtggcccgagatttcaatcccttcacccaatcacgccgtcaccccgccgcacgagcgaatcggtgtttgttttcaccacacggtgataccctttggcgaaacactggcgctcatgcagacgaccgcaagccgcgtaagctaccatgtggtcatctccacggacggcacccgggcccggctggtggccgatcatcacgtcgcctggcacgccggcgtatccagtttcaagggacgaaatgccgccaatgcttttttactcggtatagcctttgccggggacaccagaaaggacccgctcaccgcatcgcaaattgcctccgccttggaatggatgggaccgcgctggtcaaaataccgatggacgcttgaatggataaccgaccaccgacaggtcgctccgaatcgcaaggacgatcttaagccagacgaatgggcacgattgcttcaagctatccggtcgcacttcgtttaaacaaagagggccatgtccacccttcgtaaaccagcctaaacctgtgtcttgaaatacgcgatagtgcgcttcaagccctcttcgagcggcacctgcggcgcccaattatcgaggtgtttttgggctagagtgatgtcggggcggcgttgcttgggatcgtcgccgggcaagggacggtgaacgatcttcgatttactgccggtgagcttaagcgtgagttcggccagttccag

SEQ ID NO: 3379 - DNA, 23213 bp, synthetic construct
  source 1..23213: mol_type = other DNA
  misc_feature 1..23213: note = Synthetic
gctgggcgcggacctggcggatgcgctggaggccgctctggacggtgaggctgttggtgaggccgtgggtgacgagctcggccagcacggggtcgccgagcttctgccaccagtcggcgagctggtcgaggtcgccgctggccgtgtcgccgagcagggattggggttcgtcgaggtgcgggcgctcgtaatcgggcccgagcttgcacccagcgaacaggagcaggaggagcggtgccgttgtaaggtagcgcacggcgtcccgccgtgcgctacctttttgatagtaggctttcagcctacaaatcaaacgtgccgtcaacgtagggcgttgccctacgctattgatttcagggcgttgccctgatggccagaaagatgtcaaacctgccttcatacctgtaccactatttctggaacgcctcatcgtgaccacaaaccactttccgcctcttcgctcacgcctaacgcggcctcggtctcctctgaccactgaccactagccactaaccactgatcactaatcactgaccactgaccacttgacttacgcatagcgtttctcctcttcttgcagctcgtgctctttggcgtgggggggcttctgccatttggcgaggagcaggtaggcggtcggcacgacgatgagggtgaggaagcacgcgctcgtgccgccgtacacgacgaccgcgccgaggcagcggcggctggcggcgcccgcgccttgcgcgagcagcaggggtatcgcgccgaacacggtggagatgcccgtcatcaggatggggcgcaggcgcaggcacgatgcgtcgatgagcgctttgcggaactcgacgccttcgtcgcgcagctggttggcgaactcgacgatgaggatgccgttcttcgccgccaagccgatgagcatgatgatgccgatctggctgtagatgttcatggtcgcgcccgtgaaccacagccctgcgagcgcgccgatcatcccgagcggcacggtgagcaggacgatgagcgggctgatgaagctctcgaactgcgccgccagcacgaggtaggcgatcagcagcgcgagcgcgaacacgaacatcatcgagccggaggtgtccatgaagtccttggactgccctttgtagcccagctgcttttcgggggggagctcgtcgtcggcggttttcttgaggaactccagcacctgcccgaggctgtagcccggggcggcgttgcccgtgatcgtgatggcgcggacgcggttgaagcggttgagcgtcgcggcatcgccgacctccttgatggtgacgaggttgtccagcggcacgggggtgccggtggtcttggagcgcacgtagatgttcgccagatccgtgggggagccgcgctggtcgagcgtcgcctgaagcatgacgtcgtactccttgccgcgatccacgaaggtggtgacgcgcttagagcccagcagtatctccatcgccgcgccgacggcactggcggggacgccgagctcggcggcgcgctcgctgttaatctgcacgtggaactgcggcgtggtctctttgtagtcgtagttgacgtccacgaagccggggtagctcttaatcttcgccatcatggtgtcgcgccactccacgagatccttgtagtccggtccgccgatgacgaactggacgggtttcccgcgcgtgccgataccggcgggcagatccggcagcacgcgcgcgcccggcatcttgccctgcccgagcagctggcgcaattcctccacgaccatcttgctcgtgcgcgaacgctcgcgccacggggtgaagtccagaatcaggcgcgcgctgttcaccggaccgttcgcgccgctgatgtacatcggcaggatgaggatgccggacttgaactcgtgatcctcgaacacggaggacgtgacgggcgcgagctccttcatcatgtcgctcatcgcgtagaagcccgtgccctcgggcgcctccacctgcacgaagaacacgccgcggtcctcgaacggctcgaactccgccgggatcacccgccagccccacgccacgaacaggcacaccaccgcgaagaagagcgtcgtgaaaatcttcaccttcgtgatgccccccagcaccacgcggtagccccgctccatccacgccatcgtccagtccaccgcccgccccaccagcgacccctccgtcgccccgctcttcagcagccgcgaacacagcagcggcgtcagcgtcagcgccacgaggctcgagaagcacaccgccgcgctcatcgccaccgcgaactccgtgaacatcttccccgtcttgcccttccacaggctgatcggcaggaacaccgccaccagcaccgccgtcgtcgaaatcaccgccaacagcacctgcgacgcgccccgcgccgacgccgtgagcggcggctcgccctccccgatgcgccgatgcacgttctccagcaccacgatcgcgtcgtccaccaccataccgatcgacagcaccagcgccagcagcgtcaggatgttgatgctgaacccgcacaggttcagcaccgtgaacgacgacaccagcgcgatcggcaccgtcatcgccgggatcagcgacgcgcgcaagtcccccaggaacatgaacagcgtcagcaccaccagcaccgccgacaccagcagcgacgccttcacctccttgatcgactcattgatgaacagcgcctcgtcgcggcggatgaacatgctcatcccctccggcagcgtcttgttgaactcctccaccagctggatcgcgcccttcgagatgaccagcgcgttgcccttcgactgccggtagatacccagccccaccgacgcctccccgtcattgatcgcccccgactgcccgaaatacgcatactgcgagcgcgtcagcttcggctccagccgcacgtccgcgacatcccccatgcggatgaagtccccgttcgcctgccgcttcaccaccagccggctgaaatcctccgccgtgaaatactgccgcgccacccgcaccgtgaactcacgctccaccgactcgatgcgccccgccgggtactccatgttctccgccagtagcgccgactcaatgtcctccaccgtgacgccccgcgccgccatcgacgccggcttcagccagatgcgcatggactgctcctgcccgccgaagatcgtcacattcgccaccccgtccagcaccgagaaccgatccttgaaataacggtccgcataatccgtcagctgcatccgcgtcatcaccgtgctcgtcagccccacgatcacgctcgccatacccgacgagtcatacttcgccacaatcggcgtgtccgcctcatccggcagcaggtgcaggatgcgcgagacgcggtcgcgcacgtcattcgccgccgcgtcgatgtcccgcttcaccgagaactccagcatcacgctcgactccccgtccttgctgctcgactcaatcatctccagcccgtcgatgcccgcgatggtgtcctcgatccgctgcgtgattttgctctcgatgacgctcgcgctcgcccccgcgtaaaacgtccgtatcgacaccgtcggaatatcgatgtccgggtactcccgcaccgtcagccgttgcaacgaaatcagcccgaacacgatcagcaggaacaccagcaccagcgtcgccaccgggcgcaccacagaaaagcggcagatgttcattcagccttcccctcctgcgccgggagccgctcccccacgaccaccctctgcccgtccgacaccacgctaattccctccgtcacaatccgcaccccacgcgcgacaccctccgtcacctccgcccagcgccccacgcgccgccccagcttcacctccgcccgcgccaccttgtccgacccctccggcaccgtgaacaggaactgcttctcccccaaactcaccagcgccgcctccggcaccaccgtcacctccgccacccccgtgctcagcgacacattcagcagcatccccggcttgatccggtgccccgcgttatccaccaccccccgcacctgcacgctccgcgtcagcgcgttcacctgcggctcgaccatcttgataaccccctcgaacgtcacgcccggatacgcctcattcaccgccgtgaacgcctgccccgcggacagtttcgccgcatacttctccggcgccgagaaatccacatacaccgtgtcgatgtcgatgagcgtcgcgatcggcgtccccgggctcaccaagtcccccaggctcaccagccgcagccccagcacccccgcgaacggcgccttgaccacgcggtacgcctgctccgtctccacccgcagcttctccgcccgcgccagctccagccgcgtctcgcggtcatccaggtccttctgcggcaccgcattgccctgcaccagccgcgccagccgctcccgctcccgcgcatgctccgcgatcgccagttccgccgccagcatcgccacggcctcccgcgcgccgtccagctccaccagcacgtccccccgcttgacggcctgcccgtcctcgaaatggatcttcgtgattttctccgccacctgcgccgtgacgaccaccgactcccgcgcctgcgccgtgccgatgcggtccagcgtgtcatccatctccaccgccccgaccttctccacatagaccgtcggcggcgggcgctcgcccttcgccgaacccgcccgcgtcggctccgtatggatcaccagccgcaccgcccacaccagcagccccaccccgatgacaatctccagaatccacttaacccacttcatgccgtccccttctcttctgccccgccgcctcccgcgcggcaacgcacccaaaacccctgattggaaataatcaaataaaataccaaaaaccgttcgcgagataaacacttttcgacagtccccgtatttttttttgccccccatccaacgacaagttatagctatttcacgatggagggcgagcgtccccgcgagccgtcagccccattggccgcacaccgcgccaacggggacccctgtctcgcccgcctctataaacctagctcgcccgtgcggaaagccgtggggggctggaggccgaggcgggtgtaacaggcggcggtggcgaggcggcctttgggcgtgcgctcgaggtagccctcctgtatcaggtacggctcatagacctcctcgatggtgtccggctcctcgccgacggagaccgcgatggtgttgaggccgacggggccgccgccgaacttgtgcacgagcgtctccaggatgcggatgtccatctcgtccagcccgcgcgggtcaatctccaagagcgcgagggcctcggcggcgacgggctgggtgatgtggttgtccgcgcggacctgcgcgaagtcgcgcacgcggcgcaggaggttgttggcgatgcgcggggtgccgcgcgagcgggcggcgatctcgtgcgcaccatccgagtcgatgctgacctcgagcttgcccgcggagcgttcgacgatggtgcgcaggtcgtccgcgccgtagtagtcgaggcggttgacgatgccgaagcgcgagcgcaggggcgcggagatcaggccgctgcgcgtggtcgcgccgacgagcgtgaagcgcggcagctccaggcgcacggaacgcgcgttcgggccttggtcgatcatgatgtcgatcacgaagtcctccatggccgagtagaggtattcctccacggtgcgctgcatacggtggatctcgtcgatgaacacgatgtcgccggtggagaggctggtcaagagtccggcgaggtcgccgggcttgtcgatgacggggccggaggtggtcttgacgttcacgcccatggcctcgccgatgatgaaggcgagggtggtcttgcccaggccgggcgggccggagagcaggacgtggtcgagcgcctcctgccgctggcgcgcggcctcgacggcgagcaggaggcggtcgcggattttctgctggccgacgaagtcgtcgaagcgcgtcgggcgcaggcggttgtcgaacgatgcgttgcgctggttgaaggcgtctgtcgagtgggtctgcatgggttatcgggcgttggtgattttctcgatgagcggggcgagcttctcgatgacgacggagcgtcccgcggtctgccgctgggcgttctccggcgagccgaagatgccgccggcacagcagaggatgacgatgatcacggcgctgatgccgccgaatacaccgccgaggatgcggtcgaagagcttgggcaggatgaggctgatgctgtgcgccagcagtttgcgcgacagcagccagagcgcgatggccgcgacggcgatcaggatgagcgcgatgaagcggctcgcctgcgggtagtcggccatgaacctgatggccttcagcttgcccatgagcggcgagaagccgaagaggcagaacagcgccatcgcgcaggtggagagcagcccgctcagttctccggacgcgccgcgcacgaagccgcgcacgacgaggaacagcacggccagcaggacgagcccgtcaatccagccgatacctttcacggtgttcaggaggttctgcatcgtgtgaccgccgcgctattttttcttgagtgtgttgacccacttctcaaactccgcgcggtcggggctgtccttcgggatgagcgagaggtagaactcgccatacgcggcggcctccagcccgttgcgcttcgcggccgcggcctgcgccatcaaccgggccgtctcgggattgttcgggctgcgcgcaagggccttggtcagcaaccgcaccgcctcgtccggctgccgcagctgcagcgccatgtccgccgccttggcgtagctgtcctgatgcgtcgggttgatgtcgatggcgatcttgaacgtctccagcgcctccgcgcggttgccctgctggcgatagagcgaggcgagcccgtatgccgcgctgaacgtcagcgggtcagcctccagcgcgtccttgtacgccttgacggcccgcgagtgctgccgggcgatgtgcgcgttcacggcctcctgtagcaggacccccgcgcgcgtggcgttccgctggggggcagggcgtgccgcggccatgcgatcgaggtttgtgcgcagacggttgatgcggttctccaccttatcgcgcttcttgtccttcgcgtcggccgtgcccatgaacagcttgaaattgtcgaacgcctcctccttcaaatcgtactggtcctgatagaggaccgaaaggttatagcgggccggcgcgtggctgaaattcatcttcagcgcgcgcagatagtacaggtgcgcgaggctgtagttctggttggacgcctgcaccgcgcccatcgccgtcagcaggcgcacggccgtgccgtcgtccggcgagaccgcgagcgcatgctccagcgcggccagcgcggccttgaaatcctttaggtgatacgctgcttgcgccagcccccccaagatgttggcctcgttctcgacggggctcaggttcagcgccgcctcgaacgcgtcgcgcgcgtccttgacgtcgccgtgcgccaaatatgccaaccccaggtgataatacaactctggcgagctggtgatgcgctccgttgccgcagtgaaatagcggatggccttctcgtggttgccatccttgaaagccgccatgcccttcttcgcgtcgctcagccccgagcgcgacccgcacccgcagaccagcgcaacggcgcacaggaaaacaaatgaaatccgtgtcatacgtcagcactcccaaacccaaggttaccgcaggaacagtcgtcctgcacagcggacaatcctatcctgcccaaaaatagaaaccattattatactcctttttcgcccctcccgccatgcaaaactgtaaaggattttttacccgtcagcgcggcggcgacgcgccgtaaatgacgccgtaatcttttttgttgcgggcggactggtattccttcatggcattgggcatggcctcttggaggtcgcggatgcgggcctcgccgccggggtgggtcgagagccagctcgccagcgcggactgcgagccgcccgtgccgaacttctgccagaacgtcagcgcggcctgcgggttgtagcccgcgcgcgccatcaggataagccccatcgcgtcggcctccgtctcgttgctgcggctgaacggcagcatgacgcccacgtcggtcgtcagcccgtagagcgcggcgacggtctcgctctggtttccgtagagcagccccatcaggccgagcgactgcacttgcgcccacgacatgcgctcgccgccgtgacgcgccagcgcgtgcgcgacctcgtgcgcgacgacgcacgcgagctccgcgtcgttcgacatatagttgaagatgccggaatagaccgccaccttgccgccgggcaggcagaaggcattaggctccgggctgtccagcaccgtgaactcccacgcgaagctgtcctgccccgccacgcccttgattgcctcgccgacgcgcttgagcgcctgcgtgtgcgcctggttcgcggaggccttgtacttctgcttgtattcgccgaacgtctccgcgccgaggctgttctcgtacccctcgctggagagcatcagctgcgaccgccccgagatagggaccgtgcggcatcccgtgagcgcggccactgcggccgccagaaccatcaccacgacactcgtcctcgccatcacctacacctcatcgggcttgcctaaattttgccgcgaaatcacatttggcatttggattttccggcggtcatgctataatgcacttttatttttcatttgcccctgtagctcagttggatagagcaacggatttctaatccgtgggtcacaggttcgagtcctgtcaggggcgccatcgccacgacacccatttgccgccctgcgcaaagcacaacgccccggccgccggcgcgtcaacgccggcaaccggaagcggagacgtcatttcttcggcgcggcccacagcaccgcgttggccatgaccttgcggatttcggggttgaagaaaatcgggttcgtctcgtggcccgcctggaggtagaagaagcgccccttgccgatcgtccagcagaagcccatcttcgcgtcctcgcgcgtgccgttcttgtgcacctgcacgccgaccagcggcacctcgttggtctcggggaccgcatacgggtcgctgtagcgctcgtcgttctcgatcgtgaacgtcttcgccacgcccttgcagatcgggtggttcggcatcgcgaccttcatctcgttctccttgttgtcggccacatacgcggcgaacgtgcagggcgtgcccatcagacgcttgttgggcttcgcgaaatgcgcggagtgcagcgcgatgaagcccatgccctcttccttgacgcgcttctcgattttgtccaccagctcgtccttcacgtcgccatgcttcgtgtggccccaccagacgacgacgtccgccttcttcagcagctcatccgagatgccttggtcagggtcgccgaggctcgcgcgcacgacatcccagtccttcatcaggggcgacgccttcaggccctccacgatcgcgccgttgatgtcctccggatagacattcttcggggctgtgccttccgaccacaccaccaccgtccgcttcggcgcggcaaacaggcttgtcgccaaccccgtcaccgccaccgccataatcagatgtttcatctcatcaatcctctcttacgttgaacgtttgcgcctggcgtccttctccaagcgattcatttagtataaggccagagatgagtggaagtcaatgaagaatcctgaaggcgcattcataagaaaaggcggccatagagaccgcacttaggacaccccgaagggctttgcctacggaaaaaatccttgctgggacttgtaggtgaaatcaagtaaagcacaattgacgcttgcgtgcaagcccatttatgctaaaatttcagttttcaatgtaccgttgtcagcagggtggtttcaaaaacagttttgaggagtgcatcgcatgaacgtgttaggcatcgatttgggtaccaattcaatcgggtgggcgttggtggacaacgcggcggagaaaatcctcgccacaggcgtgcgtatcttcgaggcgggcatggagggcaatatgtcggacgggacacaggagtcccgcaacctcgcccgccgcgagaagcgtcagcttcgcaagcagcatgaccgcagggcaaggcggatgcggaaaatcctgcggacgcttcaggacgcggggctgatgcccgtggcggataacatggcggaggcgatcgtgcaaatcgacgcccaagccttgcaacgcctcaagaccgaggccaacgcccagacgctggcgcacgtcgtcccgtatcgtttacgggcggaagcgttggacaaccggctggacaatttcgagatgggtcgtgcgctctatcatctcgcgcaacgtcgcggctttaagagtaacaagaaggccgatgccaaagaggatgagaaggaagctgggaaggtcaagacgggaatcagcgagttggcgcaggccatggaggcggcgaatgcgcggacgctgggcgaatattttagccggatcagcccggaggaggagcgtattcgcgggcgctacacggcgcgtaagatgttcgaggacgagttccgcgcaatcatggcggcgcagcgttctttggggaacgccgcgctcacggcggattacgagaaggttttgtacaaggcgattttccatcagcgcaagctgaagagttgcagtcatctggtgggcttctgcccgtatgagaaggggaagcggcgcgcgccgtggtatcatccgctggcgcaacgtttccgcgtgttgcagacgctcaaccatttgcgcgtagtgctctcggacgcagagcgttccctgtcccccgaagagcggcagacgttgctggacatcctcttgcgccaacggagcgtcacgattgcctccgcgaaaaaagcgatcggattgggcggcaagaaaaacacctgcacgttctccatcgaggagggcggcgagaaatcgcttccggggcatcagaccaacgccaagatgatcgaggtgttcggggaggaacgctggatggcgatgcccgaggcggagcagcttgccgcgattgccgatgtccaaagctacgagaacgatgcggcgctgaagaaacgcggcatggcgcattggaagctgaccgatgagcaagcgacgttattcgccaacaccgtgttgcccgatgactacgccgggctttcgcttgccgcgatgaaaaagattgtcccgcgcatggagcaggggactgaatacatgaccgccgtaaccgacgtttacggggacacgttgcgcacggacacggtgttcgattccttgcccatgattaagggtatcgggcgcacgcgcggcatcatgcccgacttgcggaatcccgccgtcgagcgttcgttgacgcaactgcgcaaggccgtcaatcccgtcatccggaaattcggcaagcccgacgccatccatatcgagatggcgcgggagatgaaaaaatccgtcaaggaaaagaagaacgccacgaaaaaaatgcgcgagcaggagaagcggcgcaaggacgccatcggggaattgatggcgcaactcccggagtttcagacgaacgagcccagacggcgggacatcgaaaagtacctgctgtggcgggaatgccgcgagcagtgtccctacacgggggaacacatttccctgacggatttgttcggcgaccatccccagttcgacatcgagcatatcatcccctattccgtttcgctggatgattcgttcgtcaacaagacgctctgccatgcaagggtcaaccgcacggacaagcgcaaccgcaccccgtggcaggcattctcggaggatgcggcgcgttacgaggcgatgttggcgcgcgtcgggaaattcgaggcagccgatcatgtccggctggagaagctgcgccgtttcaaggtggaggacaccacggagttttccgatttctccaaccgccaactcaacgacaccagttatgcgtgcaagctcgccaagggctatctggcgacgctctacggcggcacctacgacgcggaaaagaagcagcgcgtcgtcgcagtctcgggcggcatcaccgccaccgtccgcaacttctacaaactgaaccgcatcttgggcgaaggcgccgccaacccgcagtccgacgcgcccgtgcgcaaatcgcgctccgaccatcgccaccatgccgtggatgccatcgtcgtggcaatcacgtcgcaggggacggtcaacaccatcagccgcgccgcggcggattacgaaggcgtgaacacgcgcctgatgtatcagggcgacaccgattactgggacggcttcctcaacgatgcgcgacgcgccatcgagggtatcaaagtcacccatgcggcatcgcgcaaggcgcgggggcaactgcacgaggagacgatttatgggcgcgtcaaggattgcgaagggaacgagataaaaggcaaggtctcgtaccgcaaaaaattggaatcgttgtcggaaaaagacatcaagcaaatcgccgatgcgacggtgaaggaactggtggttgaaaaactgagtgaactgggaatctatgatgccgcaacgggaaaactggatgcgaaaaaattgtcgtccgccttttccaacaccgacaattatccgtggatgatgtgctcggatgggtcgcaggggccgcagatcaaatccgtgcggtgccacaaggatttggcgaccatggatgtgggcgacgcggcgcacccgcaccctgtcgtctcgggcaacaatcatcacgtcgaaatcttggaagtttcagacggcaaaggcggcgtgaaatgggaaggcgtgtgtgtctcgatgttcgatgcttatcaacgcaaaaagcagaatcttcccgttgtccagcgcgaccacggcgagggcaaacggttcgtgttctcgctggcaataagcgacataattgaatgtgatattgatccgtctaaccccaaggcattatacgttgtaaaagctgtttcacaagaaccgcgtattgaatttgcacgtataactgatgcgcgggaaaagggagaacgcaagaaagaagaaaaagaaacgaaaatggaacttcgtaaacgtatagagccgttacgaaacctcaacatgaaaaaagtcaccctcacgccctttggcgaggtgcgttatgccaacgactaaccgtattatcgacatcacggaaggccctgtcttcctgtgctacgaaaacaagttgctggttgtcgagcgcaagggggaggaagatgtcacgatgcccgttgacgacatcggcgtgctgatcctttcctctccgcacgtcagcatgacccagcccgccatcgcggagctctcgaaggcgggcgtgtgcgtcgtgttctgcgaccgcaacgcgatgcccgcctcgatgtgcctccccttcggtgtgcaccaccagcccgccacgcgcttccgccagcaggccgatgcctccaagcccgtgatgaaacggctctggcaggagatcgtccgctccaagctcgagcatcaggcggcgctgttgcgccacgtgtatggcacggattatgggcttggcgaattcccggcgcgggttttctccggcgacccggacaacgtggaggcgcaaggcgcaaaactgtactggtcgaaacttttcggcgacgtggatttctcacgggatcgcgacgcacccgggatcaacgccctgctgaactacggttacaccgtgcttcgcgcgatgacggcacgcgccatctgctccacgggtttgcaccccggcttgggtgtccaccatcatcatcgcgacaacagtttctgtttggcggatgacctgatggaacccttccgcgcgtatgtggattgggcggcgtatcgctggacggctgacgggaaatgtcaggcgggcggcctcacgaaagaggacaaggccaacatcgtgcggcagctcctgatgccaataaaaattgaagggaacaacgaaccgctgttctacatcatccagcggctggcgagctcgctggtcaacgtctttggatggggggaggaagggcttcgtttgcccaagccctgcttccagtgaccatgattcgttcgcggataaaaagcatgtggatactggcaatgtttgacctcccgacgaacaccaaggaagaacgtcgggacatgaccgtctttcggaagctgctgcaatcgcagggccttttccggatgcagttctccgtctatgtgcggttttgcgacaacaagcgcttgaccgacacgattctccgctccatacgccaaggcgtccccccgcacggggaggtccgcatcctctacgtcaccgacaagcaatacagcgagatgcacatctttgagaacaccgtcaaaaaacggcccgaacccgaacccgagcaactctccttcttctgattttttctggctcaatgacacataacctaatgctttgcaatctgttagcaaagacagagtgtatcaaagatccaaaaacctacaagccccagtgcggtatgagacggaatggtgctgaggaggagtgtatcaaagatccaaaaacctacaagccccagtggaagaataccgctctcaacacatttcgctagtgtatcaaagatccaaaaacctacaagccccagtggcggacgcttaccgacgaggaggagcgacagtgtatcaaagatccaaaaacctacaagccccagtaatggcgactatgctagcttctctccccgtagtgtatcaaagatccaaaaacctacaagccccagtacaatgtccttatacgaaggaaagccaccaagtgtatcaaagatccaaaaacctacaagccccagtgcacggcgttatgctccagcgtgaaaaactagtgtatcaaagatccaaaaacctacaagccccagtaatgaacattacttaccgttgaggttccggagtgtatcaaagatccaaaaacctacaagccccagtgtttcgtgcctcgccattttacgtctaatgagtgtatcaaagatccaaaaacctacaagccccagtgatcaggtggatggacgatgggcgtgccgcagtgtatcaaagatccaaaaacctacaagccccagttcagcttgtcgatgattgccgccacgatctagtgtatcaaagatccaaaaacctacaagccccagtgccggtggcgctggcgctgaagtgggcgagagtgtatcaaagatccaaaaacctacaagccccagttacgcctttttcgatgagtgcaagcagtacagtgtatcaaagatccaaaaacctacaagccccagtccgtaggcggccagtatcacgttgcgagtaagtgtatcaaagatccaaaaacctacaagccccagtacgggagaagaatagtctaatcagtaaaaaagtgtatcaaagatccaaaaacctacaagccccagtaccatcacggtctttcttcattgcggccttagtgtatcaaagatccaaaaacctacaagccccagtggctctacgtcgcgcttacgctggtgtctcagtgtatcaaagatccaaaaacctacaagccccagtaggggggggttatccccccgcctccacttcagtgtatcaaagatccaaaaacctacaagccccagtttcatccggaagcaggtggacacgatgccgagtgtatcaaagatccaaaaacctacaagccccagtcaagtttgcggatgtccctgtgctgggcaaagtgtatcaaagatccaaaaacctacaagccccagtccgactcgatccctaggcactggaccttgaagtgtatcaaagatccaaaaacctacaagccccagtggtgtcgaacgcccccgctgtcgggttgttagtgtatcaaagatccaaaaacctacaagccccagtatccccgtccatgaaatgcgactcgcctttagtgtatcaaagatccaaaaacctacaagccccagtatgaaaacgttcttcttactgattagactaagtgtatcaaagatccaaaaacctacaagccccagtggagtacccgcgctggttcaagggcgcggcagtgtatcaaagatccaaaaacctacaagccccagtcatttacctcatgcatcatcggagccaacaagtgtatcaaagatccaaaaacctacaagccccagtttgggcgtatgcttgagggtgcgcgtgaggagtgtatcaaagatccaaaaacctacaagccccagtcgatttccttttcacggtagatgatattcaagtgtatcaaagatccaaaaacctacaagccccagttgctcggctgtggtcgtggcgttgctctaaagtgtatcaaagatccaaaaacctacaagccccagtcctctttcttatgctggtagcggtgtgacgagtgtatcaaagatccaaaaacctacaagccccagtgcacccccctataggggggggtgccttactagtgtatcaaagatccaaaaacctacaagccccagtgatagccgcgctcaactctgggcaaatgaagtgtatcaaagatccaaaaacctacaagccccagtactcctgcttatattatcaagaggggataagtgtatcaaagatccaaaaacctacaagccccagtttgacgatgcgattaaggccttaaccatttagtgtatcaaagatccaaaaacctacaagccccagtaataaagatgtcttataaaagccagagccgagtgtatcaaagatccaaaaacctacaagccccagtcgggaaggtatcccagcgcaatgtccaagagtgtatcaaagatccaaaaacctacaagccccagtccgcactgcgcggtttgcgcttgcaatacccagtcacatctgatatattacttcacaatgtttgatatgttcacatattccgcctccagcacctcccggtacctctggggtctcgacctgagcggcacacctcagggcgcgggtcgcctgctcgcagtcatcccgggggcgcaggggttcagccctgcatattatccctgctacgacgcgaatggcaatgtgacggaatacgtggacggcgcgggcaccgccgtggcccactacgggtacgatgccttcggcggctccgccgccaagccggggctcatggcggacgcgttcccctaccgcttcagcaccaagtgcctcgacgacatcgtcaccccccggcgcctggcgctgggcaccgaccctccccctctactactacggcgcgcgctactacaaccccaacctcaggggctggctctcccgcgaccccgtcggcgagcgcggcggcctgaacctctacggcttctgcgccaacgaccctattaacaagtgggattatttggggcaagaacgcagattaagattctcgtttgacttacacttaaacaggaaaccctgatgagatttcaaattctacagatgttttgttctgttgcggtttgcttgcctctgtgttcgtgtttaacgggatatgagaagcggatgctctctgactgggaagagcaagcaaaactcctcgaacatccagagcgttcactgaacgggttgtatgaaaataaaagcccggagatgcctaatttctggcaggtgcttacatattctcatgcagcggatgacaatgatatttttcaggtggaaattctgtccgacacgcatttggagttaacgctgataagtagtgcggaaaagtctgccgggtcagtaattgtttcttataaaccctatccgaggcgtattgcattagccacccaacaccatgctggcggtatgctgatgccaatcttatggatgtgggataccgaggagtttgcattgggtataacgccagaacatgatttagcggtgcgaagagcatggggaagaaccgcgatgttgggcccgttcccgttttttggtggcggtggtggggctgggttacgttatgtttttaaacgggtggcagaacccaaactgaaaagcattgagtgacgtgtgacatgattaatctgaggttatcatatcgtcatgtgcccacaagaaatgttcgactgcgggcggggaaaagatgccagaaagcgacttctccgctaagtggtacaggattgagataccgaccgtaaaaacaggaggcggcaaatgagaccatgcgtgatcaagttgttgaaggtaatagccgtagttttaacattggcgtttctgtacagagaggctggcgtaagatatatattgggcaggtttatcaacggaggagatgatttcggacgcatgttcagggttctaacagacccagggcttcgggacaaatatgttccactcgtcaatggcgaatacccgaaattgttttatgggttattatcactcctttatgccgaccctgatcgggtaacgcttgaggattcaaggcacctgaaatatctttattatgtaggcgggttgcggacaaacgacccgcccgggatgcctatcctgatacagcatgacccgaaatcccccttttgggcaacgattatggatttgagcggcaataggccatacgaaacaaacggcctccgcgttgtacgcatgctgctctctgagccgtgggagctggtcaaagacaggttttcggacgcggaagaatacaaggctttcaccaatcgcctgaatatcacaagggtagcggacgaaatgaaagtgaagcaacacaactgaccatttattttatcacaaaagggaataggggcttatccctacatttggcatttcaaaaatcattactccgtaatgattttgtgacacctgcatagtttgcgcttgcaacgccccgccgcgcctgatatatttatcccattatgcccgacgccaaacgtattggcgctgaatggttgcggcacaattgacaaaacgaaaggcacaggcaaggaggggtatcatcaacgcaacaaatgggaatggaacgtggcgaccaggggctggttcatcgggtatgagggggaaacctctagctttagccggagatctaattccaggatgacacccggaataaacaaaggagaatcacaacaatgaaaactgcgaagttacggatcttattgctgacggcgttcatcttgcacggtatgctcattgccgcgctgataatgtatttttccagaacgccctcgaaaagaaaccctgacgcgataacccaaataatgatgtctcacatggtttatcctatgcatcgtgtcatggggaaagccggtcacagcaatctggttgaatatgtggacagcctgacaggatcgagaggcatcccccgttttgtgcatcgtgagatgatacaagaaatgtcgccacggagcgggaattttctagacgcgtgggggcagcccatcatgattttgctcacgacaaacagcaacggggaggcaggggtggccatgcactccttcggcgggaacaaaagagatgagggcggcggcggcgatgatattgtgctgtggatagacgcagtctggcggggacgcgaggttttcattatcaaagggaaaactcgtgttgcattttatgaagaggggcgtcattcttccgaggtggaaatggatgagcccattttcaaaattgatcttttaggggagcaatggaattgagcaacacccacatagtttgcgcttgcaacgccccgccgcgcctgatatatttatcccattatgcccgacgctaaacgtattggcgctgaatggttgcggcactgttgagaaaacgaaaggcacaggcacggaggggtatcatcaacgcaacaaatgggaatggaacgtggcgacaagaggtttatttatcgggtatgcggggtcggccggattttttacttctgtgcttgattggcgaataacgagggggactgaccggaaaggatataagtaatgacaacaaaaggtttagccatacgagcagctatatacgcatgttgtttaatcgcgggattcttgattgttgccccgatgtttacggggagtccgcgacctactaaaaacttcacaacgcaggtgaccatgcgagacatgagttgtttttttgcgggcgcaatggtaacaggcggacacagtaatatagtagagacagtcaaccgtatagaatccaagcaagacattccccgaattatagagtataaaacgataagccatattatcgaaagctattcaggcgtggagactgtgacactgaagttttacaaggacggaaaactcattgacgcatgggggcagccgataaccatcatgcttatgcccaaccatattggtgaagccggcatagtcatgcactcctccggcaagaacaggaggaacgagaacggcggggggggacgacatcgtgatgtggttcaatgcggatatgtccccgtcgcgggagggtcacgaggcatccaaaacccggcttgaagagtgcctcaaaggcttatatgccccgccgtaataaaggagggggacaatgaaagtcatacgtgttatctattggtcggcacttacctgttgctgtatttttgtgatcttaatgacctttaaaaacggcagggggatagcacctcctgataaaaaggcgaggttgcgcatgaagcccgtgcctgacacagcaatatctgcgaagggcattgcgggacacagcaatgtgccggggggcgcagagcgcgtcaaagacacgccaaacatcacgcgccaacacgaggaaaccctttgcgccgtcgcgcctttgtgggagaaaaaagatgatgccgttacgagggaaaaattgttttgcgcttgcaacgccttgccgtattgggtatattcaccccgtcatgtctggaacagtaacatggacgccggctggggttataacagatgagcggaaaaggggaaaatgaaaactatgccaaaatatgtgttactcccattatgttgtttcatcgttgatatcgtgatgatgtgcataacgtttcatgttgtgtcatccgctgacaggggggctgttatagatgaaggggtcccggttcctgaaatacaaaatgtcattcagtccaatgcagatttttttgcaacatataaaattgtgggtttcgcggcaaaatggggatgtttgtcatttgtcgttttagaagacactatttcttctggtctgcctatgattgcagagttcgactgtgagcggaaaataaccatgctgcctttaagtgaacacattgatggcaaaggtctagcctgccaagagtttttgggcttacttgaaatggcgagaaacgaattggaacacggccaagaaccccaactcgggctactgtggtttatatttaatgatgacggtgatgtcggattttattttggatggtcaaaccatagccttagtggtgagggcataagtatttggtttcataaagtagatggagtatggcaaaaaaaaggcacagggcattggatatcataagtcgaggcaacaggtggttcatattcggcatttcaggaatcgctaacccgcgatgactttatgactcctgtgcgctttgcgcttgcaacgccccgtcgcgtctgatatattacttcatcatggcaggttcccggagagatgggtttgggagccgcatctcaggggcctgtgagaaaggggagggcgatataatatgagaacaagaagcattatcatgggagccatcggtgctgccgggatactggtgtcattgtttgtgctttacatacttggcgtgattgccaacgaagtgatttacctcaggttctttgcagacgcgcgaatagaaaacaccggcacgttgatacgtgttttgagtgcccgcctgggttgcattaatgaggcgggggagtacccgccgtctttggagtctctggtcgaccgcctgggccgcgccaaccccagccatacctattcgaaatggaacgggatttactatgtgggtggactaaaactgagcgaccctcccgcaatgccgatatggtttcggcaagacctcattatgtacgtgggaggtgattggggttcaataaaagatattgagcctagcaaacgtaagctgttgatgacagccccatgggaattggtgcgtgacgagtttagggacgtggaggaatacaaggcgttcaccaaccgcctgaagctcatcaaaacagaggggctgaaatgagtcacagggtaaatcatggctacagggtggaaacggtaccctccgcctacgacggctggaacgccgtccgggagtccgccgacctccacatccccccgttcgccgtcaccagcacctcccattacgtctggggcagcgacctcagctgtaccccgcagggcgcggacggcatcggcggcctcccaggagcgcagggcttccgccctgcctatctcccctgcaacgatgcgaacgaagaacaaaagagcgcaaagggcaagcgcacgcgaagcccggccgcgattttgaggcttgcgtaaggctcaacgcgcgcaagagcaaggagcggtaccccgcgacgcaacggcaactgtcacgtcacgggtaaagaaaagggggtacccgaagggaggggagagggagtttctccgccatctgccagaaaggttagcccatgaaaacgctatggtcatttatttttcttattgcgccgttcctgacgacactatgtgttatcgctggtccgctttacgcattttgggtcatattttctaatgcggatggaagaggttgcttcctctgcagtcatgcgcttacacagcctattgcttcagtcgtaaacatatttgtgccgttaggccttgtttttcatgtgagtgctatcgtcttatcgatttttaaatttaaagaaagcatcttgcattctattttgcagttttttgtgtttctccctgtttctgcgttcacgttcctgttcgggaaattcatttgcgccttatggggcaacggatatacgttgagcgacttaatttggtggctattttggaaataaaatgatttcaagttatatatttttatgaagtggaatgcggctagtgtcctgtaatattgaaagcacaggaaagagtcttttggttgaagcagttgtggcacacggcatggaggtgacggatggtggacagaaggttttgggcattgtttttggcgtttgtctgcacgtttgcagggttgcgcgtttttgtgcagtggaacatgttcccccgctatgggtttatatcttcacttgatctgactgccgacggggcgcagggtataatc

SEQ ID NO: 3380 - DNA, 11454 bp, synthetic construct
  misc_feature 1..11454: note = Synthetic
  source 1..11454: mol_type = other DNA
cagcccggcgggagcggtgctgcgcgtgcccgcctactcgccgatcaactacgcgccgccgcccggatgaggtgctacatgaacgactacgtgaccaaagaccactgcgcggcgcacagcgcggccgtgcttgaaaagctcgaaagcatcgagcgccggctgttcgtggacaacggcagcccgtcgatccagacgcggctggcccgccacgagatggtgatccacgcgctgttgtgggtcgtctccgttgctgcgggcacggccatagcgggaatcgtttccgccggtttcatgctggcaaagttgctggcgaagacgggcggctcgtaaggagagggaaaagaccatgaacatgctgacaagcgtgatgatcaagctggggctggccgtcttctcggccctgcccatcgagcgcatcgtcgccatgctgctgaacaagtggctggacaagatcgactcgaccaacatgggcaaggcgctgaagacctgcaaccacctcaacgagctggtcgcgctcttcgccgacatcctggccgacaaacagctcacggctagcgaggtctccggggcacgcgacgccgtgatccggtcgcgggcgctgctgcttgagctttgggccaagggcgacgcttccaaggccgtgcagaccgatttgagcaaggctggcgtcgcgactgcgtacgtcgaaccgctcttaacccagacccagaactaggaaggagaaagaccatgaacaaggccaagacgaagaacggtatccagaccgaagtccggcagaaacgcgccgccgtccgcaagggcgccgacgagaaacgtcgcgccgtgcgcggcaaggtgcggcaggcggtcacttgcatcctcgtggtgctcacgctggggatcgcggccggctgtaacacggccacgcccgcgagcaagagcgcctcgtccaaggcgtgcgacaacgtcacgacggtcaacaactacatcgggctgctcccctaccccgcaaccaacggcgcggcgtacgcgtccggtgtggtcgcgctgggttcgggcggcctgacgatcagcgtgtccgatctcaacggcacgatcgcgcagagcgccgacaccgagggcggcgaccgcaccgacctgacggccaacccgtcgttggccgcaggtgtcacgggcgacgcgccgatcaaggccattgccgaagccgtgtccgcattcgcttcgccgcaggacgcgctgggcgcgacgttgtccgccatggtgcaaaaatacggatgggccgctgcgacaaacacgctcgtttcagccgccgagagctgtgcggacgggtcttgcgcggagaagtgaccgttgtgggtacctgagtcaatcaggtacccacgcttatttttacacctccgttttgcctgtcgcagccgactccaggagtttcatcggccggatcttccagtacgcctcaccctcttcccttgtgaccagcttgcggtaattggtgtaaacaaggtcggtgtctgagcggtgccccattgcaaacgcggttttggcggcattctcgtaggtggcaagatggtaggttccgaacgagtgccggaagccgtctttgattaacgtgcattccgccccttccatgatttccctccgcgcccgccgatacgtcatcaaaggcggggctacaaggccgctctcccgtgcgtagggcgtcagccattcgatgagattgtccgacatatccacatagcgggcgcggcgtttcttggccgtttcggggctgacccgaatacgcttcgccgtaagtgacacgtccacccaatccagtccctgaacttcggacgggcgcaagcctgcgaaaaacccgatcgccagtgcaggcacaacgcgggcggcgtgaggggatgcgttggcggccgccatgattttgcgtacttcttcaacggtgtacgcctgcacctcggcctgatcggcattgcagcccgccagtttcacgtccttagccggattcttgggcagtccgtaccgcttagccgaatccgtgaagaaggcggatatgaccgtcaggtattggcgtttcgtaccgacagtgcttgagccgagcgtgtcagtcaaccattgtgaaatgagctcggtggtaatgtccgatattgacgtgtcgggaaaggccttgatgagccgcccgatcttatggctgatttcgtacagggttgccgcgcgtcgtttctccagccttttatccgcaaggtacgattcaagggcctcgtccaacgtcggcagcgaaccgccttggggatggtgcgacagccagaaacgcacggcttcggccatcagcggcttgctcggggcatagtccttgacttgcgtcgtcaacagccggactgccgaaatagcgtcgtcttgcgccttcttggtggggaaagcgtccagaaggcggagcgcgtctatgcgctgacgccctttaatcgcaagggccatgtccccttcggacttgaactcggccttcacttgcttggcgtagtcttccgccttcgccgccgtcttgaaggtctgccttgtgcgttttccgttgtggtgcgtttcgacttgatacgagcatccgcgttgtcgtattatcgccccgtttactttccagattttttggtaagtgggcatgttctttccctttcgccaaggtgctttggagttcctcttgcgacaagggaagtgtcccaaaaacgtcccaaaatgtcaaacagattcggaaagcgaaacggttatataggcataacaaccttataacaagcaatttaagccagcatagctcagttggtagagcacttgatttgtaatcatgaggtcatcggttcgaccccgattgctggctccatcaaaaacccccgtaaaacagcgtttttattgggtttttttcgttttttatcgcactttcacttgttcggcaggggtgcaactttccggtgttttccccgttttaacctcttttttgtatacagtttgtatacagtcgattttggtggtttaggggcatgtcgaactcccgggggtagattcgggatccgaactgtgtctgcttgaaaaaaaaccgggcctgcgagggcccggctttagtttcgcaaggacagcccactgatcagcgcaagacccgtctgaacatgccgaaccgacagcccaggccaccgcgtttgtcgccgactccagcccgaactttttaaccagggccgttaacgttgcgtctgcggcccccgcaggactggcaaaagccgacacggcgtccgccaccgctttgacaggagcatccccggtcagacccgcgttcatactaggcgccgccgtcaaatcagtgcggtccccgccctccgtatcggcgctctgcgcgatcgtgccgttttctccttcttccctcctccttcatccttctctcccgtccccgctcaatgccacccaccactcgctaatcgctgctcgacaatcgccactctattaccctcgccattgcgcccagtcccctggtcgcaatgaaaacccttgcttcaaatccccaaaccccttataaatgcaaatattgttattttggtttctttattttcactcctcaaacgaagtccgagaccatgcccgccaaaacacgcatcatccccgcactgctcctcgccgccatgctgttacccatctcggcacgcgccttgatcgacggcgactacacctacaccgtcgccgacaacaaagccacgatcaccgacttcaatttttcctattttggcgctttgtcaatcaccaaccaactcggcggctaccccgtcacctctatcggcgactgggccttttactggtgcgactccctcacctccgtcaccatccccgacagcgtcacctccatcggctccaccaccttctgcgcctgcatctccctcacatccgtcaccatcggtaacagcgtcaccaccattggcccttacgccttccacgattgcgcagtcctctcttccgtaaacatcccgcaaggcgtcaccgccatcggagcctacgccttttacaactgtttctccctcccctccgtcactctccccccgggcatcacgtccatcggtgacgatgcattttcttactgcgcgtccctttccacactcaaccttcccaattccctcacctccatcggcttcgaggccttccgcgactgcacatccctcgcctccgtcaccatccccgacagcgtcacttccatcggctccttcgccttctaccgctgcaccggcctcacctccgtcatcatcggcaacagcgtcacctccatcggcaaatccgccttccgctactgcacctccctcacctccgtcaccatccccgacagcgtcacatccatcagctcctacgccttctcacggtgcacctccctcacagacatcaacgtatcggataacaacctgaactacgcaagtgtcaacggtgtcctgtttaaaaaaaacctccccacactgattcaatgtcccgggggctactccggcccatacaccatccccgacaccgtcaccgccatcggcccctactgggcctggaacggcggcaccgtctacccctgcggctacgcggccttccaaggctgcacctccctcacctccgtcaccatccccagcagcgtcaccgtcatcggcacctacgccttccgtggctgcacctccctcaccgcgatcagcgtcgttcccgaaaacccgaactacagaagcgtcaacggcgtcctgttcgacaaaaccctcaccactctgattcaatgtcccgaaggctactccggcccatacaccatccccgacagcgtcacatccatcggcgacgggaccttctactccggcaacttcatctccttcgccgaaggagccttctacggctgcacctccctcacctccgtcaccatcccgaacagcgtcaccgtcatcggcacctacgccttccacggctgcacctcactcacctccgtcaccatccccgacagcgtctcatccatcggctcctacgccttcgaaggttgcacctccctcacctccgtcactatccccggccgcgtcacctccatcggcggcgaagcctttgccagatgcctcgtgcttacttcagccatatttaccggaccagcccctgcgtccggagcaaatgtttttcaatccacacaagctacagtttactattttccggatatcgccgattggtcagatgtctacgccggacgtccaacgaaacctctaatcaaatatgaacaatccggcggtgcgatcgcgattaacggcatcgaaaccgtcttccccggaaatcacttgtcgctcccgtcatcaatcgaaggttaccccgtcacatctatcagcgacaccgcgttctacggggccaccaacctgcataccgtcaccatccccgacagcgtcacaaccatcgggaccgcagcgttcgccggctgctccgctttacacactgccgttctcagcagttctctagccgaaataggggattgggctttttacggatgcgcatcactcaccaaggtctacgggcgcggcgacgctccctcgtacggggcttccgtcttcggcgaaaccccggccacaatctattaccgtcccggatatactggttgggcaaccacttacgccggacggcctaccgtcttaataccattcgattacacaacggaacgtgacaacgtcaccatcaacacgtacgtcggaaccgacgcccatgtcgaaatcccgctgtcgattgagggcaaaccggtcaccgcaatcggcgacagtgctttcgaagactgcacgttcctggaatcggtatcgatccctggtaccgttcaagtcatcggcgaggcggcgttctacaactgcccgctactctcaggccttatcctgccggacgcgctgcgcgaaatcggcgcatgggcgtttgcaggttgcagcagcctttccgtaatgactctgccgcatctaattgactccatcggcgactacaccttctcattctgcacctccctcgcctcggtctttttcaccggcgacgccccgaccatcggcgacgaagccttcgcctacactcccaccacgatctaccacctccccggcgccaccgggtgggacacctccggcaacggcataactccggtctcctggaaccccgccatcagcccagcgtccccaccgcgcttcacctccggcgcgttcggtttcaccctcaccggcagcgctaacatccctgtccgcatccaagcctgcgacagcctggcctccccctcctggtccaccgtcaccgataccaacctcaacgcctccggcaccctcgacttctccgaccccgactcctcctcccgcccctcccgcttctaccgcttcaccttcccccagtaggttcagcgttctacgttctgcgttcatccctttcccgttcagcgttctgtgttctgcgttcgacgttcagcgttttctctttttaccctccccattgcgaccagccccctggccgcaataaccccgccccatcccgccgcccccatctccctcggcctcgtccgccgcgccgccgtcaacaccgtctttaccgtccataccgttacctccgtttacaccgtccgtcaccaaacagccgtccacacataacgcctgttttgccacattcaggggaagaggtttaacgcggagacggagaggcgcgaagacgcaggggggccgggggaggcggcacggacgcgccacgaatgggaaaagggacggggagaaaccgtgaatcccgcgaattgcgcgaatggaaagggttcacgtgggggcgcgggggagattaaacggggggaacggcttaacacggaggcacggggggaatcagatttcacgccatgacgctaagccgccaaaaggattgatgcggggacaccggaacggctgtctcacaagatatgaaaccgcatgtttttcactgaaccacaaatcaaagatagacgtcatattctggatatgtttaactgtaaaagtctgacgtttgtcacattcttttggagggcgatcatgattctaggacttgaccttggcacgaattccgtcggatgggctttgcttggaaaacataaaatcatctctgctggtgttcgaatattcgaagccggaatggaaggcaacatgcaggatgggactcagacatccagaaacgcgtcgcggcgagaaaaacgaatgctgcgccgacagcatgcccgccgcgctcgccgcatgaaaaacatcatgcgtattctccaagaggccggactcctccctaaagctgataacatggccgcagaaatcgaaaaactggacagccaggcgctgcgcaggatgcggatgactacggaagttcagcacttggcgcatgtcgtaccctaccgcttgcgggcagaggctttgaacggccgactggatgatttcgaactgggccgtgcgctttatcatctggcccagcggcgcgggttcctcagcaaccgtaaaacagccgtcagcgacaacgacgaggaaactggcaaggtcaaaactggcatccacgatctggatttgaaaatgaaggctgcggacgcccggacgctgggcgagtatttcagctttctcaacccggaagaagagcgaatccgcagccgatacacaggccgcaaaatgtatgtcgacgagttcaaggccatcctcaaagcgcaacgtgaatacggcaaccagagacttaccgaagactttgaaaaacgtctttatcgcgccattttccgccaacgcccgctgaaaagctgccgcgacctcgtcggcgcatgctcttacgaaaaagggcagaagcgcgcggcgtggtatcatccgctcgcgcaaaaattccgtgtgctgcaagcagtcaaccacctgcgcctcgttttcgactccggcgacacgcgcgggttgacgcccgatgaacggagcaccttgcttagccttctcatgcggtcaagcaccctcaagatcaccgcagcaaaaaaagcgttgggactgaacggcaaaaaaaatccctgcaccttttccattgaagaaggcggcgaaaagtctttgccgggaaacgcggtcaacgccaagctcatcccaatttttggagagtcccgttggatggaacagctttcagaggctcagaagatcgaagccgtcctcgacatccacagctacaccagcgctgaaggcctgaaaaaaagaggcgtcgcccgctgggggctcacagaggaacaggcagaggagttcgccgatgtccggctgccggaagattatgcggggctctctctcgccgccctgcgcaagatcctgccgcacctcgaggctggctcggaatacaccaccgccctcattgccgtttatggcgaccttctccgcacagacatggtttatgacgagttgcccatgatcaagggctatctcaaggatctgcgtaacccggccgtggaacgcacgctcacccagcttcgaaaagtcgtcaacccgcttatccgcaaatacgggaaacccgacgagatccacgtagaactcgcccgcgagatgaagaaatctaaaattgaaaaaaagcgcacaatcaaaaaaatgcgcgatcaggagcgcttgaggcaagacgcggtctctgagctgaaagcgcagttccccgagtttcaaacggcagagcccaaacgccgcgacatcgagaaatacctgctctggaaggagtgcggcgggcgctgcccctacacccgcaaaaccatcagcctgagcaacctgtttggtgacactccggagttcgacatcgagcacatcatcccctattcggtgagcctcgacgactcctttgtgaacaagaccctttgccacgttctgacaaaccgttccgacaagcgcaaccgcacgccttttcaagctttcagcgggagaaaggacgattacgaggcgatgctcgaccgtgtggctaagttcatctccccctgccgcgtagaaaaactgcgccggttcaaattggaaaatacggacgagttctcagatttcgcaaaccgccagttgaacgacaccagctacgccagcaaattggctaaggcctacctcgcctcgctgtatggcggcacttacgacgataaaggccagcgggtcatggccgtatccggaaatatcaccgcgatcatccgcaattactaccgcctcaaccggattctgggcgagggcgaccgcaaaacccgttctgaccaccggcaccatgccgtcgatgcgatcgtcctcgcgctgacctcccaagggactgtccagagtgtcagcgatacggcggcggatttcgccacacgctccacgcgcctcatgtatcagggcgattcagagccgtggtcaggcttctccaatgacgtgcgccgcgccattgaagccgtcaaagtgatccacgcggtttcgcacaaaacgcgcggccagttgcacgaggaaacgaactacggccttgtgaaggactccggcgtgctggtgtcataccgcaagcggcttgaaagcctctcggaaaaagaccttgcgaatatcacggacggcgttgtcaaacaatgcgtgctggccaaattgattgagctgggcatctacgaccccgccggagaaaaattgaaccccagaaagctctccctgctgggcgaccccgagaaccttcccagaatgaagaccaaagaaaacctccccggccccttgatcaaatcggttcgctgccgcaaacctctggccgtcatccgtgtcgggtcaaaggaacatccccgcgccgtcgtcaccggcaataaccaccacatggaaatcctcgaaacttctgacaacaaaggaaacgtcaaatgggaaggcgtctgcgtctccatgatggaggcatacaggcgtaagcgggagggcctcccggtcgtccagcgcgaccacggcccaagcaaacgtttcgtgttctctttagcaaaaggggacatcattgagtgcatgctggaggaagcaaaaggttctgagcttttcgtgatacgctcgttatctgcctccataccgccgatatcatttgttcgagtcagcgacgcaagagacaaaaaggaaatcacagcggcaaaagacctatttcgcccttggatcgagcctttcagaaaaatgaaagcccgaaaagtcactttaacccccttcggcgaaatccgctatgccaacgactgaccgcatcgtggatataaccgaagggccggtatcgctgcgccatgaaaatagccttctggttttcagccgcaaaggcatgccggatgcttcgatcccttcgcgggacatcggcgtgctggtgctctcaaccccttacgtcaccctgacgcaagccgctgtcgccgcgctggccaaggaaggcgtctgcgtggtcttctcagaccagcacagcatgcctgccgccatgtgccttccctttggcgctcactttcagcccgccgcacgcttccttgagcaggctgaggcgggagcccccctgcgcaaacgcctttggaaacagatagtcgtggcaaagcttgcccatcaggcagccctgctcaaacacctgcacggcagcccgtacgggctcgatgcctacccctcacgcgtgcgttccggcgataccaccaacgtggaggcccagggcgcaaaagtgtactgggccaacctgttcggcgaacacccgttcacgcgtgaccgcgacgcgcgtgatgtaaatatgttcctgaattacggatacaccgtcttgcgggccatcaccgcacgcgccatctgcgccgcgggccttcaccccggcctcggcgttcaccaccatcaccgcgacaacagcttctgcctggccgacgacctcatggagccgttccgtgtttacgtcgaccacgcagcctacaaattgaccgaaggcggaaaactacgttttgtcgaaatgaccaaggacggcaaggcccacataatcaaaagccttctcgcccccatcgcaatggatggcaggaacgagactctgttctacgtgatccaacgtctggccggctctcttgtagacgcgtacgcgggacgtgatgaaaccctgcgtctgccgcatcccggcttcagttagcaaaacggccgtcccatgaaccgctcaaggattcgaagcatgtggttgctgacactcttcgaccttccgacgaacacgaaagaggagcgtcggaacatgaccgctttccgcaagttcctccagtcggaaggccttttccggatgcaatactccgtctatgtccgcttttgcgacaacagccgcctgatggaaaccatcctgcgccacatcaaggacgcgattccccccaagggagaagtgcggctcatttacgtcaccgacaaacagtacggcgagatgttcatcctcgagggcagaaagaaaaaacgccccgaaaaggaacctgaacagctcgaattcttttgattttctcaagcttcaatgagactaacatcaagccttggaacaggttggcaaaaacgcattgtctcaaagatcgaaaaacctacaagccccagt

SEQ ID NO: 3381 - DNA, 23219 bp, synthetic construct
  source 1..23219: mol_type = other DNA
  misc_feature 1..23219: note = Synthetic
gtctgaacatcccgatagtcctgctttcacagttgaaccgctcttgtgaaatgagaacggacaaaagaccgcagttaagcgacctaagagaatcgggcagtattgaacaggacgcagatattgtgcttttattgcatagaccggattactacgttaaaagggaaaatgtaaaagcagaagacaggggcaaaacagaattgatagtagcaaagaacagacagggacaaactggtattgtagatttagtttggtttggcgaatggtttagttttaagaatccggcgagataggagtttaaaaaaatgaatatagataaatcagctaaaaacattttagataaagcaacggcagagtatttggctgcggggaaaagagcagctaaaatcgaaatggacaggcaaagggtgttaagtgatattgccgataaatcgcaacccacttttacagaagctaaatataaatcttttccaaagttagttgaatagtttaggagttataaattggatgccgtccccgaatatcagaaacatattttaccagaaccgccaagcggaaaaagcggggctgcgtttatcagtgatattggcgcacttaccgcacctctgcacgcaaaggcaatgctgggcgaggctttaactgaagtaggtttaaatttacacaaacaggccgatgaggccatcgctgattatcagtttaatcaatttcagttaagcgtaaatacaaagtggaatcaggctcaaatagacatagcaaacaatccagaccctatgaaagacaaggaaattcttgagaggtttattgcggacgttgaacagaacgaccggccaaaggttacgcaccctctcgctataaacaacgctgctttgttctggcaacaaagaaccaagaccagaagtttagaaggcaaagaagtagcgggcgattgggtaagggcggtcgagttgcaatctgccgtaaaagcaggccgaaatgcggcggagtcttttagaatgagcgaagaccttgccataaaaaacggtaatgtggaatggctcaggagtatatacgataatgctgaaaaaagtggatattttccagaccataaaatcagagaagaacgccaaaaatggggcgagcaggagatacttacggaagatgtattttccgatgccattcgagcagggaacaaagaggcaggatataaagttatagatggttcggatttgccggacaaggaaaaagccactttaggtaacagactcgatgactattgggctggtagggttaagcagggaaaagataccaacaccaaaaacgtaaacttgttctatgataattccatatctaaacttttaaaaggtgaattaacccccgatgaccttgataaaagtattctcgatttacagacaaataaagacgcaaaggaaaaatggcagggatatttaaaaggtttttttggtgatgccccacaaaaaacaacgccagagggttattcgagcattacaaatgcagtacttgacttttctatgcttaaaacatcacgacaggcggcctatgattctatactgacggccagattcatagacaaaaatattaccgatgatgatttggcttgggcgatgaacaagataaaagaaccatacccgaagcatatcgttgcggatttagaatctgtgcttgttactaacagagcggagataaagcacgaaggatattggccgtttgaaactgccgctgatattgagagaagtcaacaggtaaatactgccctgcttaattgggtagatagcgaacttgcaaataaaaaaactcccacgatgaaggagatgtatcaaaagtctgcggaattgagagtaggaaatcttaccatagaacagacaaaacaaccacctcaaaaagatttacttcatacaacgtctgcgccgcttgttgagttcgactcttactggaaaaatcttgatgatgaaagcaaaatgcagatatggcaaatatacaaagaccccgtaaaagtgaaaatagccgttaagaggttgcaggaaaaatacccgaagcaaaataaggaataaaaaattgggaatgtttgacgacttaactgattcgacttcgactgcggtattggataatccgccaaaagagatgacccctgccagtgggatgttttctgatttagtcgaacaaccacaacgggaaaatcctcagcaggcaagcgagcgagcgggtatagcttttgatttagcgacagaacataatgtccctttgaattatgcacagtctttcgttgctgggccagaaccttcggctttcggaaaatacatcaaaaaaataagggattacatcaatgagaaaaccggacttttaggttatgatacaagaccacttggtgagtcttattatcgagaagaacatcctcttaaaactacacttcgggttggtgcatatgcaagtgcggcttatgcaagtggtttaaccgcaactgcggcagatgttttaacaaataagattacaggtgataaaactttagcagatttagttgcaagacttaccggatttgaaccgacacaagaagaacaaaaagcaatgcggacaagtgaatatgtatcggcttttatgcccgttagttggtgggctggagaatatactactgaagtttttagattagcacaagcaccagtagcgtggtatttaaaaactatactcgatgcgggacttacttttggaacggtagagagtgctgttcaatttagcagacacattaccgatggtactccagtcagttggaaaaatatacatcttgcttctgcttatggtactctttttggaatgggtgaggttgccttaactgccgcaatgacaggtcttgcaaaaggttttgagaaatattggggtacaagagatattgaactttctaaaatgaatatattcggtacaacacttcaggaacaaaaagcaatacaggaggctgaaaaaagaagagatatacaacgcaccaaagattctattaaggcgggcaacggagtgccacaggacttaatggaaaaatatgtttatggcaaaccaaaagccgaacagatgggagaacctgccccgaccgcagaagtaaaacctgttgcgcctctcgcaaagcaatcctatgaaatgacttggccggaatatcggcagaaagaatggtttgataaattaccgccagaaaaaatggcattggtcgaagataaaactaaaatgacgagtttgcagttgggtgggtataatatggcggaaaatcaatttatgcaagcccacgaagccgccgttaaacaagctctatccgaaggcaaaaccattccccctgaagtccttgccgagtatcctgaactggggaaacctgccaaacctgaaattgctacttacgaacagcttgtaaataaatggggcgaagacgctgttaccgaagcagaggaaaaattatctgacgaaaaccaagcatacatcgacatcgaggacaagttcgtcgaactggataatgctgataagggagaaacgccagaggccgttaagttagaaactcagttattccagatgattgatgatttactatctgcgaaagaaaaaccgccaacagaagaaatccggcctatgacagaacaaccaatcctgaaactggataaatttcccgttcaggaagtatccattaaatctttaaaattgtctaaagaagttccgactttcaaagaggaagccgataaattgactggtgtagtcaggggtgaacaattacagggcaaatatgaaaaacttgctactgcgcctattgtggtatgggaacgtctcgatggcacaatggaagttatcaccggcagacatagattagaccttgctaaaagaaatcttgaaaaaaccatacccgcacagatagtcaaggaaagtgaaggtttcgacaaagcaatggctatgactgtcgatgccgaaagtaatatcagagaaggtcaagggagtataaaagactatgcaaactatttcagaaacacagaaattacggaacaagaggcaagagcgagaggtttactggcgcgcgttaagggaaagaccggattcgtcattggcaaaagcgcggtcgatgatgtttatgccagatttctcggaggcaaactttccgaatcgcaagcctatgcaatagccagcggcgcgccgaacaatgagcttgttcagttggcggcagcggcaaaagcggacagtatgtcccccgaagaactcgaacagtatgctcggattttagcgcggactacgccatctgacaaactgaaagccacacagggcagtttgttcggtttcgatgaatcggctttactggaagcggaggcaatagcaaaagaggtatccaaagaaaccgccgctgtcaaggacaggatactttctgtcaagggtgctttaaaaagacctgaaacggcaagaaaaatggggcttgaattttccgatgagccttctatccgcagagaagttcagcgattagaaagcaggctggaagaactgcaacatacctctacgagtccagagttatatgctgaaatgaaaaacagggttgcattacaggaagcaaaacaaccaagattattccgcaccggctcgacgcctattattccagttcttgcagaggaaatgataaacacaaccaaacttgcagggaaaaatgttaccgaacttgccgctggccttccaaagacgataacttattacacaggccgagccgcagaggttatcgagaagaattacggttctataccggaaggaaaacagattgcgcaggattcaagagagatagcttttcagaccgcaagcagggaatcaaaacaacgggacgattttgaaaaggttataaaaggtttatcatacagcgaaagaataaaactcggcaagatggggcaaaagagagcggcttacgccgacaataaaaaactacaggagataaacgcaaaacttcttgaaataatggacagggatatgaccgccgctgatgaggcaggatacaggcgtttgctgggcgatgaatggcataatttacaaggctctggtgggtggtttccgcaggttcttaacgataccggcaaattgagaatgaaagaggcacagcaggaaggacttggcaatcctcacattaaacaggccgctgaggaaatggtgaagtccggcgatgcgggcagcgttgaagaagcattaggccggatgattgattggaacaatcacagcgtaagaggcacacacggttatttcgagagcaggagaacattattgccttatacttgggtcgagcttgatattgcgaaggttctacctactacgattcacaagaacgcgaagatgatagcagcggcaaaggtatggggggtcgagtatcaaaggtcatcagagccggttttgttcgagggggtcagtccagatgttgaaagcaagcgtcttgattttacaaaattcaggcaatatgtcgggaaaatcggcacagagtttggctcaacacacaaagaagcacttaaaaaatgggttagaactgaatttggattagctaatgatttgcctgaatttgtcgaaaatactgtaaatttaattaacagatacgaaacgaacataagacttggattcagattgccttcggccataagaaactggacgcagggcgatacgaacttatttaccgcaccgttacaggctcatattaagacggcaaatatagtaatgtttagaaaatggagtaaggttgccgaacaactttatgaagaagcaaagcggtctggtgctgtctcaggaatgaaggagatggccgaacttgagcgcggcgcaggcgcagaacctataaccggcggccttgctcttaaaatgtttacgagtgcagaggaaagcaatcatatcagggcggctttgatagccagattttcagcggagaagcatatacgggatttggccgcattaaaggagggcgggatactcacaaggatattaaacagcataaaatatctgtctgtaaatccagaagattatctggaacggtttattaagaacaggacatttactaatccgataaccgaacaggaacttgataatatctggtcgggcaataaaccgctgacgctggaagatgcagagcggataatgcacagggcttcggtcgatacgcagtttataaatgattttgcgtcaagacctataccttggcgcactaatccgcttttaagaatggggctgaaatttaagacatttgccattaaccagacaaggttgctctatcaggacgctatcaaagaagccataaaaggcacttttgcacccctgcttaaatatctattgttctcggcaatggccggagaattatggaacttgactaaagactttatcgttggcggtgataacgccttgataactgaacttataaacaggccggaaaagagaaaccttaaagatatttcattagggttggcgaatgattttgtcgatggcgctggagtcggaatattaacggatatgagttatggaatagggaattgggttatcggccctgccggacaaaccggaaagaacttactcgaatgggcgagcaatttaagacatcctgttatggctacccgcaagttagcttttaaggaatttgcagtatccagagacatagagggactaaccgcaagggcggacaagatgttcttcaattccaataacagattttttgagtataaacgtgcgagggacaggtcttttgaatggctcgaaagccaaaaacatccggggttctggacggcgacaggaaaaatagccttaaagatgttgctcggccagcagaagtatcctgccattttaccttatgaatacgcggcaagacagataacgctcggcgatgtcgaagacgcggctgattatctggctgacgcgctcaaaagcgattcgcgggatagggacaccgttttagacagcataagaacttctatgaacaattactctccgctggggcatatagcagacaaagatatggacaaattcttatcacaattccctcaagaagaaaggcgggctatgcggaagttgcaaaccgattggattgccgattacaaaaaggcgattgacatagcaaaacggtcagtcggtgggctatcgaccggacagccgaaaagaaaaatataagattttcctttacaaatagaaagcaggctgatacaataaggttatgattttagacgttataaagaaagagattaagaaaagcggcaaaagccgataccaaatagctcaggaattggcgaaatccggtgtgtcccaaagcaaaatacagagccaattatgcaagattatgaagggtaaagacctgcgttgcgaaacggctgatatgctatgcaggtatttcgggttgagcttgtgcaaaaagaaaaaggcaggtgagaaatgaacatttttagacagacttataaaaccaaaagcggcgcgataggcaaaatatcaaaattctatattgagtttttcgaccataacaagttaagacacaagatacctgcctttgcagacaggcgggcttctgaggcttttgctcggaacatcgaaagcctgataaactgtcggacaagcggactcgaagccgatataaaattaaaccagtggctcgaaaccctgccgtcaaatatcctgaaaaaattcaccgcttggaatttaattgacgggcagcgtgcggaaataacaaagccgctttcggaacatatagctgattatattaagacccttgaatcaaaaaccttttcaaaagattatgtcaggcgggtaaaaaacagactttcaaaaattatcagcgattgccgcttttactttttcagggacgttataaaatcaacggttgaaatatatcttggcaggttgaaacaggacggatacagcgcgacaagccggaatcattatcttgatgcgctgaggacttttcttaactgggcgcaaaccgacagccggatattaaacaatcctttggtgaaatttgaaaaagaggcaagagattcaaagaaaaaaggtatcttgacccctgagcagtttattagcctgattcagactacctttcaaaaaaatactcttatcggcagtatcagcggacaacagcgggctgttttatatgtcttggcaggaactaccggcttgcgcagaaacgaactgctgaatttgacttggaatgacattgacctgtccggcgataatccctttgtgaaagtcagggcttgcatagccaaaaatggcaaagaagctttgcagccgataccgccgatagcggttagtcttttgacagcgttaaaagctactgcaacgcaaaacagggtatttgcgagctttggtatgtcaataaatacggctcagcttatccagagcgatttaacggcggcacagataccgcttaaagacagggacggaaatataatctgctttcacagcttgcgaaattcatacattacttggcttgcgaacagccaaacaccggctaaagtcgtccagaggcttgccagacattcagacttccgaatgacttatgatatttatgcaagagtcctgccagacgccgaacagaaggctattagttatctgccggactttggcagtatgttcaacaaggaaagtttgcgcactggtttgcgcagaaccgtagaaaaccatataacaccagtggaaaacggtggacaacgaaacgccgataacgtgcatataaccacattacaggccgtttctccaatagccccaaggggattcgaacccctgttgccgggttgaaaacccggtgtcctggaccggcctagacgatggggccaaaaatataaattcaattacccgtcgcagtttccctgcgattgtactgcagggcttactccatttctatcgcttcaacaggacactcgtcgacacaaaccccacagtcaacacaagtatcggcatctactaccgccttgccgtcaaccatttttatcgcttcagccgggcaggcatcaatacatgcctcacaacccgtgcattttccatcacttaccttcgctgacataaaaaaaccctttcaaaaacaatcaaacacaaatctttataaagtacataatttgaggcggaaagaatacaaaagtcaagccaatttgacaataaaaaatttgccaaaattcgaacaaaaaaaagaatatggcctgcttgtaactacttattaacaaagagctaaaactaaaaggtatgtttccgcgacacaaagaagacaaagccaattcagttttcccatttttccaagaagcaaaaaaccaaagtaaaaaaacaaataaccaaaatccaaatactcaaaaaaatggggtaaatgggcaggcaaaaaataaggatttatgaaaaaaacgacaatagaaaataaagacttacgacccattcgacaagctcagggcaggcaaaaaataagaagttatgataaaaacggctacgtaaaataaggagttatgaacgattttgtcgacaaaatgcgcaagttttgtgaacaaagcgcgcaagtttttaaaattacgctaaaaacaggggtcgaaatttcaaaattttacggatttttacggatttttaacaaaaagtgaggagttttttcgagtttttacgaatccccgcctgcgcgaggacaggtttcgttcaaaatctgcaactcgtgcttgcgcattttgtgctattagcacaaaacggagtaagaattcaattttaaccgcggattgcacggatgacccggatttttttagccgcagagaaaaagaggacacagagaatataggtatgaaaaaaatttgcgcataaaaaaaggcgaggcctctttcgattcctcgccaggatgctccgtagagctgccccgcttattaggcgggactgcctgcaacttttcttttgttatgaaaagttcaggtcgggattagttacactatcagcactgtaaacttttttctggacaagtcaagtaatttttgtataattttagccggacaagttcacattgcgagagaaaaaaattccttatcccttttggaggaggtattttatgagttacgtgcttggattagatttagggccgtcatctatcggctgggcagccgtaaacatcgacgggaacggtgattacaaaggattagcacaaatacctgatggcaaaaattccataccagcaatcggcgcaagaattttccccgcaggtgttgaaaattatggccaaggcctcagagaagaaacaagaaacaaaaaccgcagagaaaaacgctctgtcagaagaaccttaagacgaagaagaataagaagactgaagctggtatccctcttagaagaaaaaggcattctgcccgcagacaatgaaaaagtaaatactcttcaaacttcgccggatatcgacccctacgaaataagagcaagagccttaaaagaaaaaattaaactcgaagaacttggtagaatacttctacatatctgcaaacgaagaggattcaagtccaacagaaaaagtccaccaaaaaaagaagaacacggcaaaatcaaggatgcacaaaaaagattaaacgaagcccttaatgggaaaacattgggagagttctggcatgaaaaaagaacgcagaacaaattgacctcgatacgaaatagactcggcaactaccaatggattgcgacaagaggacaatacgaagatgagtttgaaaaaatctgggaaagacagcaaaaagaatatccgcaattattaacaaacgaatttaaaaaacagatttcagccattctttttaaacagataacgtatgagcaactgccaggaaaaatgaaaaagatgattggacaatgcagtttgttgccaaaagaaaaacgctgtcctctttcaaatcgtaaagctcaggagttcagatgcctgcaaaaaataaatgacttgttgattgttaaaagaggcaaacaaaaacctctttcgccagaacaaaggcaggctattattgacatattaaacacagaggaaaagcctgattttaaaaaaattcaaaaaaaattaaatcttgaagaagatgagcgatttaattttgagtttgaagatgacgcaaaactacagggcaatgaaaccgatgctcaactttcgaagttatttggaaaagatatctggcttggtttcaacgaaaaaataagagagcagatttggcagacagttattgagtatatcaataatgaacatgttaaagaagatgaaacagtccaaaggatagaacatatctgcgggcagaaaatagaaaagacagacaaactgccagagataaccttaccagatggttatgtgaagttctgcgaaaaggtgcttgataagattctgccatttatgagaaaaggcttgcaatattatgacgctgttaaaaatgcaagatttaagataagttgggcggcactagataaactttcaatgccagacagagaacacggcttttatattacaaatccaaatgtttcaacggttctgtttcaggtgcataaactggtaaatagactgatagcagagataggaaaacctgagcgaatagtcgtagaatttacacgtgagataaaagccgataaagaacgcagacaaaacattctgaaacttcagacagagagaagaaaagcaaaagaaagaattgcagaggagattaaacaaaaacaggaatgggatgggccggataagataccaaactgggccatagaaaaatatctgctgtgggacgaacaaaacactttgagtccatacagcggtagcggtaaatccataagtctttcggaacttttcagtagaaaaaccgagatcgaccacattctgccgtattcgatgacacttgatgactcattaagcaacaaggttgtttgttttgcttctgaaaatcaggagaaaggacaaaggacgcctttcgactggcttgggcataatgaagaaaaatggcagattgttcagcagacaatcgaccactggaagccccagagaaaaacccgtggcaggggcaaagatgcaaaaagtaaagctgataccaaggttataaatgcccgcaaatgggaaaaattcttcataactgcagaccagattgaagaagtttatgagcccgaaaggtatctagttgaaacaggttatattgcaaaggaagtccgcgaatatcttgaaagtttgtatgagcctgcagaatcaaaaaagaaagttcgtacaacaaaaggcggagttacatcacaactcagaaaatggtgggatttgaacaggattttaggtgttgacgaaagcaatggagaaaaagacgagcaaggcaattcggataagaaaaatcgtggcgacttaagacatcactcaattgatgctgccgtaatagccgttacagaaccaaaactcgtaaaaaaagttacctccgaaattcaaagatgttacccaagaaaaagtccaagagatatatatgttccaagaccgtggcagaattttgaggatgagattaagcaggccatgtcagatgtgaacatttcacatagaacacaaagaaaggtaaagggtgaattacacggacaaacacactattggaaagaaacaaacggaaaatatgcggggaaatatattacaacgaaatctctgaacagcttaagcgatgcagaggttaaacggatatgtgatgagaagataaagaaaatggcggaagataaaattagggagtttgagggcaacatcaaaaaagcattcgaccagcctttattgctaccaaacaaaaacggtgagcctataccagtaagaaaagtccgcatttgtacggataagacagataaaaatatgatgtttctaaagaaaggcctatattatgttgaaaggcctgaaaatcatcatatagaaatttttaaattaagtataaaagggaaaacaaaatacatatgcaaaacgtgggatatgtgggacattactaaaaggataagaaactgtcagccaatatatttgaaaaaacatcctgattacccagaagcgaagtttgtaatgtctctatgcaaaggtgaaactattgagcttgacggaacagcccaaaaaagagtattggctcgcataaaagaagtaggagcggataaaaataatggacttggaacagatattaaattatgggaagttgagattggaagattagacgaaaaaataaccaaatcaacccctaaagcatataggattcaaagtataaatgagttattagaaaggaatgcaaaaaaggtaatcgttgacttgttaggcagggtacgttgggcgaatgattaaaaaaataatagagatttcgcgagaacggacatctctatcaatacgattaggtcagctaataattagaacatcattaccagatgagtcgggcagccctgcttcgccatcttccttcgctaaagctacggaggacaaaaggctacgcagggtctccgctgcgcttcgaggcatggaaagtatcgagagaagcattccctgtgaagatattggcgtgcttttagttgacaatcaggcgacaaattatacacactcggtttttacagaactattaaaatgcggcgcggccgtggtgctttgcgataataatcatttgcctgccggtatgcttttgccgatagaagccaatacaatccagactgaaagatatgcaaagcagataaacgcgaaagagcctttgaaaaagaaactctggcaacagatagtccgggcaaaaatcagacatcaggcaaaacttattaaagacgaaacgcaaacttacaaagcgttaacggctttgataagtcaggttcgcagcggcgacccttctaatattgaggcgagagcaagcaaattattctggagcgcgtatttgcaggatttaatagattcctcggctgcgctcggaatgacatttaggcgggattctgaaggaaaaccgcctaataatttattgaattacggttatatggtaatgcgggctgcggtggcaagggcgatttgcagcgcgggattattgccttctatcgggcttcatcatcgaaacagatataacgcattttgtcttgctgatgatttggttgagccgttcaggggatttgtcgaagcaaaggttagggagattgtgcaggccggagactgggaagaactaacgcaagctataaaggcaagactgcttgaggttttgtatgaagaagtggaaattgcggattataggggacccttaatggttggactgcacagaacagcggcatcgcttgtccgatgtttttgcggagaacaaaaagaaattgaactaccgaaaatttagccacagagaacacagagaaaattattaaccacgaattaacacaaataaacacaaaaaaagggaaaatcggtgtaatccgtgaaatctgtggttaaaaaattatgataataagcgggtatagggcggtgtggatatttgcgatgtttgatttgccgacggatacggaaaaggcgagaaaagattatacacattttcgaaaaaatcttttaaaagacggctttgctatgatacaatactcggtatatgcaaggcactgtgcaagtgaggaaaatgccgatgttcattatcgcagggtacagatttttttgccgccggacggcgaggtccggctggttacaatcacagataaacagtttgaaaagatgcagattttctggggaaaaatgcgaaaaccaacgcctccggcaccgaaacagctcgaattattttgagcttattttgctgcaagtccttttcagacagcaggttgtggaaaaggcagtgtaacaaatcccgacctgatgtcaattcacaactacccgatagtaatacccatccagtaataagtgtaacaaatcccgacctgatgtcaattcacaacaaacttcggaactgataggtcatcatcagaagtgtaacaaatcccgacctgatgtcaattcacaacattcggcaggtattgtcaatattgttgactagtgtaacaaatcccgacctgatgtcaattcacaacttctggtccgcaaggcgcacagccgacagagtgtaacaaatcccgacctgatgtcaattcacaaccctccggtaataacacagtgtaaatgtgggagtgtaacaaatcccgacctgatgtcaattcacaacgctggcagagcctgcccggcttatcagataagtgtaacaaatcccgacctgatgtcaattcacaacacaatactgcccctggtcgattgcagccaagtgtaacaaatcccgacctgatgtcaattcacaacgtggggcctgcatcatcaccaccctgccagagtgtaacaaatcccgacctgatgtcaattcacaacgcctatgaagaggaggattctattcagtatagtgtaacaaatcccgacctgatgtcaattcacaacggacgtcgcttgacggtaaaaagtccgatgagtgtaacaaatcccgacctgatgtcaattcacaactggatacaggatgccggatagcaattaaagtgtaacaaatcccgacctgatgtcaattcacaactggtttgggtgggtaggggtgctttgcatagtgtaacaaatcccgacctgatgtcaattcacaactgtggtgggagaaaccttcgccgaaccttgagtgtaacaaatcccgacctgatgtcaattcacaacattggtttcttctgtccaagtaccgtatccagtgtaacaaatcccgacctgatgtcaattcacaactccaaatggcaatgggagaacaaattccgaagtgtaacaaatcccgacctgatgtcaattcacaacgactccgtaaaaacacgcaaggggtaggggagtgtaacaaatcccgacctgatgtcaattcacaacacacgaatatccggatgttgtttactccgaagtgtaacaaatcccgacctgatgtcaattcacaacggactccgtagaaacacgcaaggggtagggagtgtaacaaatcccgacctgatgtcaattcacaacgaaatagcgtgtacggaacgggggggcgcaaaataaccccccgatgaaggtggaggcaataattcgttatacatcgtgcgtaatacactaaaaaattatcgacgggaaatggtaaaaggcaaagggaaagtaaaggaagaatctcagatttcaaatttgagatttcagaaaaggattgccacggcctaacggcctcgcaatgaccccgatgaagtagtcccgatgagatagcagttatatacgttttagttaatctaaagcaagttctaaggaaattgcctaatgtatttcatgggcttgatatctcacagggtaaacttctcaatggatatttaattttctaattgtatagagaagcactccgctgaagtagtcaaagtgacacttcacagggtaaacttcaccccgatgagatagccgaagcggcatctcacagggcaggcagggtaaatctcacggggtaaacatctaacgggataaatctcacgtggcaaggaaaatcgaaagtagaaagtataacaggaaaaaattcacagtttttagttttgacccttcggcttcactcagggcacagttcttatttttgagtgttggaatccgccttcggtaaacctttgacggacaagtccgcaggaggaagattgaaatcattgatgtccgccgcgacattacccacctttttcccgatttgcagactaatatcattgctgtcaggttcgacgctgccggaaaggagtgcggccaattgttttaccgcaggatacgggtcatttttggcagtccattgcaaaacaggtaaaaacttctcctcctgacttctggcgagagcaaaaacagctattaaccttacctgccaattgggattttccagttctgccgatacggcctgcgtcagccgataatcgagtttgagccttaacatcgcagcgattgtctgcacctttaaaacccagtcatcttcagaaagacaccttgcgagcgccgagcttaataactgcggctctgcatacataaacctgtaagcaggtctcgtctggcggaagttttgctgttcggcaagtaatccagcaaaaagctgagcagattttgttttctgaccctgctggccttttttgagcgcatcaaatctctgctggagatagcgggtatcgagattgagtttttgacgggttataaccaccttcgcaggtgctattgcaagtgtgttttttatttcgccgtttgcggttatttgcgggtcgatacaggctgtatattcgagattcagctccgcctgcgggtagcagtccaaaatatattttactctgccggtatcgagccgcagaggaataaacagcgcattgcccggcctgatttcataagaggggcgaacggttttaacaataagagccgggagctgctcggtcaaatcgcctgcgattttggcatcgactcttatattgcctttgagcatcgcatcggggcatacaactatcggttctgaataattatttattattacgaggctgcctgtgatttcgctgccgtaagaaaacacagaaccttttacattgaactctatagataccatcttttcaggttcgataaactgactgaaaattgtctgcccgaaatcgttctgcagcgccgttataatcgctgcggaatcgaacggaggctggtattcggagccgaactctttaagttttgcttttgccttttgagcctcaaaacttcccggggcggtatcaaccacctttttaaggaggtccgctgccgaatttgcatcttttttttgcataagaatcatcgccttggcaagtcctgccgcctgtgtcgtggcgccgattttttccagcatcgaggcggcaagttcagcctgattgtttataacaagcgcataagcaaaaagcgaagcagcattgagcgagttcggctcggcatcataggccttggtcgcccaggtcagagtctcttctgaattgacatcgacaacaaaaccgaaaaaccatgcgaaatccgcaagctccgctgaagaaacctttagctcgccggcaaggattttatcgacatgagtctctaacccgtcaagtatcattttagaattctctttgtcgccgctctgcaaaactgctgccgatgcgattgcttcggcccgcacatcgaaaacacctttgtcacgaatctcctgcagaatctggcggcaccggctgtgctgtccggcgttataacaattaagcatccacggcctgtaaatatccagcccgacagatttgggtccgttgagatatttgaacaaatcaacacagtacctgtaggctgctgaggcaggttcgtaaagtccgagtatttccgcatattgcgcgaatctggcggcagagtcaaaatcaagaggattggcccttaccgcgaaacggagattctgaagataaagaatgtcgggcagcggtcgtccccctgtctcggcaagttcggcaagcttggcaaaggcaagacggttgtatttattcgctgaaaaggcccgcgcaagatacctttgagcctcagccgcatcggcagtttcagccgtcagaagcccaagctgtgtcaggatgtctgatgtaaacatgacattcttatgctggaactggttaagcagcttcgtcagcagcttttcgcgctgctctctgttgtcgagtctctcaagcagatacccgaccgcttttgacgacacttcaaggtctgttgagcggtcgatatattcatcaagcgccagtttaacagcgtctgaaaaattttcttcaggatattgccatgcgatattaataatatcagccagaacataatttgccctgctgtcgagattaaccgcagcattgaaaaatataatcgcctgccttgctgaaagaaaattagcatctttggcggtatatagctcatagccgatatcgtaaaaagttcttgccgtcagcggagaaagcaattctttccccttagcaaccgtaccagtgccgacagccatgttaacctcggcagctgcattagcctcggcaaccatattagctccgacggctgcagcagcagcggcagcagaaaaaattataaaaataaacaaaatcaaattttctgtttttttagcaaacattcacaaatccgttttatccgccgcaggcggattaaagtttcccttagccctcatatcggctataactatttataaatgaagtatttatgccacaaagatacccgccagaatcccactgtcccgcccatctgctttaacttgtttcatttcagtaacttacgacctgttatcagcgaaagcatctcaacctttaatagtaccgctccggccagatacaacaaagctgcaacaaaaaccgcggccagcaactgtacaacttgcggcaaagaatgagtcagattcaatataaaaaacgtaataacaaacatagctaaggtaataactatggtcttggcaagctcagcagcaacaccgtcaaatatttttctgccgagcttatcggccagaccttttaaaagtatcgtaacctgaagatacgaacacaggctcgttgcaagtgcaaggccggcagcgcccagcggccaaatcagtataaggttaagtataaaattcaataccaccgccagtagagtggtacgcatcggcttgcgcgagtcctgtgtcgaataatatgccttagcacatatctgctgcataaaaaagccggccagccctattgtgtaacatacgacgatagaagctgtaagagtcgtatcctgcgcagtaaatctgccgtgttcaaacaaaagatttatcaatggttcgcggaccagaatcagaccgacagtcgcaggaaaagcaacaaaaattgctcccttaatacttctcgctatcgttgtgcacagcgctgctgaatcttttctggctgcatctgcactcataaccggaaatacaaccgtcgctaaactgatgccgaacacgccgaacggaaattgatacagcctttgagcatagaatatccgtgaaaccgttcctgcatacatgggatatgcaatctcttttcccaaaaagaaaaaactcagacctttttctgcagaacttgaaaaccacagggcaatgaatttatccatcagcgtatttatctgcgtcgcggtaagtccaagaatcatcggccccataagcagtataaccttcttgaacgcctcagaccgtatatgccaggcaggcccgatttggacacccataatcttaagaggtatcaactgactgccgaactgaagaagtccggcaaatatcacacagcaagcctgaaaataggcctgcccgccaagattgctcaagaatatccaactgccgaagtacaatgaaactatcattactacgttcaggattatcggtgcaaatgcaggaagggcaaaatgccgatgcgaattaagaacacctcctgctattgcctcaagacatatcagaatcatataaggcagcattattcctgtaagcgacagctttagtgccgttgcggtcatcggcgaaaagaaaaaataccatacccagaccagtatttctccgctcagaacaatgcctgcaagtattacaaaaacggcggttaatactgttgaagcaagctggtcggcggaccggcggtctttgacaagttcctcgctgtaaacagggattagagaacttgatgctgccccctctccgaaaatgccgcgagcaagattgggtatcataaatgcgattacccagctgtccatcagttcggtcgccccgaaaaaaaacgcaaaggccatatcgcgaagcagccccgttatacggctgattatcgtaagaaaaactgtctgtctgaatcccttgaacatttgaccagtttatatccttaccaactcaattttgcaacgaccatcaaccattaaatttcctctgtccggcgacagccaacacaaatgcaaaaaccttatctgcgccggcatcttttaaaatcttcgcacattcattcagcgttgcaccggtcgtcttgacgtcatcaataagacaaatatttttgcccttgaagttgtgatttttcctgacggcaaaggcgcccctgacattccttgcccttgccgctgctgtaagagatgtctgttcttccgtatagcggatacaaacaaggtccgtgttgaacctcgcattaccgaagtttaaatctttggcgataagtgcggactgattgaaaccccgctgaaatcttcttcgccagtgcagcggcaccggcacaatataatctatcggctcgggaaaatcagaccggctgattgcatcctgcgcaagattcaaaagcggctccagaagatatgtgcggtcggccagtttgaacctcacaatcagactgctcaacggcggcctgtaaattcctgcacaagcaattgaatcaaagttaaaattttcttctcggcagccggcacagccgtcgggcaggcgagcaaaaacgcttaactcttttccgcagcgcaaacaatatgaatcgacaatacaaaaaccgagattctgccagcacttagaacagaaatatttctcatcctcgacaataacttggccgcaacatcgacagtaattctgccaggcaatctgccgcaggtttttaaaaaaaattccagccgaattcaaaattttcttcacaccggcaattataaaaaccgccgcagaaaaaataaagtaatttaactactcaaggtcataagcgctattatcaggcgaaagaaaacccgtacccggagctatctttttgtcgaggaatttgctgccggtctggttatagcacttcctgaccggacgactgctgccgtcgcaccacgcgacgttagtcttgcctaagtgcctgtaaccctgagtgccggcgtacctgtcggaaaacgtccagtcagcagtgctcggttttggcgaacgcatatatttattagcaccggcggcatactggccatcgccaaacagggcacattcgccgggccgttttacctcgtccactcttgccgacgtctgtatgcactcatactggccatggccaatgtaacttgtattgtaattatagccggtataagggtcgtatgggtcatttgacttgccgttaaacgcgggacactgctggattttctcaatcatctgtccctgccacaacaaccccggcacaaccgttgtctcgccaagtcttaataccgcagtaaaatcccacctgtagtaagtccatccttcggtggtatcactcttatagtaggcaatcggataatacccgccatagttttgcgtataaaccgacgccgcgacagccatctgtcgcagattgctcaaacacacaacagccttgctctggctgcgtgccctcgataaagctggcagcagcaatcctgtcagcatagcgataatcgagattaccgtcagcagttctgccagcgaaaacgccgaccttttaccatcctttaatcgcaatcccatgtacattgcagccaatgctccgtcaacaacgcaaaatcgctgaaatccaccctgcaatttttatcgatatcccctgtcggatacggatgtttgtaatcgccgcagccggccacgtcggcaaaagcgtcaatctcccccgccgcgaagttagcatcaataacctgcactctgatatatcgaatccattttctacccgtctgcgggtcaacatcaagtgccgcgtaatcttcgggagacaactttgcaatatcaaatcctgttccgccggccgaaccgtcataaagctcaatagcctctgcggcggccaggcctgaaaagtcagacaacgaaagattcgggtcaaccggacggagccagttctgctcagaggcccagttgttagtctgactgttccacgcaaaggcattcgtaggaaaaatgtcgtctgcatacgggccatcttcaaacgaataccatggaccatcagggtcctgcgcaaccgatacaatcataggctcatcattgacgctcgccggcgagataaggcggtaagcatccatatcggtgttggcatccacaacgccgctgcctacaaaagcagagttgccgaaaataataaagtctatgccgtatggattggccgggtcatcgccgacattgtggtcaaagcccacaacaatattggcatctacccccagcgtcaaaattagtttgtgcccgtcaggcgaaacattgtacgccggaaacacaagggaacatgcaaacgtcaggcctccataatcttttcctgttatccaggtcgttggtttgcccagcacagcattcgggtcgtcatacggaggtactcctaaaacaccgctgtaacttatgacatcagcagcgaag

SEQ ID NO: 3382 - DNA, 9423 bp, synthetic construct
  misc_feature 1..9423: note = Synthetic
  source 1..9423: mol_type = other DNA
attcttcgttttgcggtataatacggcggacaaatcacagcgatgttattttttagtgaggcaagtaggtgaagcacctcacttccctacctccttacttccttacctctttatatttaaagcaatatttttaacggccagaatgtcgagtatatggccttgaataccacggccagtacgaagtcgatggctaaaatcaaaatgaagctgccgacgaatgcttcggtgcatgcttgcccgacgccttgtgcgccttctttgcagtggaagcctttatagcagcttacccctgcgatagcggctccgaagaagaacccttttatgataccgattgtgatatcccacatttctacgccggctgctgagaagccccaatatgctcggctgtttattccgaagtgcattacgctgattatataccccccgattatgcccagaaagtcggcatatattatcaagaatggtgtcaatagtaggcaggctatgagtcgtggtgcgactaaatatctgatggggtcggttcccatgcttctgacggctattatttgttctgtaacgttcattgtccccagttctgctgttagagctccgccgactcttcctgcgagcattacagccgccagtacggggcctaattctttgactacggacaggtttattaatacgccgaggtgttcttcgattcccattcccgccagctggtcgtacgcttgtattgccagcaccatccccacaaacgccccggtaaccatcacgactggtacggagcggacgccgatggccaacatctgattccaaatcatcggatacgtcgcaggacgaaaacaagcagccacagaagcaacagcagaagcaacctgaaaacgagcaaatctgccgctgtggttgacgccgcgaatcaccatcgcaccaagcgtctcgaccatcacaccatttttccgctgttttaagtcagccataaattcccgtccccagttgttttagcggcaatttgcccgtttgtcaaccccacacctatttgctattcaagcgattttattaccataaattcatcaaaatgtgcgggcaggaataatcgaactctgccgaaacgtgccgcgggattaaatacttaataggtgcggggtcaaccccacacctgttcgctatttaagcaatttaacccctttattctttagaatttaggggcggtatgcttttttatgcgttgtttttagccacagatttcacagaggatttgcactttaaattgttggcaggggttttttatgcgcggaaaaaaggcgaggcctctttcgattcctcgccaggatgctccgtagagctgccccgccttttgggcaggactgcctgcaacttttcttttgttatgaaaagaacaggtcgggattagttacacgattatcactataaacttttttgtggacaaatcaagtgttttttgtataatttccgccggataaacacagagagaaaaaatacatctttatcttgttagcaggaggcagattatgagttatgtgctgggtctcgatttagggccatcttctattggctgggcggctgtaaccatcgatgaaaacggcaattataaaggcttagccaaaattccagatggtccaaattttatgcccgcaattggggcaagaatttttccggctggtgttgagagatatggacaagggaagagagagcaaacacgaaacaagacacgcagagaaaaacgtggaacaaggagaaccctgagaagaagaaaagcacgacggacaaagttaatagcccttcttcgtaccaacaatattcttcctcaagatgatgccgaactgcaaaagcttcagcaaaccgatccatacgaattaagagctaaagcaataaaggaaaacgaacagttatctctaacagaacttggacgaatatttttacatctctgtaaaaaacgtggctttaaatcaaacagaaaagcacctcctaaaaaggaggaaaagggaaaaatcaacgacgcaaagaacaaattcaaagaagaacttggcaacaaaacccccggccaattatggcacgagaaaagaaccgcagataaattcaaggccataaaaaataaagggggaaaatttcaaggtttagccgtcagagagcaatataaggaagagtttaataggatatgggacaatcaaaagaagatttaccaaaaaaatggcaacggcggtttcttcagtgttgaaatgaaaaaacaaatcgaaagtcttcttttcgaccagatttcatataaacaactaccatcaaaaatgaggaaaatgtgggggcgatgcagtttaatgccaaaagaattcaggtgttctcttgcaaatcgaaaagcacaacggttcagattcttgcagaaagtaaatgaccttcgtgttatcaagaggggtataacaagagggctgaacgatgaagaacgcaaaaagataatcaatctgctatcctgtaaagacgaggttaaccttaaagatataagaaaagaattagaattagcagatgatgaacgactgaattttgagtttgacgatgataatacactgaccggtaacgaaatagactcacagctttgtaaacttgtcgggaaagatgtgtggctgaatttttcagaggaaacaagagataaaatctggcaggaaattttgaggtatattgaagatgaaagaggagaaattaccgagataaaaaccgctgatgagatttacagaatttgtggcataaaaagtatcgacttaaaaaagatttccgaaattgaactgcctgatggaaatgtaaaattctgtgagaaagttcttaacgaaatacttccaaaaatgtcaaaagaaggattaccgctatctgacgccataaaagccgcaggatttaagcagaaatgggatgaattgccaagtttaccagtgccggacaaaaaggctggtttttatattaccaacccaaatgtagcaacggttttgtatcaggtgcatcggcttgtaaataggcttatagccgaaataggcaagccagaaaaaatagttattgaatttacaagagatttaaaagcaagtaaaaaacaacgacaaaagattttgaaacaacagagtgaaagaagaaggacaaaagctttaatagcagaagatgtgcaaaagtcaccggagtggaaatggggcaaaaaaattccgccctgggcgatagaaaaatatctgctatgggttgaacaaaatacattaagtccttatagcggggaccaaatttcagtaggtcaactttttagtgaagatacacaaattgaccatattctgccatattcaatgagtcttgataattcgatgagtaataaagttgtctgttttaccgccgagaatcaagacaaaaagcaaaaaactgtttttgactggctgggccataatgaaataaaatgggaaagggtccaaaatgcaatagatcattggaaaccgcagagaaaaactcgtgggtcaaaaaaaactgcaagaaacagcgctgattcaaaattaattaatgaaagaaaatgggaaaggttttttatcaccggagaccaaattgacgaaatttatgagccggaaagatacttaaatgaggctggttatattgccaacgaaactcgcgaatatcttgagcgactttataatagtaatgaggcaaaaaaacgcgttaaaacaacaaagggcggcgtaacaggtgaattacgaaaatggtgggatttgaatagaattctcggagttgagcgaaaaatcgatgaatcggaagaaaacaccgatgcacaaaaacagcctgcaaaaaagaaccgagaggacttaagacaccacgctatcgatgctgctgtaattgctgttactgaaccaaaaactattgaaaaagtaacacatgagttgcagagagcatatccaaggaagagacgaaaggaaatatatgttgaaaggccatggaaagactttgaagaggaattagctgctgctgttgatttggttaaaatttctcacaggacgcaaagaaaagtatgcggcgaacttcatgcagcaacgcactattggaaagaaacgaacggaaaatatgcaggcaaatacataacaagaaaatttttgaccgatttgagcaaagccgaagttggacagatatgcgatgaggctattaaaaaacttgtgaaggatagaataaaagaaaaaggagatgttaaaggtgcgtttgatagttctatttatttgccaaataaagaaggaacacctgttcctatttggaaagtacgaatttggacaaagcatacagatgaaaatatgattccaattcgaggcaaagaaggagaacctcaaacggtgtgggtcgagaaacctgaaaatcatcacattgagatattccaaataaaagaaaatggtataaaaagatatatctgcaagatttggaatatatgggagataagccaacgaatagaagaatataaaaagcaagaaataaaggataaagatccaatagtcttaagaaaacatccaaaccatcccgatgctgaatttgtgatgtggctatcaaaggcagataccgtattgattaaaaacaacgataaaaaagagattctcgccagaattaccggtattggagaaggagacgaaagagatgaatctgttgatttgaaattatgggagcttcgggtcaattgtaagtcaactgatttgcctacgaaagaaacaaaagatggatatagactacgaaacatcaatgattttatggcaatgacgccgaaaaaagttactgtggatttgcttggaagaataaggtgggcagagagaaaaacaggctgggctaagtgcttcggaaatgattaaaaagataattgagatatcgcgagaacggacatctctttcgataaaatacgggcaattgataatcaggtcatcagattctgataggggtaaagaaccgccggtaaaaccggcggctaaatatgaggaaaggtctattccctgcgaagatatcggcgtacttttagtcgataatccggcgatagtttatacgcactcggtttttacagaattattaaagcacggcacggctgtcgtgttttgcggcaatgaccatttacccgccgggtgcttattgccgattgaaagcaattcgattcagacacagcgaatcgcacagcaaataaaaacaagagagcctttgagaaagaaactgtggcagcaaataatccgcgcgaaaatcagacatcaggcaaaaattgtaaaagataatacgcaaattcagaaagcattaacagctttaatcagtcaggttcgcagcggcgacccatcgaatgtcgaggcaagggcaagcaaattattctggagtgcatatttgcaggatgtactattcaggcgggatgccgaaggcaaaccgccgaacaatttgctgaattacggttatatggtaatgcgtgcggcggtagcgagagcgatttgcagcgcgggattattgccatcggtgggacttcatcatcgaaataaatataacgcattttgtcttgcggatgatttggttgagcctttcaggggatatgttgaggtaaaggttagagagattgttcaaagcgaagactgggaagaattgacacaggtgataaaagcaaggctgcttgaggttttatacgaagaagtagaaatcgccggtttcaaagggccgttaatggtcgggcttcacaggacggcggcatcgcttgtaaggtgttttagcgaagaacaaaaagaaatagatttaccgaagatatagacacagactaacacggaattttttagacacggatttacactgattaacactgtataaattatatatctctgtgttctctgtgagctcggtggctaataaaatgattataagcgggtatagagcggtgtggatatttacgatgtttgatttgccgacggatacggaaaaggcgcgaaaagattatacgcattttcgaaaaaatcttttgaaggacggctttgctatgatacaatactcggtgtatgcaaggcactgtgcaagtgaggaaaatgccgatgttcattaccgcaggatacagatttttttgccgccggacggcgaggttcggctgcttacaattactgataaacagttcgaaaagatgcggattttctgggggaaaatgcgaaaaccgacaccacctgcacctaaacaactcgaattattttgagcttgttttgacgcaaacccatttcagacaacaggtaatggaaaaggtagtgtaactaatcccgacctgatgtcaatccaccttcgttaaaaaactacggcggacaagtccacaaccggacagtctcgtccacaagaggaaaaatggcagcagagaggggcgatttatttacgaaaaacgcaatatcaagacggggggggcagaagcacaaaaaaatataagcatgcaagtgtacaccaatggtttcaatatagaggcttataagaatacttgattaaaagacctattttagatatagatatactaaatgctgcactacacagacagaaaaaacagaatacatataattaccctcgataaggttctcgccgcagatatttccgaaagactgtcggaatatcccgacacaagctcggcacagttaataccgcccggaaacggccaaagtattacgcccgaagatatcctcaaaaccgcacgcgataccgtcgattcgaaaatcctgattatggatgtacgaacccagacaaaaccgccccttcagcaggcttacagcgatatagcaagattcaaccgcgccgatgcgaataatttctgccatatagtccttatcggcgacgggccgagcgactttctcctgcgaagtaaaggaccaaacgcattccaaaactacctgtcggatttgagatgtgattacagccccacagtgttcttcgcaaacccgtttctttattatacccaggaggaaattcaggatgcgattcaaaaccgcaacgcactgcccgaaaagctcccgaaacgactggaaaaatatttcagaaaagatgtgcctgtaaaaaccatctacgagtatttcagggcggctgaaaaacagggcgaaataaaagtcaaaagaaaaaaacaaagactaaaacagctaaagaaaattttcctgaaattagttgccgaggatttcggcgacgaggtcgataaactcgccgatgccctgacaaaacaaggctgctcattccccggcgaggcgctcaaactcaatatctatccgttctgcttcgaagaatgggtgacggatttgttgcaaatggtaccaagagctgctaaagattaacccccgcaaagtttttgaggattttcgagggggttttgagtataatgccgttcgttaaaggattaaaaatatggcatataaaagcataatttcttattcagatattgtgaggcgagaagatattatgctccagcgaggaatgaactaccgaatcaaacacggatactcaataatcctaatgagcgtaagaaaaggagcaccatacaaagaccgctggcatccagacaccggaatcctcgaatacgaaggacacgatgaattaaaacgaaaaggtataaacccaaaaaaagaagaccagccgcttgaaacaacatccggcagattgaccgaaaacggtaaattttttcaggctgctgctgattacaaggccaaaaaacgaaaacctgaattagtccaagtctatgaaaaaatctcgtcgggtatatggtgcgatagaggaaaatacgaattaatcgatgctaaaattgtttctgatgatgggcgaaaggtttgcaggtttttcttaagacctgcaaaggcgcctttcagaagagagccatttttgaaagtaacgcgtgcgattccgacacctgttaaagtcgaggtctggaaacgcgaccaaggaaaatgcgttatctgcggcagtaaagataatcttcatttcgaccacgatgtaccttattcaaaaggcggaagcagtataacagcgaaaaatgtcagactgctttgcgcaagacacaatttgtccaagtcggataagataatgtcctttgcgccgtggtttgcaacaattgcatctgcgatgattgaaaaagcagggtaaaacagctaatgtaaattaaacacaaacctcttcaagaggtttgggtatctgatcccactctttaccgtcgagcgtacggccgttttttttcttattgaacccaccccattgtttaaagaagaacgggacattctgctctaagcattgctctctaatgtttctgacccagtcggcctctatcggtcttgcaccgggtccggattctccgcccgttataacccaatcaataccagtcaaatctaatatcccgacatcatccagcaaaggctctaaagataaaaatttgacgttggcttttgtttgccgcaaaagttcgattctgtatttgtaatccgcggcctctacagtaactcctgcccatacattttttgaccacagcaaagaatctgataactccgccagtctttctgctcttttggttaagaattgataaatatgctgaggtgtccggttcataacatcaaaaattttagatataaattcacagggaactttaatatggaaaaggtcgctcattgaattaacgaaaatcatctgcggctttttccagcctaacggcaagttaagcgcttttggatgacaggttactttaaaaccgttgcggtaattcggctgtcccatcgcctgcaatcttagagccattctcttggcatagcagtttttacatcctgcgcttatctccgagcatcctgttacaggattccacgtcgattctgtccattctatcttggtatttcccatataagtgaatttttattctttcaccgaaaaagtcactattatatctttcttgccgctataataattccaaccgatatagaagtgtttggaatctttcggaacagtaatgagtttaccttctttttgtattgcagtcaatatttcattcatatgtttgggtagaaaaccattttcaagacaatatttgtaaagttccttatttgttaaagattttttcattaattcagctaataagttattttgaaattcatcttttttacgcggaatgctgagttccttaaataaaagctgtgtattccgaaaggcatctcggtcaatgttatagtttgcttctccggtttcaggatcaatatcccaacataccctcaaaaacttctctaatccatataaactactcgatccaaatatgaggccatagacatttgcatcttttttaattgagaatggagcaatataataatttttatcagcaggtattaattttcggtaatattgattaaaacctatcccaaaacctcaatttttgggttaatatgagccgatatatggtttatggacataacaaacgaacaatggcaacggattgcaaagttc

SEQ ID NO: 3383 - DNA, 15807 bp, synthetic construct
  misc_feature 1..15807: note = Synthetic
  source 1..15807: mol_type = other DNA
ctcgcgcccatccgtttttgcaaataggacgtctgtgggcgccgccgcgggaatcccctgtgcgcccgatcgctttgatgggctggcgggctcgggtttctggtctgaaaatggttgatgtacgcggggaatccgccgtggataaagaagcgcgccgcccgggcgcctcgccggcctttggaggcaggaaggcggagcagaaatgcccgcagggcgggggatgacagcaaaggaagtccctatcgtttccgaaggcggcgccgacggagagcgtcggcgggccgccgtgcggcttcccctcctcttgcgcaggcgccgggaatcttacgccctgcgggcagttacgaacgagccggcaagacggaaaagagcggatgtcaattaattggccgtccgcctctccgggcgcggaggccggatgacaatttcccccgctttggccaagttggagcgatcgcgggcgatttgctcgaaatattccggatcctgcatccagacgaattcatcatgcgcgcgcctcatgtcggcctgtgtgcggcgcagggcagtttgtgcctcctctctttcctgttcaatctggcgcagctcgacaagaggcttgagcacgatcagagaaacgagaaaaatgagcgaaaccaagaaaatcattccgaaaacggacaaaatggaaccgatgccctccgtccgttcccggcggagaagatccagctcatcgcagcgccgacgctttgacaagctcaggaaaggacggaagagcatggttcggcaagtatgctttcgagcgggcgctcagagaatgcccagcgtaccggcgaaaatggcgtctttacccagctgctgctcgattcggagcagctggttgtatttggcgagcctgtcggaacggctcagcgagcccgtcttgatctgccctgcgcgcgtagcgacggcgagatcggcgatcgtcgtgtcttccgtttcgccggagcgatgggaaacgacggcatggtaggaatgatcctgagccatggcgattgcgtcgaaagtttctgtcagagagccgatttggttgaccttcacaagaatggcgttggccacctgctcggcgatgccccggctgaggaattccgtgttcgtcacgaagagatcgtcccccacgagctgcatttgagagcccagctgggtggtgaggagcttccagccttcccagtcgttttcggcgcagccgtcttcgatggagagaatggggtaggagcccaggagattgcgataatactcgaccatctcctcagccgtcttgctgccttcgccgctcttcttgaagatgtagcgatcggtttcaggatcgtagaattcagaggacgccacgtcgagcgcgatgcccacgtctttgccgggctggtagccggcgcgttcgatggcctgcatgatgacgtcgagagcgtctttcgtggagtggagggaaggagcgaagccgccttcgtcccccaccgccgtggagagcccgcgatcgtgcagcacggccttgagggagtggaacacttcggcgccccagcgcagggcatcggcgaaagtgggcgcgcctttcggcatgatcatgaattcctggatgtcgatgggcgcgtcggagtgggctccgccgttgaggatgttcatcatcggcacgggaagaatcttggcgttcggcccgccgagatatttgtagaggggcagccccacggcggcggcggcggcatgagccacggccagggaggcgcccagcacggcgttcgcccccagattggccttgtttttggtgccgtcaagcgcaagcatcacgcggtcgacttccacttggtttgtcgcatccaagcctacgagagccggcgcgattttttcgttcacattggttacggctttgagcacgccgcgtccgcagtaacggcggggatccttgtccctcagttctaaggcttcgtgttcaccggtggaagcgccgctgggcaccgaggcgcgcccgacgacaccgcctttcaatacgatttccgcttcgacggtgggatttccgcgcgaatccagcacctcgcgcgccgagacagagacgatttctgtatgcatggggattagataccacatttccgcgcggattcaaagcttttttccggaatttcccgccgccgcgccagcggagtcttctgcttttccccgtccgcccgctggacggcgcgcccttcgcgcgggcggccccatgccgggctttccgttcagcaagctgaaactgctgatgaaaaaggggaaccggcgggcggccggttccccggaaatcagggcacagaatggcagggctacaaattcggccccaattcgatgatggaatattctccgtcgccgaggcggtacacgatctgcagcacattgcgccgcgcgtttctgtacaggacaaagggtttgtccgtgagctcgagggccatgatggcctgctccttgtacaaggtctgcagttcgtagccttcgcgctggatgcggacgggcttgggatcttcggccgcgtccacgtcgtagtccagtacgttttcatcgtacacgacttcgtccaagtgccggatgctttccgagcggtgcggccggaaagtcttcatcagacgtgtcttgtgcttgcgcatgcggcgcatgattttcgtgaccgtttcgtcgatggccgcatagagatcgatgccggccgtcgacgcctggatcgtgatgtgatcggcgcaaaaaagaatgatttcagcgatttggcggcccttctggacatcgacgatgacacgcgcttcgacaatccgcgggtaatcaatgttgatggattcgatcttcttggtggcgaagtcgcggattgcctccgtcacttcgatgtgccgccccgttaccgtaatgtttggatccacgttggctgttttcatggtctggtacctctttctaatttgttcttattgcgaaagactcgccgttcgcttccgcgatgatagccgtcgggccgcgttcttgtcgagaaaaaaaagttttctgacaagaaaattgccaacggctctttcttgtgccatgatgaggccatggaacgacaagatggccgtttggcggacgagctccgcaagattcaatttattccggggatagctccgcatgcagcggcttcggtgctcagctgtttcggcggcacccgcgtgatttgcgccgtgacggtcgaggaagatgtgccccgatggatgaaggcgcagcgcgtggaaggcggctggctgacggcggagtactccatgctcccctattccacgctcgaccgcaagagacgcgatatcgcgaacggcagactcgacggccgatcgagcgaaattcagcgtttgatcgggcggtcgcttcgcgccgtggtcgatttgaaaaaactgggctcccgcaccgtgtgggtcgattgtgatgtgctcgaggccgacggagggacgcgcacggcttccatcaccggctccgccgtggcggcctcccttgccttcgagaaactcgtggccgaaggaagactcgccgaaaatcccctccgcgggatggtggccgccatttccgtggggatgctgaagggcgcgcctcttctcgatctctgttatgaggaggatcgggatgccgatgtggatatgaacgtggtcatgacggaaaagggcgaattcgtcgaaatccaggggtcgggcgaagaggccgtgttcaccgggaaagaaatggaggccatgctcgccctggcccgcaagggcgttgccgaactcgtccgcattcagcgggaaacagtctctctgaccgcgcgcccgggtgcggaggatctggcctccctggcctctttctttgcaaaaaaatgaggtccctttgttacttgatgcttgcgtgaatgaaaaaaatctgctaaaagaaaacgtcaataagccttgtgcatctatgaaagcaaaattgatccgcaaacagaaccgctccggtttcaccctgattgagttgatggtggtgatcgccattattgccgccatcgcaggcgtggcctaccccattgttttgaatcagcgcaacgcgggcgaccgcaatgtggcgcagtccaacctgaccaatctccataagaccctgatgagcttctccaatgattacggcgcctacccctgcgatacattggcggagcgctttctggaggatgagaagaacaacgacatcgactacggcccgatcaccggcaacacctccaattgctacctccggcagcttttctatttgaatgcggtggaaagcgaagaaaatttctatgccaaaatcaacggtttggggcgcatgagcaggcagccggacaataagatcgccaaagggcatgcccttgaaaagggcgaatgcgggttcgcctacgtgatgaccaaatcggatgaggagggcgccgacgtcaagggaagcgtcacggccatgaacgctcccctgctcatgacgtctgtagcggggaggacgcccatgtccggaggcgatgtggtgtttgacggggaaagttttcagatgtatgcgctggttctcttcaatgacggcagcgtcaagacgaaggaattgacgagtgatccctcggatgaccgcaaggggcgtttgaaggatcttttccctgagaacaagaagacgggcgtcagccaggcggatcgctacgtcgtgctgcccccggatttgtaaagcgcatatcgccgatgtccgtgaaagccgttccgtccgcctgcgggacggctttctcatagccgccgatgaacgccgcgcggcggagatatggccggcggaatatgccgggcgaggggttcttgtcaggaaagatgcggatcgacggcgcccccggaagagttgtggttcacggccgggctttttttctcgccaaacgggcttcttccgcttatactggctgagatggatgccgtttgttccatttttgtccattattcccgtccggatgcctcgttgatttgtctggagcgcatcctgcggcaagagcgccccgtacaaaaaatagtcgtcgtcaacaacggctctccgagcgatcccgtcctccggcaatttgcggattccgcccgccggcacggccgggagggcgatcttcatatcgtgcagatgccccgtaatgcaggtaatgcgggagggtgcgccgcggggctcgattacgccttcaatttccccggcgtcaattacgcgtgggtgctcgacgacgattcctggcctcgctgcgatacgctgcgccgcctcacggaggcgccctcggctctgcccggggaaggccgccctctgatccgcatggctctcgtggtcgatcccgcgagagatcatgagctcacctggccgctcaccgcgcgctccacgcacgatgacgccgagccctggcagcatttctgcaggcgggactctcttcccgaacaggcgtatatccccagcagaggcggctggctcggggctctttatcccagggaactctgggagaccgtaggcgctccgactccgggattgttcattcggggcgaagacgaggaatatccctggctggcctgctcgtcgggctttcgcaccattaccgtggccggggctttgctggagcatccctccccgccgcaggcgctgattcgctacgatgtggggggcggttcctttttttacgagccgggcatccccgtttcgcgcttttactacaagacgcgcaactgggcgtggctccaaaagcgcaagaggccggggcggtccttgtatctgttcgccgcgtgcggctgctgcgctgttctggcaatgaacgccatgctgcagaccggagaaatctccgccgaaaggttcgcggcgctcctgtgcgctctctggaacggggcccgcggcaagcttcgcccttgggggcggccgggttcctgagctgaagccgcgccttctgcggccgcgtctgccggggcgtgaccgcggtttccccggagcgttccgccgggccggctttgatattttccgcgccggatccatgttggggcttgcaatcgggcggaaaatgcagtaataaaagggcgcacagacgatattgatattgcacttatgaacgctattgtacaaacagcctgtaagttcgtcacgtcttcgattggccgcaagattattgtggccgtcaccggggcgtgccttctcgcctttctcgtggggcatctgattggcaacctgaccgtttacggcgggcgggaatggatcaacaattacgccttcggccttcacgccatgccctcctgggtgctgtggagcattcggctggggctgcttgcagtcgctctgatccacgtgatctacacgctcgcgctgcagtatgaaaaccggaatgcgcggcgtcagtatgagtacaggaacacaatccaggccacgctctcctcgcgcacgatgctcgtcagcggctgcatgattctctgcttcgtgcttttccacctgtttcaatttcccgctcaagtggagacgctcgacggcaggccggactgctatgccctgattgcgggcgccttcgcgaatcctttctgctcggccttctacatcattgccatcttctgcctcggctgccatgtgtgccacggagtggaatccgtgatgcagacagcaggcttgagcacgaaaaaaatccggcctctctacaagatcgcgtcctggtgctatgcggtcattgtctgcggcgccttcatctcgatccccgtcagcgttcttctcggcattatcagcaataactaaaaccaccttaaattccatacagccatgatcgacttccccaccagcgacgcgatgccgtccgcctgcattcccgaaggacccatcgaacagaaatggacaaaatacaagcgcgacgccaaattgatcaatccgaacaaccgccgcaagtatacggtgatcatcgtcggctccgggttggcgggcggttccgccgcggccactctggccgagcagggctacaacgtgaagtgcttctgctaccaggacagcccgcgccgcgctcattccatcgccgctcagggcggcatcaacgccaccaaaaactaccagaatgacggcgactccgtctatcgcctcttttacgatacggtgaaaggcggcgatttccgcgcccgcgaggcgaatgtctaccgcctcgcggaggtgtccgccaatattatcgaccaatgcgtcgcgcagggcgtgccgttcgggcgcgaatacggcgggctgctcgacaaccgctccttcggcggggcccagctgaagcgcacgttttattcccggggacagacggggcagcagctgctgctcggggcttatcaagccatggagaaggagattgcccagggccacatcgaaatgttcacccgccacgaaatgatggatctcgtggtggtggacgggcacgccaagggcattgtgacgcgcaatctggtgacgggtgagatcaagtcccatgcgggcgatacggttctgctctgcacggggggctacggcaatgtgttcttcctttccaccaacgccatgggctgcaacgtgacggcggcctacaaagcctacaagcgcggcgcctatttcgccaatccctgcttcacgcagattcaccccacctgcattccggtgaagggcgactatcagtccaagctcacgctgatgtcggagtcccttcgcaacagcggccgcatctgggtgcccaaatcgcgcgaagtggccgaaaagatccgcagcaggcagatcagaccttcggacgttcccgatgaagagcgtgactattacctcgaacgcaaatacccctcgttcggcaaccttgcgccgagggacatttcctcccgtgcggcgaaagaggcgtgtgacgacggccggggcgtggcggtcactggcaagggcgtgttcctcgatttctcggatgagatcaggcgcatggggcgggagtggatcgacggccaatatggcaacctcttcgatatgtacgaggaaatcaccgacgacgacccccacgaaacgccgatgatgatctaccccgcgtcgcactacacgatgggcggcctttgggtggattacaacctgatgtcgagcatccccgggctgcatgtgctgggcgaggccaatttctccgaccacggggcgaaccgcctcggcgcctcggctctcatgcaggggctctctgacggctacttcgtgatccccgccacgctgcccacttacctcacaagcgtcaaacccggcgccgtcaccacggcggctcccgagttcaaggccgccgaagacgccgtgaaggagcgcattcagaagttgttcgaggtgaaaggcacgaagacggtcgactccatccaccgggagctcgggcacgtgatgtgggaaaattgcggcatggcccgcacggaagagagcctcgaggccgccatcaagcgcatccccgaaatccgggaagatttttggaaaaacgtgcgcgtgacaggatctgccgacgggatcaaccccgagcttgaaaaggcgtgccgcgtggccgactttttggaattcgcccagctgctctgctatgacgccctggcgcgcgaagaatcctgcggcgcccatttccgcctcgaataccagatgcccgatggggaagccaagagaaacgatgaaaaattcgcctatgtggcggcctgggaattcaccggggtggacagcctccccatcctgcacaaggaaccgctgacattcgacaacgtccatctcgccattcgcaattacaaataatctgctccgtatcatcataaaacccaatcaaaagatcatcatggccaaaactctcaatcttacgctgaaggtctggagacaggagagcgccgaggcgcaagggcgcatggaaacctacgccgccaaggacatccccgaagacgcctcctttctggaaatgcttgatatcgtgaatgagggtctcgtttccgagggaaaggagcccatagcattcgatcatgattgccgggaaggcatatgcggcatgtgctcgctcacgatcaacggcattccccacgggcccgaaaagaaggtcaccacctgccagctgcacatgcgcaagttcaaggacggcgacacgatctggatcgagccgttccgcgcgaaggcgtttccaattctgcgcgacttgatggtggaccgctcggcgcttgataagataatagccgccgggggttacatcagcgtacgtacgggttccgccccgaatgccaacaacatccccatccgcaagagcacgtccgacgcagcctttgatgctgccgcctgcataggctgcggagcctgcgtggcatcatgcaagaatgcctccgcgatgctctttacttcggccaaggcggcgcatttgaacctgctgccccagggtaaaccggagaagaaccggcgtgtgctggccatggtgcgccagatggacgcgctgggcttcggcaactgcaccaatcaatacgaatgcgaagcggcctgtccgaaggggataagcgtggacaacatcgccaaattgaaccgggactacatggccgcctgcgcggcggaggccgtcggggtgtactgaaaggcgaagctctcgtttcagggaagaggcgttccgccgggggcgcctcttttttcgcgtcgggcgggtcggccgcccctcaaagggaaagcgcaagccgcgcccgtttttacgtacggtgcgggagaacgcgggggagagccgccgcgtcttctttccctatggccgtgtgcatgcggcgcgcaatacttgatcacacattgcctgacacccttgcgggacagtgtttatattctcggacgcacgagcattgcaagggagcgggcgatctttgccgcagatgcctttctgaacgatgcaggattgaaattcagtgagtagaaccgaactcggcctacagctctgcgacgaaagagcggggagataaaaaaggctctccatttcaggagagccaggattaaatgcttttgaagccgatgtggcgaagccagggaaacggtctgcatttcaaattttgtcttgaatccgcacaaaatatatgatagataaaacgaaatgtcaacatcgtcttctcgaaaacttcttttttctttcgatataggctattcctccatcgggtgggctgtaattcagatgggatcggaagtggagatcataggttctggggtggtgcttttcccgaaagatgattgtttggcctcgcagagaagaatgcatcggagaatgcgaagaaccatacgcgcccgccggcaacgcatcgatcgcatagggaagattcttgaacattatggtgtgatcactccccaagagcgccgcatgccggggcaccccgccccattcgttcttgctgctgaggcattatccggaaagagaatccttacgggactggaagtctggcacctgatgcgctggtatgcacacaatcgtggttatgacgggaacgcccgttgggcaaaaaccacccaagagcgcgaggaagagaaagaagaggctcagagagtggagacggccaaaaagaagatggaagagatgggaacggcgactatggcggagacgatggctgctctcttgggcctgaaagatggggaatgggattcagggaaagccttcaagacgctcaatatggcatttccccgcagaattgtccaagaggaggtgagccgcctcttggcggcgtcttctctatcgaagactgtgcagtcgcttattgccggcgattcttctgaacatgcggatgagctgaaagcctgcggtgtggttctgccgcgccgctttcatggatctgtgcttttcggacagcttgtcccccgattcgataaccgcatcattgcccgctgtcccgtcacttgggcgaaagagtatgccgccgccgtgcgcgagggaatggatgagaagatggccaaggcgcgtgcagataaatatgctaaggtgccgaaagccgattgccgcgaattttatgagtatcgcttcgcgcgtattcttgccaatatacgggtggacggaaacccattgccggcggaggcgaggagagagctcatgactcgggcgcgccagcgcggcaagttcgggaaaaaggattttcgtgagagtgtcagaagtattgccgggggaaaagatgataatctgtacaacttctttcagatccatccggacagtgaaaaagccctcgtcctcgtcccaggttcggaaagagaaaaagccacgggccgtgctccttatgccagacccgttttgcgccaagtcgtggaagaaatcctgagaggtgaagacgccacgcgtccggctctcagttcaaggcatcctgagggagagaagaaggcgcaggacgggattctctattcgctgcttgatcccgaatctgaggtgcatcgccgtcaagcctctcgtcgcgtggaggaaatgagcaacaatcatcttgtcaggcacagaatgctcattttcgggcgattgttgcgcgatatgatcagccagtatgctgatggcgagccagagcgagtgaaagtttgctgcattgaggtgggacgagagctctctgaattttccggcaagacttccaaggaaatttcagctgaattggggaagcggatggagaatttccgctccgctgtcaattacttgcagaagaacgctcccgatctttctctgtccgccggattgattcgcaagtgccgcatagcgatggatctgaattggacatgtccgtatacgggtgcgaagtatagtgcgtatgagcttccgaggcttgagcttgagcatatcatccctttctccgatcggaattccaacgccttgtcctccttggtgctcacgtggcctgaagtcaacagaatgaagggaaagcgaaccgggcttcaattcgtggaagaggatacggagaagcctgttccgggcagagagaacctcacgatcactacgcctaggctatacaaggacttcgtccaaaagttggatgacagaaaaggagcaccggacgacgtcaggcgcaagaagaccagaaaacggctcatgctggtggacgccttgccggttcgaggtgcacgggatgagaacataggttttacggaaggcatgatgacgcagagctcccacctcatgaagattgccgctcatgtcatgcgtggtgtgtgtcccaatgtgcgttccatcatgattcccggtgctgtgaccgccgccgttcgtgcgtcatggaaggcgtgggacgccctggccggtgtttctcccggcatcgtgggcgacgatgggaaacttcgcgaaaaggcggagatacgagacatcacgcacttgcatcatgctttggatgcttgtatattggggctcataccgcttctcatcccggccggaacgaatggcgtggtctggcaggctctggctatgaggcgtttgtcgtcgcagcggcagattgatgagctgcgtggtgaactgcatctgcttggcggccgcaggtccttcaagatcgatgctgacgggagattgcatctcgatccgatgccggaaagtgtacgcagctcccttgcccgcgcattgaaagaggaacgcgtggctttccatgtgccgtccgatatgagcggagctcacttgaaagagacgacttggggtgtgatcggacgagaagaagggggcaagatgattcagctgcgtcaacgaaagattaaggggcaggaacggacacagaagactgaatcttctgagaagctcgtggggatttcgccgcatgggaattctaaattgcgcgaaatcaagggagtgcgtattatagcggacaactatggtttggcgctgacgcccaagccggtcgtcattcctcatcacaacgtctacagtcgcctcagggaatatgggaagggcgtcaagctcattcgcaaggggcagctcatcaggcttacgaaacacaaggacaccaggcggaacagggtctggagggttgcttccgtgaagaataataaaaccgggcttgcgctggatttgcagataccgtcttccgcccgccgcctcgcggataagacttgctccgacaattggactaacgtcagcgtgaaatctttacagcagtggggagtgattgttttgtctgttccttacacgggtattcctgccgacagcaagtgattcatgtcttaccacatcatttccatcgattcaccccagagtgccgtcacctgttccaaggggcggttgatcgtggactctgccaatgagagtcattcggtgccgatggaggatgtggcggctgtcgtcatcacttcgttcaaatgtacattgactggcaatttcctgatagaagcctctaaacggcgcatgggcgtcgtcctctgcgaacggttcaaaccggtcgccgtgcttctccctgtggagaaggggacggatacggaggcgttgcgcaatcttgcgcgcctttctccgcagctcaagagacgtctttgggagaagaccgtggatgccaagtgccgcaatcaggcgggcctggctctgctctggaaccctgggcatcctcttgcggagaaaatgagggacatcgtgcgcgcatccgtccccgcacgggaatccgacacggcgcgcatgttctgggccatttttgctgaaacatttgcggaggagaacttcacacgcggaagagaagcgggcggcttgaatgcgctcttcaactatgcctacgcgatccttctttccacgatgctgcgtgacttgctggcttacgggctggatccgtcgttcggcattttccactcggcgcgccctcacgctgctcccttggcttatgatctcatggagccttttcgccctgcgttcgacgccaatgtcgtccgctggatatgttcccaacgtggcaagggagaggctgagaattccattgctgaggtgaccggagagtacaggaaacatattgtctctacattgcatgccttggtttcttaccttggcagggagatgaccttgcgctccgccgtcacggcggttgttgcatcttttcgctccgctgtcagggaacggcaaagcggtccttatgaaccatggaaaatctcaagtataaaatgggttggctagtcgttttcttcgatcttccggtgggtaccgccgaagagcgccgtcggtatgccgactttcgaaaagccctgctgcaggacggctacatcatgatccagttcagcgtgtacgcccgtgcatgcgttacttacgacagggtgttgacgcattcccggagagtgaagactttcctgcctccggaagggaatgttcgatgtctttatgttaccaatattcaatgggagaagacatttatctactatgggagaagcgctcctctgatcgaacctgaaaagctcccggaacagcttcttttgtggtagtccgttcgcttgaaagattcgcaatgctcttattatgaaactcgggcatgctacctattgtagcatgcccgagtttggattcaaggcaaaactgggcaccccggggtagtgatactccggggattgtagcatgcccgagtttggattcaaggcaaaacgactaccccgaggatctggagcgactcaaaattgtagcatgcccgagtttggattcaaggcaaaacatgcgctgttctcccgcgacaactgcggcaagggctgtttttaattgctcctcaatctcttccgcggagtagattgagactatttgttttatcagaccgcttgatattttaagcacgcggctaaattaactccttatttgttggttgtcaagctttttttagtctcggccacaaaatccacgttgatgtcacatcccgcgtatcctctcccctcggccagccattccaaggcgtccattacacaaacggtgttaatgcttagcatgttacaaaaattctctcaaagcttcggccagttccgcatcgctggctaacgcggcgcgaattttggacaacgcctcgcgctcaatgcgggcatactgccggcgcgggatggtgccaccgcccccgcggtatagccgggattccgggcattgttccaaagcctcgataatgcttgattctaaggcgttttcatgtcttttgaagtaaaacataggatccccgtgcactaacattccgctaaggtattgacctttaaggggcaacactaggttcaggatgccccggggcacgccccgggcgtacaggtcgacagccaaatggctgattaaccggcgctcaatccgccatcgaaattttaaccatttaacccagagtagatagcggtaagtgtaaaacaaattgccgataacccggcgcgccacctccccctcccgcagatgcgggaggactgacgcggttggtcgcggcgccatagtcgatcccagccactccagtgcgcgccgggatggccttttgtgcgccccgggcatagcctcataccgtgcccacaaaagctccttttcctcattggtcactgattcccagatatttagcgatattagccaatctcgcgtcaagaattttcaaagcctctgaaagcttaactagttcattttcaatctttaacaggtcttcttcagtggtcggcatggggtgtgatcagtttgattaaattttggatcttccagtccatttcccaaatatgctccgtcagtataaatatttgttggtaaatggattggatgcgctcttcaggggtcgtcattttgctgttgttttttcgccgccgcccgagctcgggcgttgcggcgggtgttgatggcgtctgcctcctgctcgatcgtgtaaatcctttcaattaaggcacttaactgcgccgccaaaggactgattctttgatgattgttagccccctcgttttcgagccgcgtcaactggtcatatacatatccactatccatacgcgattgattattaacacatttagcct

SEQ ID NO: 3384 - DNA, 15078 bp, synthetic construct
  source 1..15078: mol_type = other DNA
  misc_feature 1..15078: note = Synthetic
gcgccccccttcgtttcgttcgctctcttaccagatggccgcccttatcgcgttgcgccgcattgagttgagccgcagcacggtttagcgcgccgagcgcgcagcaacgtgttacaccctatcgttctactagccgcgcgatctgatcgcgtatcgctttaagttcggcggccgtaacgcgcgcctcggtcgcccggacccgtcgctttggaacgctctgcacgttccacgacaatgcatagcagcgcttcgagcaatagttttctctcgtcggtggaacctcgaccgatgcttcggcaatacacatcgccgcatcgcctgttaacggcaccactaagagatacccaaagtcaccatgaaaaaggtcgccacgcccaacgacgacggctgggcgctgtttgctaggctccccggattcaggcagggcatcgcgccaatccaccacgacgatgcttcctggtgtcatccttgaaagaactccgccggatcatcgttccactgggggtattccctgaggcgttccatgacacggtgtgtatctgcggcgatctttgccgcgttcgcgtcgccgtaggccgcaatcgcgcgtcgaatcacctccgtttccgaggtcttcccttctcgggcaaggcgcttcactatttcgtcttgctcgggttccaggtagagcattttctttaccataatgacatcatatatgcacgacataataccgtcaatatcgccaacgcgcctacaccttcgaagaggcgccgtgcctccggtcgcatggagggcagcaccgtcgcgtgaagccccctctacgccaccaaaccaccatacgtgcaatttcccaacgcgcaacgcgacccgcgctcagagacctctgtaggagacctagtaaatgcgagcgaagggatggcctggggaatggtcggtcctaggaggactttaattggccggtttcgtgctttcgccgcgtgagccgggacttcgaaagaagcctccgggtaatcgaattgcccgcgttttccgcagcctactgttcctactcgccgacggctcgttaaatttcgtacctagccgcgagaacgccgacggtcgggtccgcgaacgacagcgcaatccccggctattgcgggcgcttggtctcgaacttggatttgccgtacgcagatcgtggggcaggtacgtcgcactcgtacccagcgcctcgtactcaacgctcgaggcctcgcggttctcggcacatcgcggcgagatacaaaatccattgtggcttagagcggcaattctgggccgagtcaacgatcatcgcatcgactgcggttatggacctcgctcgccagaccgccgaagcgattgtagacagctacgcggcagagggctgtcgctgcgagcaactaaactcgcacttgtaagggcgacggcggtaccgcccggagaatgaagaacgggaggttgagcgcggccgctgcgctgggcgtacgagcgatcagtaatgaattgattttttgctttgttgttcttcatgtgcatgggaatttgatgacgaggaaccctctgtgatttctgcactcgagaacctcggaacccagagaaaagcgaaaggggcggtacgtaaccaacccctattttcgatttctcttatcgccgtcgggcaccgatgcgcgaccgcatcgttgctcaacatccctctaggattcggagaatagcaaatggcggattccctgtcaaggccatggaggctcgccctcgatgttggagtcggctcgattggctgggccgcattgaatttaaaacgctcggaacgctccaacactcccggagacaagtgggtagcttgcagcctactcgatctcggagtgaatcttttcgactcgggcgtcgaagatgggataccaaaaaacaccgcgcgtaggacatacaaggccgcgcgccatcgactccagtctgtcaaagttcgaaaacgtaacctgcgggacgtgcttgtcgccgccgattgccttccatgcgacagcgcgacctctcagcgaagccttctcaaaggtgagccacgctcggcatccatcgcgctccgcgatcaaatggtgcctattgacggcgacggctcggtcgcaatccccgccgtttgggcctggcgatggaaggcactccgcaagccgggtcagctaacccaccacgaattgggggttattctcatggccctcgcatcggcacgcggccaggggttttcagaagagagcgattcaagaacggttgcgcccctcgttagcgaacttcaggagaaaatcagtagagccggatgcacggcctttggagattacgccgcagagatcctcgctaaatctcccggagcgactattcgagcgcgcaacgccgagcccaatttcgtttcgcgacagatggttctcggcgagtttcgggcgattcgtaacgcacaaacgcgtcttctcagtccgaagagatgggacgaaatagaaaacattatattcgatcaagccccgttagcgccgccacgcccgggcaactgccctctcgttaaggaagacgttcggctagaacgcgcgcatccgcttgcacaacgcctcaagatcgtccagaccctgcgtaacgtccgactcttcgatgcagatggcgcggttccggaggatcgtccaacgcaactcactccagatgaaatcagaaaagccgagaaatttttatcgacgcggaagtcggcaacggcaataagcctcttcaaagctctcggaattaaaagcctgcggtcaaattaccacgggggctcaagggcggaggccacggatcttccgggaaacgagacgaacgtagccgccgcgcgcgaggatgcattcggggcagcatgggcagcctttgagccctctaagcaacgcgacatcgtcgaacttgccctttccattcgcggaggccgcaccgccgacgaaattcgtgcagccgcggacacctggggcatatcgattgatgctgcccgggctttcatcgacatgctccccaaaggcagagccgcctatgggctcacggcaacgaaccgccttcttgccgtcatgctcgaggagggtctctcactattcgacgctcgtgatcgcgagtatccccaggcggcgcaaagccggaagttttgcagtctcccatactacgccatagcactcccagaccacgtcttcgacggcgatccacgcgccgacgaaaccgccaccgatgaacaacgctatggtcacgttcggaatcccattgtccacgtagcgctcaatcaaattcgcgggctcgttaatgccctcgttgctgagtttggtgcgccagtcgaaatcacagttgaactcgcacgcgaaattagcctttcggacgacgaaaaaaagaaacttctcaagtcgcaaaaagaacgcgcggaaatgcgcgagacagcggccgcgacgatccgtgaatgcggatataagccgtcacgtgatctaattgaccggtacgtcctctactgcgggcaggatcgccgactagttcaaggagagtttgcagaaataaaatgcgtttatagcgggaaaccaatcgaatcctttaaacgcctcttttcgaacgatattgaaatcgaccatatcgttcctcgccaacgaagccatgacgactcccttgcgaataaagttcttgcctatcgcggcgcgaaccgcaacaaactgaatagaacaccgtttgaattctgggggcacaccgagcattgggctgaaatatgggagcgagccgaatttgccttccgaaaaaaccccaaaaaactggcacgcttccgggaaacagcggcacaagaatttactggagatttcgcaagtcgacatctgaacgacacgcgctacatttcaaaaatgacgcgcttgtacctggagcggctcaagggcacggagtgtgtctatgcaacacgaggatcgataacaggccgtctacgcaaggcatgggagttagcaaagctgctccccgttcccgccgcagttcaaagccttatcgacatcagccgagcatcctctagagatgtccctatcgaactcaagcgtcacgaccatcgccatcacgccatcgacgctgcattgatcggcctcgtcgaccaccatacactccagtactattttgaaaaaacagagtcccaaaccgacaaacggttcccgctgccttggcctaccttcaaggaagaactcgccgagcggcttcaagggcttgtcgtacgacgcagacctgagcacaagcgtgggttccgttaccagggccaactcgtcgaagattcgcgatataggctgcgtcgccaaaacgaaaagaacgtcctctcgtcacgcacgtcgcttatcggactcgtgatcgataagttcgggaacctgattcccgggacaaggtcagcggggattcagttttcgtgcaaagaggcgttcgaatcttccattatgcgaatcgaccccaccgggcgactaatcacacttctgaattgggagacgttacaggccatccgcaattcctacctaacctctcgcccgggagacggcgattccggcccactcgaacgaaaaaaagcggaacgagaggcaacggcttttgcttggaaaagtctttgctccagggcggcgacgaccgctggcggtatttcatcagtaagaaaaaagatcgttctcgaggacccggttattgtcggtcctgaaaaatctgcggttaagtcagccggctatgccttcgcctatgtcataaaaagaaatgtgccgaatacgaggtaccaattattccccgtcgcaatgaaggatgcagaaaccgaccaagggccgcctctcaaacccggcgaggttgttgtttgcaagcttcacaaaggtgatatgctttcacttcttcttgaaagcaactcattgagttcgcccgtttattgtaccgttcaaggattcaagagctccggggtcctcaccctcacaacccagtacaacgcagcccgcaacgggggaagagccgtgaacacggttcccgaaatcgagtccagcgacggcagaaacgccgttaataaggtctttggaacatggcgcgcccgtatcgtgcgcccaactgtccttggtcgattgccatgatcaaccgcgtcctggaaatcgctacggaaggagccttcgtttcaaaacggtatggatcaataacgatagtcgtaaaaaattcggaaccaacagtcgttccaatcgacacgatcgattcgctaataatgcaccagggagcaagcataacgacaacgtgcatagaagcactcagctcaagtggagcggcaataatattttgcaacggaaaacacatgccctcgtcaatcgtccttcccctcgtgggatatcacggacaagccgcgcgtcaaagactgcaaatagaaatgagcgaacctttcaagaaacgcgtttggtcatacatcgtcgaaagaaagatcgcgcaacagtcgcgcgtcgttgagttaactacgggcaaaaggactcttcatcgatacatgggtcccgtacggtcaggcgatccagagaacaaagaggcacaggctgcccgcgcatattggcccgaacttttcgggcgcaaatttctccgcgatggtcatgaaggtccgattaacgcgaggctcaatttcgggtacgcgattattcggtcatgcgtttctcgcgcggtcgtcgcgtgcggcctccttccgtctctttccgttcaccattctgatgctcgcaacgccttcgctctcgtcgacgatataatggagccttaccggcctgccatcgatctccaggtgcttcggctggccgagcagggccaagcacttgatacgcaaagcaaatcggttctcgcatcttccgttatttcgaccattacgacggatcggggtgcgacgactcttggtgcctgcatactccggaccgtccagtcgtttgctcatgcgatcgaaacaaaaagtccggcgatctggtatcccgaatccgttatctcgtgatgcttagtgagtatcgtataatgtggatgtttgcgctcttcgatttgcctgttaagacgaagaaccaacgccatctcgccgcgaaatttcgcaacgatcttctcaagttcggattctcaatgttgcagttttccgtatacgctaggccgtgctcgtcccagacgcgcggctatcttcaaacaaggatcgaacaggcgatgccgagtcaaggcaaagttgctataatgctcataacagataagcagtatggtgcaatgagcgtctaccgagcaagcgtcgagaggaagcaaaaagtgcccgagcagtacacgttgttttaggaaatgaagcattttttagcgacccaacaccgagaaacccctgataaatcaggggtttctatacgctcgggcttctagagggggatgttgagcgcccgccgggactttgcatcgagatcgtgccgtcgcaggggcttctagagggggatgttgagcgcccgccgggaccccctatttccgatgcgacgcttgcgtatggcttctagagggggatgttgagcgcccgccgggactcttgaatacaagatgcgcgaccgcacgaggcttctagagggggatgttgagcgcccgccgggactacacgtcgcctacggttgctacgcttcgcggcttctagagggggatgttgagcgcccgccgggacagtgatgatggaggatcgcaaggccgcgatggcttctagagggggatgttgagcgcccgccgggactgcggaatatacgggtaggagatccattccggcttctagagggggatgttgagcgcccgccgggacgttaggcttccgcttatgtcggccgccgatggcttctagagggggatgttgagcgcccgccgggacgaagcacggcggcgcgtttggctcgcccgaggcttctagagggggatgttgagcgcccgccgggacagtgccgtggcaaagagtgccgtgacctggggcttctagagggggatgttgagcgcccgccgggactggttgtgcgcgtgagcgcgtgagagttccggcttctagagggggatgttgagcgcccgccgggactaggaaggtctcaagggagtgacgtgtcgtggcttctagagggggatgttgagcgcccgccgggactatcaaagcgagggcgtcgcgtttctcacggcttctagagggggatgttgagcgcccgccgggacttcgacggccgaacgtgcgtgtagccgccaggcttctagagggggatgttgagcgcccgccgggacgattttgcagatcgacgatcgcgacataggcttctagagggggatgttgagcgcccgccgggaccgtttcgtgcgcctacaatatcagccgcaaggcttctagagggggatgttgagcgcccgccgggacaccataagacggtggtgatcgtggatgaagggcttctagagggggatgttgagcgcccgccgggaccacccacagtagatgcactcgcgcatttagggcttctagagggggatgttgagcgcccgccgggactgcgccgacacgttctgtttgctggccttgggcttctagagggggatgttgagcgcccgccgggactcgacccacggcggggtatcgacgtcgttcggcttctagagggggatgttgagcgcccgccgggacggcctcttcccgagtatcgcgggtggctgtggcttctagagggggatgttgagcgcccgccgggacacaaaaaccacagcggcgcagcaatcttgcggcttctagagggggatgttgagcgcccgccgggaccttggtagagcgcgtacaccagcaagacgaggcttctagagggggatgttgagcgcccgccgggacacgcgctcgctagaacgtatggaggcaaggggcttctagagggggatgttgagcgcccgccgggacgcgaatcgtgcatgacgctgcccatcaacggcttctagagggggatgttgagcgcccgccgggacttcgggggtacgaataacgaagcgatgggaggcttctagagggggatgttgagcgcccgccgggaccaattcggtgtcatcgtagccacgctctcaggcttctagagggggatgttgagcgcccgccgggacgcgccaaagcgatgctcgcgatggcctggggcttctagagggggatgttgagcgcccgccgggactggctgctgcacgcggtgcgacaccaatgcggcttctagagggggatgttgagcgcccgccgggacttggctcaaaagcacgtcgtaatccccatgggcttctagagggggatgttgagcgcccgccgggactcgtgcaaacggcgcgtgtatgctctgcatggcttctagagggggatgttgagcgcccgccgggactcattcatcggctacctcgcgctcgtcgtggcttctagagggggatgttgagcgcccgccgggacagctcgaagaactcaaactcatgcaggagggcttctagagggggatgttgagcgcccgccgggacaacggaaaagcgcggaagcgcgttggcgtgggcttctagagggggatgttgagcgcccgccgggactgtcgtatttgacattgttttgcccgttggggcttctagagggggatgttgagcgcccgccgggactatcgagaccgcgcccgtcacgatggtacgggcttctagagggggatgttgagcgcccgccgggactgcttggatgcatgctggcatagttgcacgggcttctagagggggatgttgagcgcccgccgggactcagcgtttcgctcggagtgtcgctgaagtggcttctagagggagatgttgagcgcccgccgggacgcaaatccgcccgctaatgagagcgcgagggcttctagagggggatgttgagcgcccgccgggacgtttgcgcgaaggccttcgcctaggccgctggcttctagagggggatgttgagcgcccgccgggaccgtggtaacgcgcggcgtactcctagtatggcttctagagggggatgttgagcgcccgccgggactcgtcagccgctcggtgttgagcggaaagaggcttctagagggggatgttgagcgcccgccggggcggaaagatcggccctgatttcgctccctacgcaaccatcgatttcggcggagccggtatcagcagcggcgcgccggtgccggcctgcacttcttctaccgtcactcccggtgcaagttcgcgcaataccaagccctcgggcgtaatatcgatcaccgcgagatcggtcatcaactgatgcacgacgcgttttcctgtgagcgggagggtacattcgccgacgattttgtgggcgttgcccttcgcgacgtgctccatcatcacgatcacgcgcttcgcgccatgcaccagatccatcgctccgcccatgcccttgaccatcttcccgggaatcatccagttcgcaagatcgccgtgcgcgctcacctgcatcgcaccgagtaccgcgagatcgatatgcccgccgcgaatcatcccgaacgagagcgccgaatcgaagaacgaggctcccggcaacacggtaacggtctcttttcccgcattgatgagatcggcatcgacatctcgttcgtacggataggggccggtgccgaggatgccgttctcgctctgtaagacgacccgcacgcccggcggaacgtagttgggaattaacgtcggcattccgatgccgagattgacgtacatgccgtcgcgcagttcgcgcgcgacgcgcgcggcgagttcttcgcgtgttaacgccatttctatcgctcctcccgcttgcgcgtggtcactcgctcgattcgctttccctccgcaccgacctcaacgatccgcgcgacgaagatcccgggaacgtgtacgttctccggttcgatctcgccgggctccaccaagcgttcgacttcggcgatggttaaccggccggccatcgcacagagcgggttgaaatttcgcgtcgctttcgaaaaatagagattcccctcgcgatccccgatacttgcgcgcaccagcgcgtaatcacagcggatcgcttcttcgagcacgtactcgcgatcgccgaagcgccgcgtctccttcgggggcgaggctttcgcgacgctgccgtcggggttatggcgccagggcaggccaccggcggcgacgggagtgccgacccccgccggggtgtagaacgccgggatgccgcagccgccggcgcggaggcgctcggcaagcgtgccctgcgggacgagctcgacttcgagctcgccggagagatactgccgttcgaattccttattttcgccaacgtaggaaccggtcgtacgccgtatgcgcttgttgtcgaggaggacgccgagcccccaaccgtcgaccccgcagttattcgagacggtgacgagatcgctcgcgccttgggcgagcagcgcctgaatcaggttatgcgggatgccgttgaggccgaaacccccgacggctaacgaggccccgctgggaatgtcggcgacggccgcggccgccgatgggtacactttctccataccggcgcagataggcgctcgtgggagcaaaaccctggtcgcccccgaacctatcggccgattgactatccgatccctcgatacggcccctgcggggcctactcgggatgacatttccgctcgttaaccatgaagaggagtacccaatgtcagtagccgcgcaagcgcacgacgaagaagcgatgatcatcgagatggtgcgcgatttagtctccgagaaagtcgcgccgcgcgcggcggcgatcgacgaaagcgaggagtttcccgacgatattcggcgcctcttcgcgcagaacgatcttctcggcattccgattcccacggaatatggcgggctcggcggaagcttcgtcacctacgtcaaggtcgtcgaagagatcgcgaaagcatgcgcttcgagttcgctgatcgtcgccgtgcaggagctcggcatgctgccgattatgatcggcggcaacgacgaacagaagcggcgctttctcccgaagatcgcctcgggggagcacctcgccgcctacgcgcttaccgaggcgagcagcggctccgacgcactcggttcgatgcgcacgcgcgctcggcgcgacggcgattcctacgttctcgacggccagaagatttggattacgaacgggagcgtcgccgacgtcctctgcgtcttcgccgtcaccgatcccgaggccggtagccgcggcgtcagtgccttcgtcgtcgaaaaagggacgccgggtttcgccgtcggtaagaaggagcgcaagatggggatcaaaggctcgccgaccgtcgagctgatcttcaacgagtgccgcattcccgccaacaatcgcctcggcgaagagggcgagggttttaagatcgcgatgaaggtgctcgataagtcccgccccggtatcgccgcgcaggcgctcggcatcgccgctggcgcgcttgagtatgcaacgcagtacgcgcgcgaccgcgtcgccttcggcaaaccgatcggccagcaccaaggcatcggcttcatgctcgccgatatgaagaccgaggtcgaagcggctcggctcatgctctacgaatcggctcggaaatgcgacgaaggggcccccgatgtctcgctctgggcatcgatggccaagctcaagtgcggggacgtcgcgatgtcggtaaccaccgacgcggttcaggtcctcggcggcttcggctattcggcggagtatccggtcgagcggatgatgcgcgatgccaagatcacccagatctacgagggaacccagcagatccagcgcctggtcatctctcgcaatttagttgggaaggggcgctagctcggctttgcgaactaaccgcccttctcagacgttgttaaggcacgttaagagacgaattttcgcacaaagggggtgaaagaatgcgcaaactcctcgctgcactgatcgcggcgtccttcctcgcaaccggtacggctatggccgccaccgcgacgaagaccgcctcgaagacgacggccaagaaagccgccgccaagaaaccgatggctaagaaagccgccgccaagaaaccgatggctaagaaagccgccgccaagaaaccgatggctaagaaagccgccgccaagaagccgatggctaagaaagccaccgccaagaaagcaacggctaagaaagccgctgccaaaaagggccacaaaccgccggttcgctaaccgatcgttatcatcctaaggtaaaccctggggggcgacccccaaagggcatcggcgtcaacgccggtgccctttttttaggccgcgtgcgagttcgctgccgccgttatgggtgcagcaccgagcgccaatagatcagcatccgctcccagagcgtgcgccgctgcatcaagccggcgatcgaatgtgtcttccgcgggaagagcatgacgttgacatcggtgagcccggccaagatcgtcttctgcagaaatgcgacggtgttggccatatgaacgttgtcgtcgctcgtgccatgcatgatctgtagtgggccgttgagatgcgcgacatcgaaaagattcgaactacgatcgtacgcgtgcggatgtttctgcggaagccccatatagcgttcggtataaatcgtgtcgtagaggtgccaatcggtcactggagcgaccgcgagcccggcaacgaaacgtttggagtgttcgagcgcatagatcgtttcgtatccaccgaagctccatccccaaatgccgattcttttcgcatcgacgtacgggagcgaggagagatagcgagcaccgattcgctgccccgcgagcgagcccggtccaaaattatgcaacagcaggcgaacgtgtttatcgttatcgatctgcgatgccggcccgtcgatcgagaacacgatgatgccttcttgcgctaaaagatcgtgcatcaactccatcgtgtagccgaagccgttggtcgtagtcggcgcggccggtccaccgtagacgtagacgacgaccgggtacttgcggtgcggatcgaagtgcggcgggcgaatcatccacgcatcgagcgccccgtacttcgatgaaacctcgaaacgtcgcaccggcaagagcatcgattgcaacgatgcatcgggggctgcaagtatctgcggagcctgagacggaacgtgaagcgccacctcgggcacgcgattcatcgacgaataggtatcgacaaatgcatgcgtcgcgggagcgaaggcgatgcggtgcacgccgcgcttcggcgtgagatccttcaacgcgccgctgcgaagatcgacttcgagtaacgcgcgattgcggcgggttggataatcggcgtagacccacgcacgcgtcccgctcttccccgccgcgaccaacccgttggttgcatactcgctcccgagattataatcgccggttattcgtcgcagcgatccatcggagctacggagatagagcgagcgaaggttctcgcgatcgagcacccagagcgaagatccgtcgggtagccacgtcggcagggcgatgacgtcgacccaagagggcgaacgttggcggtagagcgtactcggcgccgagccagcggccggcagcgattctacacgaagccattgttcgcggcgatttaaaatctccgtgacaagatcgtcgctcttcggccgccatgcgaacgccgctatatatcgatccttcggcgccgcgttatagaggaggcgatcggttttcgttgcgagatcgatgacatggatgctcgcagcgggattcttttcgccggcgagcgggtagcgctgatagttgacacgtccgttcttcgggaggaaatcggtcagcgggaagcgcgtgaccttccgctcgtcgaggcgcaggtaggcgatcttcgaaccatcgggcgaccagcgaaagccgtgggtgatgccgagctcctcggggtagacccaatcgagctgaccgtcgagaattgcattccctctaccgccatgggtgagctgctgaagcgaaacctttgcgccgagttgcgcggcatagagattggccttcttcgcaaacgcgatcgcgtcaccattgggggaccattgcggatcggagacgccgctcgcaatcttctgcaaagctttcgtcgcaaacgtatagacgtagagcgtgccgccggcgtttacggcgatgcggcgatccttcggcgaccagccagcgttatacggcgtcgcaccgtgtttgccgaatagggcgggctcgagcagtacccgcgcagccccgtcgatccttcgcagcatgagcggcagatgctccgagggatcctgcgagggaagcacataggtgaaacgcttcccaccgtgcgaccacgagatcgccgccggctggcgcccccatggaggttccttcccaaacgccgatgacggcgtcagcgcgccctgggcgggagcggcggcgatgcccgccatcagcaacatcgcaagaacggaggtactctgcagcagcttcattcgcgggactttcgcgtatcggcgtggcaatactttctctatggcagaccccatgaatcccgatttcaccgctcaaaaccccatcgttgccgccgccgaacggatccgcacgcgacgcgcgctcggcgaactgatcgacgcaaccgatgcgacgcacgtcgatcgcggcaatggcggaggcgaaccatcgttgcgcgcgttcggcgatgcactcgcgatgggcatcaaacgattgaattcgattctcggggagcgaaacggcgttcggttggttcgtttggagcgaccgttacggctacgattgcgcttcggcgagtatcgcatcgccctcgaactcgacgaaggcaccgagttggtccgcattcgcggcctcgatttcgacggcgattaccagttcgttcccgacctcgcaattccgagcttgatcgacgtctcgaaggtttcaacggagagcggctacggtgaagcgatcacgccttcgacgcttttgaaatcgatcgcacgcgacgccgagctcccgcgcccgccacacctcgattcgcccgggccgctttcgttctagcgacgatcggcgcgctcgggcagagcaggcgaaccggacatcgctcgcagagcggcgtcggagc

SEQ ID NO: 3385 - DNA, 23129 bp, synthetic construct
  misc_feature 1..23129: note = Synthetic
  source 1..23129: mol_type = other DNA
tcgggcagcgcgagcggctcgacgggctccggaagcacggccggatcgacgacgggctccggcgcgtccggcaccctcggctccgcccagccggccacggccgcgaccgcaggggccgcggcggcgtaacggcgcggcaaggggtatactggccggtatgaaatccctcgccgtcaacattcccgacgtcgcgctcatcatcgagggcggcggcatgcgcgccagctacacggcgggcgcggtggtcacgctgctcgagcggcagctgaacttcggccgcgtctacggcatctccgccggttccagccacacggtgaactacgtgtcgcgcgacatcgcgcgcacgaaggcgtcgttcgtcgacctcgtgaaggacccgcgcttcggcggcctcggcagcttcgcgcgcggcaccggctacttcaacgccccgtacctgtacgagggcatcgccgaggagcacgcgggctcgggcgacacgatggcgttcgattgggagacgttccggcgcaatcccgccgacgtgcacatcgagggcttcgacgcggagacgggcgccacggccgcgtggacgaaagccgacatgcccacgatgcgcgccatgatgctgcgcgtgcgcgcgagctccacgatgccgctgttcatgccgcccacgacgatcgacgggcgcacgtacctcgacggcggcatgggcgagagctggggcatcctgctcgacgcggcgcgacgcgacggcttcgagcggttcttcgtcatccgctcgcaggtgcgcggctaccgcaagaagcccctcgccgcgcccgtgcgggccctgttccgcaccgcgtttcggacgtatccggcggtggccacgtgcaccatcgagcgctggcgcccctacaacgcgctgtgcgacgaggtggagcggctcgagcgcgagggcgcggcgtgcgtgttctatcccgaggagatgcccgtgtcgaacaaggagacgagctacgcgaagctgcaggcggcctacgagcgcgggtacgcgcaggcgcagcgagaggccgatgcgtgggagtcgtggctgcgtcccgcgcaggcgacggggtagcgcgtggagctcggcatcaccatacccctgcagcgccacctgcgcctgccgcgtccgccgtacggcgaagtggacgacctgctgttctgctgggaggcgcatcgcgtggcgctcggcggctgcgacatgctgttgttggcgaacgcgagcaaccggttcgcggcgttcgcgtgcatgcagccgggggagtggcgcgattgggagcgcgttgcgctcgcggcgctgcgcgcctcgcttgcggccagcgggttcgacgagggcgcgatcgacgcgtacctgttcttcggcggcgcggcggacgtgacgcgcacgcacggtcggaggcccgtcgcgttcctcaacgtgctcgtggacaagctgctgccgctctcgctgccccttccgctcgacgagggcgcgccgttcccgctcgagctgtgccgcctcgccaacgagcggatggcgtgccgggcggccggcttcgagggcctcggcctgccggccgagcgcttcgccgccgacctcgagcgcctgggaatcggcgccccggcgtaggcgcacgcgcgtggccgtgctaccatggtcgccgacagaaaggacgcgcatgacggcaaccggcgacaccgccacctcgaaactcgaactgatcatggggcgcgacgggctcgcgcgcctcgcggagtccaccgtcatggtgctgggcgtgggcggcgtgggctcgaactgcgtcgaggcgctcgcccgcggcggcgtgggccggctcatcgtggtggaccacgacgtggtgcaggccagcaacatcaaccgccaggccatcgcgtttcgcagcaccatcggccgcaagaaggtggacgtcgcgcgcggcatgatcgccgacatcaaccccgacgcgcaggtggaagcgctcgacgagttcgtgctggccgagaacgtgccggggttcctgggcgcctacgcccaccgcgtggactacgtggtggacgccatcgacacgatctcggcgaagctggccgtcgcgcagtacgccgacgcgcacggcgtgcgcctcgtcagcagcatgggcgcggcgaacaagctgcggcccgactgcttccggttcgccgacgtgttcgacacggtgaactgcccgttgtgccgcatcatgcgcaaggaggcgcgcaagcgcggcatccggcagctgcgcgtgctgtactcgtgcgagcagccggtggccgtgcccgtgcgcgaaggcgccgagcggcgcgagcggtcgaacctgggcaccgcttcgttcgtgccgcccatcatgggccagatgatcgccggcgaggtgctgtgcacgctcgcgggcgtggggcagcgcgacggcgcggacgcgggcgagggcgaggggcgcgcatgagcgggccggcgctgttcgacatgcattgccacctggacttcgctcccgacgcgcaggcggcggcgcgcgcgctggccgcgcgcgggatgggggcgttctcggtgacggtgacgccgcggggctacgcgcgcgccgccgagctgctggcgccctgcgatgccgtgcgcgtggggctggggctgcatccctggtggatcgccgacggcagctgcgacgagcgggacgtggcgctgttcgagcacctggctgcggacgagcgcttcatcggcgaggtcggcctcgacttcgcgggcgatcgtgcggctgcgcgcgatgcccaggtcgcggcgttcgagcgcgtggcgcgggcgtgcgcgggcggcgggaaggtgctgtcgatccacgcggtgcgcgcggcgggcgaggtgctcgacgtgctcgagcgcgcgggggcgcaggcgggcaacgcctgcatattccactggttctcggggacgtccgacgagctgcagcgggccctgcgcgcagggtgcttctgctccgtcaacccgcgcatgctggccgcgaagcgcggccgcgcctacgcgcaggccgtccccgccgagcgcctgctgctggaaaccgacgccccgtccgaggccggcgagccctacgatcccgccgccgaggccgcccgcttggccgccctgctcgaaaccctcgccgaactgcgccgcacacccgtcgacgccttggctgcccgtatagccgaaaccagccgcgcgctcctgttccccgcctgatacgccgcacgccggggagggaggggcgtgcggcgcggggcgtttcggagggttctattccttcgcgatgagctcgcgggcggctatgcggccgaagaccatgcattcggtgatattgccgctgccctggtacttcgaagcccagatggaaccgaactcgcccgacgagtacaggttggggatgggctcgccgtccacgtcgatgatctgagccttctcgttgcggcgcgggccgccgtcggtgttgagcacctcggggatgcattcgatggcgtagaacggaggcgtgcgcacgggcgtcagctggtctgccgggcgatggaactgctcgtcctcgccgttgtcgcacgaagcgttccaccggttcaccgtgttcaccagctcgtcgacgggaacctcgatctgcgcggccagctcctcgatgctctcagcggtgtacgcatagccgtcggccacggggtcgatgctcggatcgttctcggacttctcggtctggttctgcagcgtgttgctcgtggagttcgagccgaggtacgcgctgtacttcaggccctcggagtcgaagacgaaccactgcttcggaggcagcggcaagcagcgccaatcgccgccgaagttctggtggccgtggcggcagccgtaatggagctcgagcggcccctcctcgccaggagcgaacatcgtcgtgccttcccattcctggtagaagcggcggccgttgatgcccacgacgatgccctgggccttcttcagcgagcggtaggccatcatcttctcgccgtcgatgctgatgccgttcgaccaggcgcccgcgaagctgttcatatgccacatgctggcaccgagcttcgcgcagatgcggtggccgtcgcccgtgttcatggtggcgccggcggcgtgcatgcgctcgaacgacaggtagtcctgcagcatctcggggtcgttctcgaagccgccgcacgtcatcaccacgccgcggcgcgccttcgcgtagacgctcttgccgcccttctcgtacacgccgccgagcaccgccctcgtctcggggtcttgcacgagcgcggtgagcggcgcgttggtcaggcgcgtcacggcgtcttcgtgctggtcgaggaattcgctcagaaagacgctgatgtgcttcggacggtcggcgttgtcgcttttgaactggcatttcgagaacgcgtccgaatgctcgatctcgaagtactcggctttgccggcctgcggcgtcaccttgacgtcgctctcgagcatgccgagccccgtgagccatccccagttctcggccgcgccctgcgcgtacgtctcgtacatcgacgcgggcgtgctggtgaagccttccacgagggctttcacgtagagggcgaagttgtccgggtcgtcggtgatgtggaacgacccgctgcacaccggcgagttgccgctgccggtgggcgtcgaccccttctccagcagcagcgtggtcagcccttctccttcggttgccagcgcagcggccgtggcgaggccggctgcgcccgcgcccaccacgatgacgtcgtactcctcgtcccatgagatgtcggccacggacgtcgcggcgtcgttggcggcgttctgcgccggcttcgggccgcaccccgccagtccgagcgcggccgcgcccaatgcggccatgccgcttgccttgatgaagctgcgccgcgagagcgcgtcgttcttttccatgtctcctccttgattccggtgcctctgccggttcagcgtacgacgatgcgagcgtttgcgatgagacccggatcggagtaaaggcctggtgagcgtgtcgcccgaatcgggcgaacttgtcctcgcgcccggttggggagggacgcgggttccgttccgtgcgataatgcggcacggggagggatggagatggaagagaagcggaaccggtggggagtgcgggcgggcaccgtggcgatggcggtgggattcttcgtgtggtacacgtgctccaactgggtgagcgcgctgacctacgacgcctcgttctcgtactggtggctcaacaagtcgggcgccgtggtgctggtcaccgttctcgcctgcgccgtcttgtggcgcatttccgtgcctgcgcgcgtggcgcgggcgctcgactgggcgttcgccggcgtgtacgcgtgctcgctcgtcgtgctgctcggaggggcgggcgtggtgaggccgttttcggatgtgtgcgggctgctgctgttcgcggcggctcagacgtggatggtcgtgcgctgggggtcgtgctacgcgcgctcgtccaccgacgaggtgacgcgcgcgctgctgctggccatcgcgctcgtggctaccgcgaagtgcgtgacgacgttcttgccggagacggcgacgatggcgctcatgttggcgctgccgttcctgtcgacggggatgcttgcggttcgcctgcgcgatgtgggcgacgagcgtcctgccgagcagtggttctcgcgcgcgtcgcttccctcgttcggccgcatcgtgatggcgatggcggtattcttcttcatctggtccatcctcaacatgaccttgaagcacggtaccggccactacagcttcggcgcggctgccacgccggtgtacacgctgctgtcgcaggctattcttttcgcgttctgcgcgttcacctgctggtgggtgttcgggcgccgccgccgtctcgacatcaccgtcgtgtggcgtttcacgtacgtgctcatggcgctcgcgctgttcatgctcgtggcgttcggcatggcgcagttcatccaggcgttcacgggcgcggccgtggtggtggcgaagatgttcttgtggctggggctggcgaacgtggcgcatcatggcgcgttcaagccgttcatggtgttctgcccgggcatgctgctgtactcgcttcccgattggctggggcgcagcgccgcgtcgttcctcgggctggagtcgctcaaccccgccatcgcctcgttcatgctcgtggtgaccgtggtgatggtggcgttcttcctgccgtcgcgctcgcccgacgtgcagctgctgctgtccgatctgaacggcgacgggcatcgcgccatcggcgagggggacggcatcgacgagcgctgccgcgcggtgggggagcggcgcgggctctcgccgcgcgaaatcgagatcatgcagtacctgtgcaagggccgttcgcgcccctacatcgccgagacgctgtacctgtcggagaacacggtgcgcacccactcgcgccgcatctacggcaagctcgacgtgcataacaagcaggagctgctcgacctcgtgcggggggaatgacggtcgccatcctgccgtttgcttgccccgcgctacagcttcccaccggcatggtgacggttgctcgcgcttgcgctcggcgcggggcgcgctcgcgtatcgtggacgggtacgcaggcggcagcggcggcgaaggaggcggcagggcatgttgacgagcaccgtgcacgatgtggccctcgtgttcgagggcggcgggatgcgcaactcgtactcggccggcgcgatcagcgtcatgttggagcgcgggctgttcttcgacgacgtgtacgggctgtccgcgggtgcgacgaacgcgatcgactacctctcgcgcgacgcgcgtcgcaacgaggcctcgttcaccacctgcctcgacggcctgtcgtttcgctggtgggtgacgccgttcgtggacaccgacggcgtcagcgcggcgctgcacggggacgcgcgggcccgctcgggctgcgcgctgccgttcgacttcgacgccttccaggcgaacccggcgcgcgcgaccatgcaggccatcgaccgcgacaccggcgagaccgtgtacttcacgcgcgacgatttccccacggaggctgcgctcatggagcgcgtccgcgcctcgacgagctatcccatcgtcctgccgcccaccgtcatcgacgggcgcgcgctgtacgacggcggcatcggccggggcggcggcatcatggtgccgcgcgcggtggacgacgggctgcggaggttcttcgtggtgtgcacgcgcccgcgcggcttccggcgaccgctcaagcccaagcgcttctacgacgcgttcttttggcgccggccgcgcatgcgggaggcgctcgacacgtggagccgccgctacgatgccgagctcgaccggctcgatcagctggaagccgagggccgcgcctacgtgttctacgcgaacgaccagggcgtcaagaacaccgagcgcgacgtggagaagctcgcgcgcaactacgagcgcggccgcgtgcaggcgcgctccgagctgggcgcatggatgaggttcctcgaacgccgctgacgggaacgtccccgtctagcgccagtcgtcctcgtcggcgaactgccagcccagcagggcatcgcctatcaggcggaacgtgaaggggaggggctttttgaggttgccctggtcgatatgctccgagatgccttccagctcgtcgagcaggtcgaagaacgacgtttcttcaagcgagggcatgccggcggctatctcgtcgggcgagatggtcatgatgcccaagacgatgtcgaggtaaccgccgagctggtcgttgctgcgctgcagctcctccacggcgtccttgtcgaagaacgactcctcgatgcagtaccagcctttgacgtcgtcgtcggcatcgtcttccatgagctcgctggggatgatgccgtgctccgcgagatcgtccacggtgaagcacgacatgagcgtgtcgggcgtgacgagcaccccgtcttcgtcatcgaggtcgctcatcacgtagacgacgcgtgcgaccagcccgttttccacgacgtccagcgctacgccgtagtggtatcccggattcgcgtgacgcgtgccccagtagagttcgccgttgttctcgataagcgttttgacggttgcggccatggggatccccttcgcgtgacgtgcctgatcggatcagtcgagtatagagcatcgcggcgcgcggtggtacgatggtcgccgactgaaaggaaaacgacatgccgatcatccatctcgacggcctcgacgacccgcggctcgcggcgtactcgggcatgaccgacgcgcagctgcgcgactgccccgacagcgcgcacggcctgttcatcggcgaatcgcgcaaggtcatcgagcgcgcgctggccgccggcgtgcggatgcgctcgctgttcatggaggagaagtggctcgaccagacgatgccgctcgtcgattcgctgctggacggcgaccccgccttcccggtgctcgtggccacgcgcgagcagttccgtgccctgaccggttacgaggtcacgcgcggcgcgctggccgcgttcgagcggcccccgctgccgagcgtgcccgacctcctggcgaacgcgcgccgggtggccgtgctcgaggacattacgaactacacgaacatcggggccgtgttccgctcggctgcggcgctcggcatcgacgcggtgctggtcacgccgtcgtgccacgacccgctgtaccgccgcgccgcgcgcgtgtcgatggggacggtgttccaggtgccgtggacgcgcatcggaggcgagcgcgcgtgggcgaccgggggcgtgccgctgctgcgctcgctgggcttcgcgacggccgcgctcgcgctgtccgacgacgcgctctgcctgcacgaccggcgtctgcgcgatgccgaccgcctcgcgctcgtgctgggcaccgaaggcgacggcctggcccccgcaacgatcgccacctgcgactacacggtgaagatccccatggaccacgaggtggactccctcaacgtggcggccgccagcgccgtagcgttctgggagctcaggacgaagtggcggtaggagtatcttggcgcgataggctgtggcgatgcatgtagcacgccattcgtctccaagagtaccggaaacggtacatgaggcacattccgatgtggtatggtgttcgaatagtaattgaaaagcacatagtaatacctgggcggatcaagaaaaaagcccctttcggggctggtttgccaaaagggcaaactgagaaatcatcgcggctaacgagtccgcaacttattgggaaccactcgccacacagagtatcacgcaaggctccttttttccagttccaatttgatattgtgaacgggaagcatcgaagactgtattgcagggttcatgtcgaaagggttcgttatggggaagcgcaatcgtcgttatcgtgttgggatcgatgtaggcctctattctgttgggttgtcggcgattgaaatcgacgactcaagcgacaatccctacgaagcaatgccactcgatattttaagtatcatgtccgttatccacgacggggctttggatccaaccgggcaaaagagcgctgactctcgaaaggccatatccggtacggcgcgtagaacacggcgtctgtttcaaacaaggcgtgagcgctatcaagaactcgacagtttgctgagcgaatacggttaccctgtggcgcaggcgagcgagatggtttcgaacatgcacggcgaagatccctatcttccttggcgagcccgcatatcgctggttgagggctttatcgaaaacgatgcaaggagaaagctttccctcgccattgccatgcgccacatagcccgacatcgtggatggcgcaatccttattccagcgtgaacgcgcttaaggagagcgcccttgttgcctcttcgttctacatggagtttttccttaaagtccaaagatgactttcccgaaacggcgaggaactattcaagggtgtgaaagtgagagaagatgcggatggcaaggtgctgtttgagggaattcccgcatgggatactgagccgcttgacgaaccgaggcttaccgttgctgagctgttagaaccgcttctcgcgccgaatcggaacaaccgattcaggaaaactccgccagcaggattccctgccgagcaatttgtccacgtcggaaaactgcaccaaagcgacaactactacgaattgagtcgtatatttgaaattcagaacgtacccgaggcgcaacaaaaggttttcttcgaggcggtttttcgtcaggctaatccaaaagatacaggtgcggcggcgagtctcatagcaaaagacgacttgcagccatctaaaatccgagcctcaagagcttcgcttgcctttcagcgctaccgcattctcacaacgtttgcgaatctcagaatcaagcagaaaggggaggggaggcgccctctttccgacgaggagcggcatgggttgttcgactacttgacctcttgggaggtgtcgtgtcgaggttcggatctgacatggcacgatgttgctgacgtgctgggcgtagaaaggtgcgatcttggaggcgttggcggtcagactgcggacgggtctcctatttcttcaaagcagcctccttacctcaacacggaatatgcgatcctgtcatgcgacaagatcgataaacagctagaaccactacgggaatggtggcgggaagccgaacccctcagcaaagaattccttatcgagtttctcggtaacgtcggaatctccggatcctctttgagcgacgaggggcaaagggcgatggcttctgttgaagagcttcttgctgatctgggcgaaatgggagaggaaacgatggcctctttggataagattcgcctatcctccggccgcgttgcttacagcgtcgatactctcgagcggctcaatcgtagaatgctcgacgaggggctcgatctctttgaggcgcgcaaggcggaattcggcgttgaaaacgattggcaacccaaagcgaatccgctgggaactccgacgggcaaccctgctgttgataggactatcaagatagcctcgcggtggttgcgtgcgtgcgagcgagaatggggcaagccggaaaccgttttcgtggagcatgttcgagagggcttcaaatccgagaagcagaagcgcgaagagcaatcgaacatggacaagcgctatcgggcgaatggcgctgtgcgtgaggagattgtagcggcgcttggggaaaaaccgggatcgggcgcggtggacaaagaggcgatccggcttgcggaaatcaggcgctggcaggcgattcagcggcaaaacggctgttgtctctattgtggaacgggcatcgacttctcaaattcccagatggatcatatcgttccacgcaagggcgtcggttgctcgaacgagcttcctaacctcgttgcagtgtgcgctgattgcaacgctagcaagaacaacacgctgttctattcatgggctagtcccgagatgtgcgaagccgctgtggagcgggtattcttttggaatcgcgacagctatttctcgtcggaaaagcaattcgggtctttcaaaaacgatgtcatagcacggctgaagcaaaaagaagaagacgatccgatcgatgcacgctccattgagtcggtggcatggatggcgctcgaattaaggaaccagattgccgggcacttcggctatgaagggatggtgtcgctggccacggaaggcaacgatcccttcgctatgcagcgtgtccgggtattcaagggatggattacctctgaggcgcgaaaagcgagcggtttggagaagagccttccctggattgggtcgagctctgaaaagacgaggcttgacaggcgccatcatgccgtcgatgcggccgtaatcgcaatgatgaggcccgaagtggcgaaaacgctgatcgaacgcgatgcgattcgaagaagttcgcgcgatatagggcggaggttcaagagaggggaagaaggagattggcacgtctatcggggcgcagacgagaatcaaagcaaactgtactgcttctggcgtgatgtgcaaatgcaacgtctcaaagaactgatgatccagtatatgaaggatgatcgtattgtggtgtcgaacccgctgcgtttgcgtgtcggggttggacgtgctcacaaagacacgatatcgaaactgacgaagcggagagtgggagatgagctgagcgctgcggcgattgacaaggcggagacttctgcgttgtggatcgccttgaccaggcaaccggattacgatgagaatactgggttgcctgcgaacgacgcccgacgtatcagattacatgaccgctggctatccgcagacgatcccatttactttatggcaagcgaatccgagctggatatggtaaaggatgccgtctatgctccggtgcggaatggctatgcgcccattggggatacgatccaccatgtgcgactttatcgcgttccgaagctgaatagcaaaagaaagcggacgggatggcagtatgcctccttgcgtgtgttccaggtggatctggtgaagcatgcccagcataatttgttcgacatcgatctgcccatgcattccatatcggttcgctccgctgtgcctatcttgcgatcttcgcttgctgggggaaccgctgagtatcttggctgggttgtggtcggggacgagcttgtcgtggacgttgaggctgcgctgttcagtcccgagggctctcagaagatgaacaagtttatgaaagcattcccgggtgtccgacggttttctatcactgggtttaacaccaattcgaagcttaccttagctccccggtatttctcttctgaaggtttgccggacattgactggaagggagttgatgtcgacatcgaaaagacgatcaaccgcacgtacgggagctatggctggaataaatctgatgtcgacgctatcaattttgtgatagaaaaggggtgccctctatcgattgacaaggtgcttgcaacgcacccaaccgttatgcggcgaaatgcattgggcgtgccgcgttgggggtctgacaacaacatgccggtgagttggaaaataccgccgcatccgattcaataggcggtgtttcggatggcggacaactggaggatgcttgattttacagcgtttcacggtgagcttcgctttaacaagcacgcaaggaagcttcagaccatcgatttggacacgggcgaaaccacggagcattcgctttgcgacgtgaacatcgtgtttgtcggcatcaatgtacggcttgcacctgcgatgatgtaccatttcgccagccaggacgtggtcgtgctcttttgcgactggaaaggtcttccggtgtgtggcgtgtatccatgggttgacgcacatggccgtgttgctgcgaggcagcgcgctcaagcgtcgttgagcgcgccccgctcgaagaatgcctggatgcgcatcgtgaaagcaaagatcaagggacaggcaaacaatctcaaagttttgggtttgtccaatgcggcaaggctcgacgagttgtctcggaatgtgcgtacgggagattcgtcgaatgtcgaaggtttggctgcgcgaatatactggtcctccttgtttgaaggcgaggcgttttctcgaatgccgggcgagagggcgggaggccgcaattcgttgctcgattatagctatacgcttatgcgcgggcacagcatgagagctgttctttccgccggattgactccggcgctgggcatgtatcaccgcaatcgctctaacatgttcgcgctcgccgatgatctgatcgaaccgtttaggcccgttgtcgacttcgccattgtgaatctcggaccggacgccgatctcgaagatcgcaacgtgaagcgcgcattgatgcaatccactctcaccacgtttagcaacaatggtttatccgtgccggcagttatgacggattttgcccagcagtatggcaagtatgttgaaggagaaattgagcatttggatgttcccgtatggaaccctcgaatcgaaagcgagcctcatgagtcctaggagatacgatgctatgtggtgcgttattatgttcgacctgcctgttcagacgaagctgcagcgcaaagaggcaagcaagttcagaaaaatgctcgtcgatgccggatattctatgatccaattcagtgtttacgggaaatactcgcctaccaccaacggcaacatgagctcggagcggtcaataaaacagaatcttcccgcagatggggaggtaagaatatttcatctgacagatagccaatgggcttctgctactcgatttcgcgcgaaaaagatcgagagaaatgaggaagcgccggatcaaattgcattgttttgatagcgatttctagcctccctgtaaccgaaaaacaagtgaaacaccagatggttggatcaaagctgctcgaggtggttcggtttatgttgggaaccactcattttcccatctgatacactactcgtcattattctacccacttaatcatgcgttgggaaccactcattttcccatctgatacactaccagaccaatagcaagagcaactaactcggttgggaaccactcattttcccatctgatacactaccaaaaatcgtgatcaacgacgtagacgggttgggaaccactcattttcccatccgatacactacaaggagctgtcttccttcctgaaatcgtcgttgggaaccactcattttcccatctgatacactacacgaactcactacctgcgagcgtcatgcgttgggatccgctcaattccccgtctgatacactatcgaccgatcgaaggcccatattgggaatcacccgtttttcatccggaattgatcgctcatgtttgcgatttgtctctagtggatcgagttccgttaccccagatccaacccgccgatgacttcctgcagcgctttcgccgacgcttgcagccttgccagctcgtcggtcgacagcgggcagggcacctggtactcgatgccgtccttgcccaccacggccggcatcgacagcaccacgtcgtgcaggccgtggacgccgtgctggaagttcgacacgggcaggatgggcttctcgtcgcgcacgatggcctcgcagatgcgcttcaccgacatggcgatgccgtagtaggtggccctcttcttcgcgatgatctcgtaggcgctgttcttcacgtcctcggcgatgcgctgcatggactcgtcgtggtcgaaatggccgcgcagctcgcagaagtcgttcacggggatgcccgagacgttcgccgtgctccacgctgcgatctcgctgtcgccgtgctcgccgatgatgcgcgcgtggacgttgcgcgggtccacgccgaggtgctcgccgaggatgtacttgaagcgcgcggtgtccagcacggtgcccgagccgatgacgcggttctcgggcatgcccgacagcttgagcgccacgtgcgtgaggatgtccaccgggttcgacaccaccagcaatatgccctggtagtcgcgccgcgcgatctcggggatgatggacttgaagatgcccacgttcttgtgcacgagatcgaggcgcgtctcgccgggctgctggttcgcgccggccgtgacgatgatgatggccgcgtccaccgcgtcgtcgtagtcgcccgcgtagatgttcatggggccggcgaagggcatgccgtgcgcgatgtcgagcgcctcgccctcggcgcggtcgcgatcgacgtcgatgagcaccatctcggtgaacagctcgctctgcatgagcgcgaacgccgtggccgagcccacgaacccgcatccgacgatggccactttccgatcattgacaacgcgctgcataggcacccttccgttggctcgtacgcttcatgttcgactgagaacctactgcatgccgctgcccgcgtcaaggacgttcatcgattgtctgtaccgaaagagggataggggttccattctgatcgtctggcgcgcggagcgtgccagacatcgttcgggcgaagaggggaaggtgggccgcatgcggggagggggtccgccgatgctcgtcgtgcgattgacggggaagctgcgctttcccgcgggcgcggccgcacgggaaagcgcaggggcggccggcatgggccgcccctgcgtgtggggtaggtcgaagatacgggcccctaggcggctgcgaggtcgatggagatcgcggggatgacggtggaatcgtcgctcgcggcggcgctgtcgacggtgatatcgacgcgcgtgcccgtgatcaggcctcccgtggtgtcggtggcctcgtctttcgcgaacgtcatcgttgctccgtcatcggtgacgatggtgacggtattcatggtgccgtccgtcaccgcccctgtgtacaccgcgttcgtcgccgcgttcgcgtcgtcgtcctccacgctgacgaccgttgccgtgctggggtcgctcgtgagctcgccggtgtacgtgatgctgaccgagttccccgtctggatgccgttcttgtaatggtgctgggcatccgtcacgttcagcgtgatctcgacgccgtctatctccacggtcagcgtgttcatggatgcgtccttgaccgtgcccgttgcagcttgttgggtgggctcgggtgcgggcgtcggatccggttcaggcgcggggacgggggtgactaccggggccggctcgccgccttccgtttggggcgtggccgccggttcgccgctcgtcttggcgggcgctgcgctcgcggccggggcctgcgtggtcaggtaatcgccgtagatgtaggcatcggtgccgttgtagttgacgcgcgaccagccgttgtcgcacacgccggtgcgctggatggattggccttgggcaaggttccccagaatctcggaatccgtggaatacgaagcgcgtatatgcacgcctgccgtggcgtacgtcgtttcgtccacggccttgatgttcatctgctgcttggcctgctcgacggtgttggggtcgttgtcggttatcttgaccaccttgacgctggagccgtcggtgccgttgatcgtgccgagataggtcactaccacccagttgccttcgcgcatgccgttcgcgaagtcgtgttcgcagttgctggagttgaacgtgatctcggttccgtcgttctgcttgacggtgatggtgttcatgctcatatcgaccagcgagccgaccacctgctgctcctgctgctgcgtgggcgccgctcccttgtcctcgaccagcgtcacgttgactccctttgtgccgtcggcgtccagatcgccttcgtaatgcaccacgatctcatcgccggcaaccatgttggcggccgatacggtggcttccgacacgtcgaacgtgtaggattgcgcgttgctctccatcaccagatccttgcccgagaagctcacgagcgtgccttcgatcgaggcttcctgcttctccgctgcctggtgttgcggctgcgggtcggcctccttctgatcagggctgctgcatcctgcgagtgttcccgcaagcaccgccgccgctatcagcgttgccgctttccatcctcttcccctcatcgcgaatctccttttcagcagggtgcgctcacgcaccgcatggcttaggtatgccccaaggcttccacgattatatcttcgggaatgtttgccgatacgctttcgaccacggttcaacaggcggtggaggacgcaagttccgtgcggcagacgttggacggcatcgagatggccgtcgcctgcggcgaggcgtcgctctcggcgtgtttgagatcgcagcccgcctcgtcaaggacgttcatcgattgtctgtaccgaaagagggataggggccctatactgatcgcatgcgcgcgagatgcgccgcgcccggccgttgcgaggaggagccatgtccgcgaaccgtcagaagctcaagctgctgtacctcatgcagatgctcgaggaggagaccgacgccgagcgcggcctcacgatgatgcagatcctcgagaagctggaggagctgggcatctcggctgagcgcaagtccatctaccgcgacatcgaggcgctgcgcgagttcggcgtggacgtgcgcacctaccagcgtgcgccggtggagtacgccgtggagcaccgcgcgttcgcgttcgccgagctgcagctgctggtggacgcggtgcagagctcgcgcttcctcacgcagcgcaaaagcgacgcgctcgtggaaggcgtgaagcagctggcctcgcggcggcagcgggcgctgctcgacaagcgcgtgcacgtggagggccgcatcaagatgcagaacgagtcggtgttcggcagcgtcgaccgcatccaggaggccatcgcgcgcaaacgcaagatatcgttcacctacttcaagtacgacgcggcgaagcgcaaggcgccgcagcggggcggcgagcgctacgtcgagacgcctgtgcagctcgtgtacgccgaggggtactactacctggtggtgttcaacgagaagcacgacggcttcgcgaactaccgcgtcgaccgcatggaccgcatcgaggtgctcgacgagccggcgctcaagaacgagcgcatcgccacgttcgacgcgcgcgagctggaaagccgggcgttcggcatgtacagcggcgagccggtggcggccacgctgctggtggacgaggaggtcatgggcgcggtcatcgaccggttcggcaaggacgtggagtcgatgccgacgggggagggccgggcgcgcgtgtacgcgacggtgatgaagagccccgtgctgttcggctggctggcccagttcggcggccgcatccgcatcgagaagccggcatcgctcgcgcaggagtaccgcgcctaccttgcggacatcgtcgccgcgtacgagtaggcgccgccgcgccagcgcttcggctgcccgtgcgattcacaccgctcgcggcatcgcggccgcgccgtgctcgcaggcgggccggccgtcgccgatgacgagccgtccgccgtcgtcgagaacgacctcgagctccacgagcagcccgtgctcgtccgtgctcatcacgaggtcgctcacccgccgcccgatggcgtacgagcaggggcgcaggctcttccagcgcagccccgccacaggcgcgtcggtttccacgctgccgacatgcagcgcgatgtgcggctcccgcatcacgaacgcggcgaggtcgcacgtctccagcctgaggacggtgggcgcgccgggcaggtaggcgcgggcgcgctcgtcccagagggtgagcacgtcggccacgtacgctccgatcgccccgcacgcctgccgtctggtggaggcggccaggccgcgcgcgtcgtcgaaccatcgctggtacaggctggcgaacgccgctgcggcgtcgacgggggcggatgcgctcatcgcgcgtcccccgcgtacagtcccgcgcgcccctggcgccaagggtcggcttccgcatcgacctgcaacacgcgctgctccgttcccggcttgggctcgccgagggcgagcgcgccgtccccgtgccggagccctgcgatgcaataggtcgccctatggcgcgacggttcgtgcatgatgcctcctcttctttcgcttcgatgccgcctatcctaatcgtgcgcgtgggcgccacgtgtcccacgcgtgggacatgcgcacggtttttcgcgatcgcggtcgccgatgcgtgcaaatgcggctctttgtgatgaaaaatcgggtttttggcaatcctcgcccatccgaacctgctgttgtgccaccacggagaccggcgacctggggtttcgcgcatggaaatccccgagaagatcgccaagattgccaaaaacccgatttttccgcacatagcccagccccaccgtgcatccgggttccatccgccgtgcgtccgaaggtcgcgtcccgattcgtgcattcggatcctcgtcctcgaggcgaagcgcgcacgcggaggacgccggcgcgtccgtccatcccgtgtgccttcttcgccggttggttggcagggggttgcgagccgcctcgttgcgttagaatgacgcacggagactacggggcgcgcagggcgcgcggcctcgattacgggatagagtggacggagaaccgttgagcaagctatcgatagcgccccggtcgcgcgacgacgcgcgcatcgccgcgcagctgggcgcatacgggcggcgcgtggaggccaccccgccgggcatgtgcccgctggccgtgcagctgacgatgctgcaggcgagcggcgcgcagacgtgcggcaagtgcgttccgtgccgcgacggcatcccgcagcttgcggcgatgctgcagcgcgtggtggactgcgacgcggacgagggcgcgctggagaacctgcgcgcgctcgccgagatgatccgcgacacgtccgattgcgccatcggctacgaggccgcgcgcctcgtgctcgagggcctcgagacgttcgccgacgagtacgccagccacctgcacgcgcgttcctgccaggcgggcgtcggccagacggtgccgtgcgagacgatgtgcccggcgcacgtggacgtgcccggctacatcgcgctcacggcggcgggcgactacgccggcgcggtgaacatggtgcgcaaggacaacccgttccccacggcgtgcgcgttcgtgtgcgagcacccctgcgaaacgcggtgccgccgcacgctcatcgacgcgccgctcaacatccgcggcatcaagaagttcgccgtcgaccagatgcctgccgaccaggtggtgccgccgcagcgcggcgtggacaccgcgcgcaccgtggccgtcatcggcggcggcccgagcgggctcacctgcgcgtacttcctcgcgctcatggggcaccgcgtgacggtgttcgaggagcgctcccagctgggcggcatgctgcgctacggcattcccgcctaccgcttcccgcgcgagcgcctcgacgaggacatccgcggcatcctgaacgccggcaccatcacggcgcgctgcggcgagggcgtcggcgcgcacgagatggccgagatcgccgacacctaccatgccgtgtacgtggccgtcggcgctcaaacggggaaatcgctgcgcatcgacggcgtggatgccgaaggcgtcatgtcggccgtcgacctgctcggcgctatcggcgacggcgtctaccccgacttcacgggcaagcgcgtggtcgtggtgggcggcggcaacgtggccatggactgcgcgcgcacgtcggtgcgcgcgggtgcgtccgaggtgtcggtggtgtaccgccggcgccaggacgacatgacggcgcttccggccgaggtggaaagcgccatcgccgaaggcgtggagatgatcgtgctcgaagcgccggcgtccatcgagacggacgagcgggggcgctgcacggcgctcatcacgcagccccagatgatcggcccggtgcgcggcggccgaccggcgccggtggcggccgacaagccggcgcgccgcatcgaggccgacgtcatcctcatcgccgtgggccagaacgtggtgtcggccccgttcgaggagttcggcatgcagaccacctggggatgcttcaacgccgacgagcacctcgcggccgaaggctacgacaacgtgttcgtgggtggcgattgccaaaccggtccctcgacggtgatccgcgccatcggggcggggaaggtggccgcgcgcaacatcgacgagttcctgggctaccaccacacgctgccgagcgacgtcgaagcgccgccggccagcccgaacgaccgcacgcccaaggggcgcgtggaaatcaccgagcgacccgcgcgcgagcgcaagcacgatttcgaaggcgtggagacgggtatgagccgcgaggaagtcgtgcaggaatgcggacgctgtctgcgctgcgaccacttcgggtgcggcgtgttggaaggaggtaggcaccagtatgcctagcatcacgatagacggaaccaccctcgacgttgccgagggcgcaaccatcctcgatgccgcgcggcaagccggcatccgcatccccacgctgtgcttcctgcgcgagcgcagcgccgtcgcgtcgtgccgcgtgtgcgtcgtggacgtggaggggctcgaccagccggtgccctcgtgcgccacgcccgtgcgcgacggcatggcggtgcacacgagctcgccgcgcatcgaagcgtaccgccgcatcgcgctcgacctcatcatcgccgatcacgggctcgattccacgaactactgcttctcgtgcgacaagaacggcgcctgcgagctgcaggccctctgccgcgagtacggggtgctcgagtcgccctacgagacggcgcagaagcgcgagccggtgctcgacgacaaccccttcctctcctacgaccccaacctgtgcatccgctgccagcgctgcgtgggcgcgtgcaacgacgccgcgcgcaaccacacgctgcgcacgggcaagcgcgggacgcgcacgctcatcgaggccccgttcggggagggctggcgcgccaccgactgcgaatcgtgcggcaactgcgcgcaggcgtgcccgacgggcgcgctcaccgagaagcgccgcgcggcctaccgttcgtgggagaccgagcgcgtgcgcaccacgtgcccgcattgcggcgtgggctgccagctcgatctcgtggtgaaggacggcgtcgtcgtggacgctgaggccgcgccgggaccctcgaaccgggggctcttgtgcgtgaagggccgctccgccagcttcgacttcgtcgacgcgcccgaccgcatccgcacgccgctcgtcaagaaccgcgaaacgggcgagttcgagcctgccacctgggacgaggcgctcgatctcgtggcccggcgcttcacggagctgcgcgacgcccacggcggcgagtcgctggcggcgttcgcctgctcgcgctcgacgaacgaggacatctacctgttccagaagatggcgcgcaccgccctccaaacgaacaacgtggactgttgcgcgcgtgtttgacacgcccccacggtcgccggtctggcgaccatgctcggttccggcgcgatgacgaactccatccaggacgtcacgcgc

SEQ ID NO: 3386 - DNA, 15929 bp, synthetic construct
  misc_feature 1..15929: note = Synthetic
  source 1..15929: mol_type = other DNA
tcgaaatgtgctgcgttggatgcaaacgagagcatatattaagatacccgcgaataacgctccgaatccagagtgaatccccagtggacctttaaagacataagtgcacagtccgtaggtaaatgaatatagggccacgatgacgatcggtttccatggaagagaaaatgtaccccattgttttgtgggtagatcatctttagagataagtcgatatgcgtgccgaaggcaatcaagtgagagcaatggaataagacaaacgcatacaacaagccaccgaatgtctaatcctttaaacagccataagatcaaaccaccaataacaatacccccagaaaaataaagcaaaactttggtagggtttaagcagccaaacaattctgaccattgcaagataatggtcgcaattccgatacttccacatatgacgccgattgttcctaataacattgcgtattgagaaacctgtattgacgcaaaattaaccaaggcacttgcaatcaaaccaaatccgcttaatatgcttggccattttttgctaaaaaaaggagtcacatgttttgcattaaatgcgtatacgaagagaaggcatgcagaaatcaaattgaaagcggcaaatcctgtccaccagaattgttgagcgggaaaaaagacttggttgttggaatatatttcttctgtccagacacgaaaaattcccatgccgctcatgcatagcggcatttctataaaaagctttttcttagatttgctcattaaaaaagactcacttataagacgctaaacatgttacacatgtgattttcacaatcctagttgaattctgcttaaaggttccggaaaagtcggacaaatatcaatatgagtaaatatccccctgttttacctggggtggatgatataaaaatgtgccaattctccctaatcttgttcttacaaatccaagcaattggttacaaaccaaactgttggtcatctctatgggagggaatatgaaaaagggaattactagacgttcgtttctcactggcgcagctgcatctgctgttatggctacagggcttgcaggctgctctacgcatcgtagtcgttcggatgatgcaaataatgcatcaaacggaactgtttcagacgacaaccgttggagttggtctaaggcaccggatgcaattccggattcagatatctccgatacctacgattgcgatatttgcatagtaggcttaggtgctgctggcgctccatccgctatgtattcagctatgcatggagcaaaaactgttgttcttcagaaaggcgatcacgcaatcagcaatggttggtgtgctaatgcaatcaacaataaagcatggttagactctggcggagcaccatttgatacaactgagttatatgcgcaattcgctccatatgctaatggtcgcgataatccaagacttgtgaaaactttcttggaccgcggcggcgaagttatgaattggattttggaccaaacaaccgaaattccccctgtctgtgttgagcatgggcaaactcttggttggtatgaaaacaatgatttccaaactcgttattcacgttatgcagatctcttaaatcttatggcgcagaaagctgaagatgctggtgcgcaaatgttgtggaacacacctgcacagcaacttataacagatggcaatggaacagttactggcgttatcggccaaacccaagatggtaattatgtcaaagttaatgcttctaagggtgtcttgctggcatgtggcgatattaccgatgatcaggaaatggtcgaatgctatgcgccgttgttgagcggaattcaaaatcttcatggtgcgccaaataacaccggtgatgctattaagatgggttcatggattggtgcacaagtaacgccagctcctcatgctattatgatgcactttgacccaacacgccttcctgaaggtgatgcaccattctcaggcattccttggttacgcgttaatgaaaatggtgagcgttttgcaaatgaggatcttccgtatcagtctgttgttttaagtgttgccgcgcagcctgatcgtgttgcattccagatctgcgatcgcaattggatgaaccatattaacgactatccaaatccaaatagtcacagcagagaaaacccagatccagaaggaaactggaataagtttttaggaacaggtgctattaagcaggcaaatacgcttgaagaacttgctgatgctgctggtataaatgacaagcagactttcgttgcaaccgttaatcattacaacgagctctgcgacaaaggccatgatgacgacttcggtgtcaatggaacattcatgtcttataacgccattaaagagccgccattctatgcgatcaaacgtattccgaatgttctggctaccgttggtggtttgcaagtaaacgatcataaccaagtgttgagccaagatggtggcactatcgggcatttatatgcagccggagatgacgcaggatcgttctatggacacgaatatccaatgttccttcctggtggatctattggcagaggcttcattctggggatcttggcagtgaaagatgctcttggagattatgacaccccaacacaatagctccaagaaattagatactttgagatttcagaacaagatgctcggaacttgctaacgcagagatttctttacgtaaaatgtgaaaacagtttgaactgaaatttcagagatagctaaacatatcttctggtccggcttcgaatcctaccctccctatggattcggggccgtgccattttaaccaattgtctccctacaaacctggagtaattgtttagaagattgcttttgcgcgtttcggctgccactattttaaaagaaaatgttcacgcattcggatttcgaaaagaagccatggccaagcaaacagcaagcgaaccacaaatgcaaaacgcttcagagcaccaaagtaaatatgcttttgtgattgctgcgtgctgctttctctttatatttgtagacgttggcatggtatcgacctctttcaacgtgtatcagccttacatcgttgagcttgtgggggacgccggaggatcgctcgttctcacatttcgcctgctggcttctacaatcgctatggtgtttatcgtcaactattaccatctgcttgacctgcgtgtgggcgcgacggcatcgatggtttttgctgcgttaggctttttcattttcggcgctatgcaaacgctctcaggatttctgctagccactattattattggcatctcatacggtcttggtggaaatgttgctatgacctatgcggtgaatcgctggttttcgaacgatgttgcgagcatcatcggggtggcggccaccggtagcggaatctgcgccatcatcatgccgccgatcattacctttttggttgagacagtttcactttcctgggcgttttggatcgaatcgattgttgccttaattcttgcggtggtcgtgtttgctttgttgcggaatcgcccttccgacttggggcttaaggcatatcacatcgctgaaaagaaagaacgacggtctgcaaaagacgtatcggcacgtaagccgcacgtattcgaactccctgcggatatggatttgtcggcccgggcgaaggttgcccttgcggtttccgcattttgcgtgggaatcttttgcgtctcggcagccagctacataaccattcacatgacatcgaacggattcgaccctcttttcgttggagccttagtttcgctcggagggctttgtcttaccgggtcgaaggttgtttcaggcaggatgtacgaccgtatcggcgtgaaaaagggaacagcaattttatatgtgatcgagattgccggtctagttgctgcgctacttatccctacaggaaatccgcttgttgcggtgatttgcatcttgggtatgtactggggcggcgcgctgaattcggtgggaatgcctgtgtgggcaatcgcgctttcgcatcctgaagatcgatcaaaactcatcaagaatgtgcaggtgtgttataccatcggtgcgctggtctttaattttatccccggatttttagtatcgttttttggcagctatgaaatctcgtacgcgctatttttaatcgccacggtgggatcgatggttgtgatctcggttctgttcaagaaatatcttcgtgcacgtgatgctgaataggctttcagcagtgtgcccctagatacattgatggcgcagctccaaatccaaccctccctttggattcagcgtcgcgccatttttaacatatttgcaattcaagataataacataaatttcgtcatcatgaatagttctgtctgatatacgtgtcgtttgaagcggagcgcgtgctagctaaagcgcttagtaaagcgcttagctaaagcgctgagcatccccgcgaagctttctgacgggaaactcaaagacttcggcgcaaccgaaatggcgaacagctcgaagactttcgtgcattcgcaatgatggacagcccgagggtttctgcacttccaaaatgacaaacaacccaagggtttctacgcgcatgggcgattatacaaattagaaacacccttttatataggaacctattgttgtacaacttcctatgttaactatcgtgcacataattacacttttttaatgccaatatttcacatggcattatgaaaagtctcaatcgtcgagaagggaaaatggctgataaaacgaagagtgcgccccaagaaaatgcggggcgtcacagcaagtatgcctttgtgattgcagcatgctgcttttttatgatgttcgtaaacgttgggatagtttcaacttcgtttaatgtgtatcagccatatatcgttgagcaagttggagatgcgggtggctcgctggttatcacgttccgcctgcttgtttccgcaatctctatggtgctcatcgtcaactattaccatcttcttgatttgcgtgtaggcatcacgctatccatggtattcgcagcaattggaatgttcctttttggatttatgcagtctctgcctggctatatgtttgcaagtatttttatcggcatcgcatacgggctcggtggaaatgttgccatgacctatgcgattaaccgttggttcgccaacgatatcgcaagtgtggttggggtggctgcaacaggaagcggagttgcgggaattctcatgccaccaatcattacgtatgcagcggaaactatctcgctttcctgggcgttttggatagaagcaattatctcgctcttttttgcggttatttcattcttgctgttgcgaaatcgcccttctgacttgggtcttaaggcatatcatattactgataaagcagatcggcgccgtgcgaaggggttgcctgagcgcaaaagcatacaccagtacactattcctgaagatgtacagctttcaaaacgagcgcagtttgctcttgctgcatctgcgttttgcgtaggcgttttctgcacttcggcagttttctatatcacgatacaaatgacttcaagcggttttgatcctgtttttgttggtggaatgatttcgcttggtggtctttgccttacgtttgcaaaggttgtaacgggtcgaatgtttgaccatataggtgtgcgtaaaggaacaaccattttatacatgatcgagattgttggtcttattgccgcgctgctcattcctacaggaaatccgctctttgctgctataagcattttgtgcatgtactggggcggttcgatcaactctgtgggtcttcctgtttggggcatttcgctttctcatcccgaaaatcgctcgaagctcattaagaaccttcaggtttgttttacgaccggtggcttggtgtttaacttcatcccaggtttcttggtaccgatttttggtggttacgagatttcgtacgtgctgtttttaatcatgacggttatttcaatggttgtgattacgacgctcttcaagaaatacctgcatgcaccgggcttatttagcaagcgccacgatgaggtacatgcataagagataatggcgaggcgcaggcgtaagagatgacggcgagaaccagcgtaagagataacggttggggtcgacgccaatgcaaaaatgacgcgcagccgcagacggcaaaagcaggtggcaaaaaattcaggctcctgatctgcatcaagagcctgaatcgtgaagccaatatgtgatgatacgaagtcaacaaggaacgcttccttggcttgcgaaatttaaggcaatgcaacttcccaatttcgtcctgacttcgtgcttatcgccagttcgttctcacaagctatgaaagcatgtgctgaccgccgttgtcgtggcattcgccgcattgatcgacttgcgcagcatgacctttatggcactcatcgcaatcgatctgtccgtgcggagaattgtgtgggttgtacggatcaagatatgatgtctgctcggcaagggcttcataggatccgccatggcaatccaggcacttctgattgtcgacgtaatggccgctcgcaagcgttaggtcgccataggttccagaaagctgagcttccacttcagaaacctgcgtattgagatcagcctcatggcaatcaaggcatgttaaaccattatccgcatgaaccttcgctattccgggaccattttcgtaattggtgagatgctcactcatcgtcgtgtggcataccgatccgcagaacgcgggggtgttgtgccattgccaaagtccaatccctaacgccagaaccgcaacaatgacaatgatggcaatcgtaattctctttttgttgtttaccgcttttgtagtcgaagcttggctagcttgattggtattattctcagccattgttaaatccccctcgctgcattttgtcccgaaacatatccgaatgtcaggcatctgcctgcagaaggtccgaagatgtgacgaggatagtttccactgaagaatccgccagaagcaccgcctgcggcataaagatgttcaatagggttgtcgtcgtaatcaagaacgtggcaataatagtccactaccaggccggaaaccgttgctagaatgcattgctgctctttaaaagcccagaattcattaccttccatctttgttgcagtctgcatcggcttgttgaaatcttcatctttgcggttgtcgacgaattggttgtaacggttaatcgtttcgaccaagttatcagcaggaacgcccatgtttgtcgcaagctcttcgacggtagacccagtgactaaatagcccttttcttggcaatagtcgaaataagtttgtacatctgaccagtcatcggcgcgctgacgtctgaagggatcgatctgagtttggcttacaacacgccagcagtcagagccgtaatgacgctgcgcggaaatggcgtttcctcttgcctggaacggaagcgattcggaagcaaaccgaattccgttttcattgatgagaagtccttgaccgacgaggcggtttgctcctctggagtaataagcttcagggttgccgaagtcgaagttcatgattgccgctggcaatggatccatctgtccgccgatttcgaggcccatcagctgaccgtcgcccgttgtgccctcggtcggtgcccatgaggtggtattcgcaatatcttcagcacgacaccatgctttaagcatcgcgggatttgcatcaaagccacccgttgcaagaatgacgccattattcgcatttacgcggaaatacccatcgctatcctgacaaattgcaccggtgacgaccccgtcatcattacgctcaagtttgcagactgcggtgttgtaacgaaggtcggcattgctgcgcttctggaacgtgtttgctaagtctgcgacgatatagattccggcgccacctgcattacttgttgtttgttcggaccattgtggcgaacggaatgcaatttctgtttgcggcacatcaaaattgtgagcattcgcacttccacgatggaaatatgtttcgatttggccatcgccctcgtcaaaacgatcttgcagccagtcgactgcttcacctgagcgatctgcccaaagtttaattggatcaacgggcacgcgataatacgccgcgtgacgcatacggtccatcatttcggctttatcgacgttgttacccgctgcttccatgactctgccgccgacaacacccgcaccttcgaagatgcctcggcctttcgacattttctcaaagcagaatacgctggtgtgcccgtcgtcagaagcggcgagtgcggcacatacgccggtccacccagcgcctgcaaccagcacgtcgcaggtttcggtgcggttgatctggttttctggaatgtctcctgcgacataggcaaccgtgccttgtcgtgtagtttcgcaaggagcatcaatgattggcatgtttcttgtttgaagtggaaaaacgtcggtgtatacgctttcgctgtaatctgcgacgccgcctccaacatgtttgattggctcttctgcgtttgcgttattgctcgaacaacccgtcatgctaaatgcacccgtagcagctgctgctgcaagtgcactcatccctgcagtttttaaaaacttacggcgggatagtgagctgtgttcgcctgttcccatatcctttccccccatacgagtttgacgaaactgatgctcggttgtcatagaaatgacaactttccttaattatatacactgtacgtaattaatggtaggtatatggcatatttaatgagtccatctggacattttttgttgatggcaaagaaattagcccgagtttcccacaaatattttcttaaagctttttacgtcacggtttgaaaaattgatcttaaattgcatttccgcaagaataaatgagactaaattagtagatgaagttgaggattgcatgttcatttttgaggaggtttgagtaggatggcaaagcccggtgttgaaccagcatttacgaaacaggatattgttgatgcggctttcaatcttattgacgcgcagggtgaaactgccttctctatgcgaaaactcgcagataaattgggcatgagccccatgggtctgtattcctattttccttcaaaagcggcgattgaaatcgcggttgttgagaagatgtacagcgatgtagacaataaaccagttcccggagaatattgggaagatacgatgaagcgcatatgcaacagtttacgcgatgtgtcgctgcaacatccgcaagtgagaattctatcttcccagatcaatagattttattcgtcgaaccataacaaaaatatttactatgtgcattgtgatcagggaatgcctaaagatgtctaccgtatactttacgacgtgtttgctgcgtttttgagcggctttatcacgaatgaatgctacgaaatacttgaccaccatatcaagcatcaatcagcggacgggaagtctacggcatggtcggttcttaaagacagcgcatacagcagcgattcatttcaaacaggagtacagattttgctcgatggcattaaggtatatgctgctccagacccatgcgattggcgaaccccagaagatacatccaagtggacgtttcctgagtagagagattgtccagctctcaggaagatacttttggattcgtaaatgattcactcaacaaataagaactggttactttgactattttgatgtataaaggagatgcagatcttcaataagtgatggccttgtttgccatcatgatttctcagcacagagagaggatcttcctctcgaagccgccccgcaaggggctttttttatgcaagattctctaattgatacatgtcaaaattaatgttgcatatacatctcaaccgttttgtgatgctattgaccaaacaattggaaacaaatcctggctaatgagctaagacaaggattaatggcaaaaaggtttagggtaatttaactaatagttgagaagatctggatttaaggagaattatggctcagcaaaaaatacgttatcgaataggaattgatgttgggctttattctgatggcttaactgccattgagattgatgattcttctgatgatcctcgtgatgcgatgccaatccgcatactcagctctatgagtgttatccatgatggcggcgttgatcctcagaatgcaaaagtcgcagattctcgtaaagcagtttctggagtggcgcgacgtacacgtcgtcggatgaaacaacagcgaaaaaggctttctcagcttgatgttattcttaaaaagttgggctacccagttgatcgtgctcgagatatgtccgatgggacgattccagaaaatacttattggatgtggaatgcacgtatttttgctgcaacttcttatatcaagaatgatgatgagcgcgcattagcgattacggctgccgtgcgacatattgcgcgccatcgtggttggagaaatccgtatgagaaagaatcatcccttatagaggacagtaaaaagccttcggaattttatttggaattttacaagcgcattgctaaatgggaatatgaacgccagcaacagggtatacaagatgcgaatacgtatggagcaaccttctcttacgatgataaaaataatcttgttattactcctcctagttggggcgaaggtgatcgaccaacaccagcagaattagtaaaggatcttttagttccgcaaacaggattcagaatccgccgcgatccacctaaagaatctgaaaaaggtaataaatcttctaacgtggcagacattcctgaaacacagatgaaaaaactacatcagagtgataactgctatgagcttctcaagatttttaagatgcaaaaagttccggaaaatcaatgggatgaaatcattacagcggtatttaaacaggttaacccaaaagaagtaggcgcagcagcaaagctcgttgcgaaagatgatctgccgccgggaaaaccccgtgcgtcacgcgcttctatagctttccaaaaatacgtaatacttacgacgatcacgaacctacgtttggtagatggaaaagaagagcgtcgttttacagccaaggaaatccaaacagcatataagtttttgtgctcgcgtaaagtctctaaaaatggcggatgtacttggagcgatctagcagaaactcttggtactgaaaggaacaacattagaggaactggtggagttacaaaagatggcgagccaatttctaataaggttccgccctatctatcaacagaaaaagaagtgcagaaggtaaaacaacttgctgattggtggtacgacgatactccaacaaaagaaattgagcgtgagattttcattgagatgatgggaaatgctgggcttgatgtgtctcatttaacaaaagaagagcaagaggcaaaaagatcagttgacagtttcttggatgagcttggaaaaatggatgaggcagttctaaacaaggtagataatatccatttaaagtcagggcgcgccgcatatagtgttgatacactcactcgattgaatcgccgaatgcttcatgatgggatggatctttttgaagcgcgtaaagctgagttcggtgtcgatgataattggcgaccgcaaccaaataaactcggaacgcctacgggaaatcctgcagtagatcgcaatataaaaattgttgctcgttggatttgtgcttgcaataagaaatggggcaaaccagaaacagttaatatcgagcttgttcggcaaggcttcatgactccaaagaaagcccgtgaagaggaccaagcttatacgcgtgaatctaataagcgatatgaagcaaaccaaaaggtcagacagcaggttgcaaagattaaatctaaatataaagaaaggcaaagtgcgttatcggaagaggccgatgctaacattcatggtgatgacgcaataagtcatggtgatataagaagacttcaggcagttcaacgacaaaatggacagtgtatatactgtggtaaacccataacattccaaacttgtcagatggatcatatcgttcctcgtaagggtgtaggttcctcgaatgatctgccgaatctcgttgcagcttgcgcatcatgcaataaagataaaagtaatcagttattttatacatgggcgaaaacggatgagaaacgcaaagaagtaatcgaacgcgtagaccactggaacatggacagttattttacgagcgaaaatgagttcaataagtttaaaaaagatgttaaagctcgtctacttcagaaagaggaagacgatcctcttgataatcgttcaattgaatcagtagcatggacagctcgggaactgcgtgaacaaattgagggatactttgggtatcgtggaacaacgacaggtcatactgaaggtaacgaagattatagcctacagcgtgttagcgtattccgcggttctgttactgcagcaggacgtagggcatctggtttggagaactcgcttccatggattggggataagagtaaaaagacacgtctagatcgccggcaccatgctgttgatgctgcagtgattgctatgatgcgagattcggtggcattagtacttgctgagcgtgacaatctgcataggaatctcctcgatggtgcagtaagcgaacagaaatatctgcttcagaaattgaagatcaaagattggacagattactgcggagatgaaagacaccgtggtctttttgtccattggcgcgatgaacaaatgaagtatcttattagcttacttagtaatgcgatgaaagatggcaaagtaatagttactaatcctttgcgattgcgtctagggcttggaagagcgcatgaagatacaattaagcccctgtataaatgcaaggttggagataaactcacaccaaccaatatcgacaaggcagaaacaccacagctttggtgcgctctcacacggcatcctgattttgatcctaaggagggactaccggaagactggaatcgccgtattcgagtaaatgataaatggcttgatgcagatgatgaaattgggtttatggctgacagccaagaggatttcaattcagtcaaagatgccgtttatgaaaaagtcaatggtgggtatgcagcaataggaaatgcaattcatcatgcgcggttttatcgatatccaaaaataagtaaagcaggaaaacaaactggttggaaatatggttatgttcgtgttttccaaactgatttacttaagcatcaaagcgaagatttattccatgttgatttgccacaacaatcaatcagcgtccgttcagctattccagatttacggcgagcactctttgagggaactgctgaatatcttggttgggctgttgttggtgatgagatcgatattgtccgatcagatccctattatggtccaactagaacatctgccatcaatctttttttgaaagcttttcctaccattcaaaaatttaaagtaattggattaaaaagcaatgagcagataaaacttgcaccaatggaaatggcgtctgagggtgcttattcgataaatgacctcaagaagctcgatgaaaaaaacaattacggctaataaaaggaatgtaccaagatagctggtcattagatgatattaaaaaaattaataccgttttaggtcttggtggaagttggcatccatcagttgatgctcttcttaggacaaaaccaacaattgttcgtcgtaatacccttggtcaaatacgttggcatagtaacaatcacatgccatgtagttggactgtacctgatgaacccacattctaaagagttgctatggctaggaactggcgtgttcttgatttaagcacatttcgaggtaagtttctctatgacaaacgagctcggaaacttgttgtagtcagtaaggaaaccggtgaagaaactctcgtaggtcttggcgatgtcaacgttatgtttgttggcatcggagtggagtttggtgctggagttctttttcatcttgcttcagaagatgtggttaccgttatgtgcgactggaaaggaatgcctgtatcaagcgtatatccttggacggatgctcatggaagggttgcagcacgacagcgcgcgcaagcgacaatatctgtcccaagaataaaaaatgcttggatgcgtgtagtcaaagcaaaaatacatggacaagccaataatcttcgatgtcatggaatctcgggtgctacacagctagaccaaatggcatgcgaagttagatcaggtgacccgtcaaatattgaaggaagagctgctcggttctactggcaatgtttattcgggaaacaaggtttccgaagaattcctggttcgcgaaatgatcctattaactcaatgcttgattatgggtactcagttttgcgtggccatagcgtaagagctgtcattgcggcaggtttgactccggcattaggcttgcaccataaagggcgctctaatgcttttgctctcgccgatgatcttatcgaatcgtttcgccctgcagtagacgatgctgttgtaacgctcggatctactgcctctctcgctgataaaaatgttaaaaagtttcttgttggtgtcacagtaaattctttcggatgcgatgaccgttgtactgcaacggtcatgattgattttgggcaaaagtatggggaatatgtcgaagaagattcagggtttttagatgttccaatttggaagaaggaaaaccatgaaagttgatgggagagatactgtgtggtgtgtcgtgatgtttgatttacctgttcaaaccaaaaaagagagacgagaagcaacgaaatttagaaagcttcttgttgaaacaggcttttcaatgatccagtttagtgtgtacgggaaatactcaccaacggtgcacgacaatatgactgacgagaaatttatcaaaaatcatttaccttgcaacggagaagttaggattttccatttaacagacgtgcaatgggcaaaagctactcgctatttatctaaaaagaaaattgagaacgaagaaacaccagagcaaatatcgctcttttgatagttgaagatctgccttctgactagctgatatacttaacgaacgacgctctaaaaagtgattagagttgaagatctgccttctgactagctgatatacttatacgtgtatcaggttatgttgtaaatatgttgaagatctgccttctgactagctgatatacttatgtgcacctgaaacgaacgcattccatagttgaagatctgccttctgactagctgatatacttatcaaacgagatatcaatctgagtgatctgttgaagatctgccttctgactagctgatatacttataaacatccttttctacgcctttgagccgttgaagatctgccttctgactagctgatatacttagactgcacatcaagaataaatcagggacgttgaagatctgccttctgactagctgatatacttagcgcaaacaatatacataggcactccacgttgaagatctgccttctgactagctgatatacttatcacaactacgccgtatacctctatgaagttgaagatctgccttctgactagctgatatacttacccctcacttcgttcggggaaaaagaaggttgaagatctgccttctgactagctgatatacttagcgacgggctgctgagattcaaccctgagttgaagatctgccttctgactagctgatatacttaaaaccccattcggtttgggaaaccgaacgttgaagatctgccttctgactagctgatatacttagccctttttatgggtgcattaaatgactgttgaagatctgccttctgactagctgatatacttaattccattgcatttttcgataaaaggacgttgaagatctgccttctgactagctgatatacttaggttgcacatcaaggataaagc

SEQ ID NO: 3387 - DNA, 23258 bp, synthetic construct
  misc_feature 1..23258: note = Synthetic
  source 1..23258: mol_type = other DNA
acaaattataagaaagttctggactgtacaaaattcttccctattcaatctaaaagtaaatagtcaaaaattgaaaattctaagtgctgactctttacttaatgaattcaatattcttacttatccacctattgattttattgggaagttttcacaatataactggggcattagctatcaacctgataatttcggaggggacacagctattcttcagcttttttttaatccaaatcctaacaatccaaatttattcgatacatgctctgtaacaatttatggctttggtgtaatccaaaaaattattgttgatacatcttctttgattggtgatttcaagcttaaaggcgatacaatagatattggtgaagtttgggtaaaaaataataaaaaagttcgaatacctttgaaaaatattggtaacatcccatttggagtagcccaacaaaaattagtaaatgctaacaacgaagagaccccaactgctttctcagtgttaagaaaatttatgccagataattcacatctctttcctaatgaaactgacaacttcgaaattgaatttagtccagataaaagaggcaattacatagctcgatatattattaaaagcgacatcgaatcaagaaaaattcaaggatttcctgaaagcgctatctcaaaaactttttttattacagcaaaagctattgaacctgaaataaatattaaaattgattctattaactttggcaatgtcgttatccacaaagactgtcctactacgcgcgatactattatttatttagctaataatggaaacactactcttcagatttacaatatccttcttgaccctcctcctcctactccattcagagttaatgttggagttagtaatgttccaccaaactcagaaatttttgtaaatataagattctcgactgaaggtcaacctattgacgaagaattcaatactactgccattttcgtaacaaattctactccaccgaaagattcagtaagaataaaattaagagctattggcgttaaacctgcttctacaaaattgattattcctaaagacataaaagcgaaacccggtagacttataaatatacctatcattgtcgaaaaattacgtataagccaactggcaaaatcatttgaagacactttgacttataatcctaatttattacgcttcgaatctgaagaaattattggcactgcttccgaaagaaagcaatcctcgaaaatcatagagataccacaagagggagtgttgacaatctcgataaaaatgccacagaatagcttctttggcgaaagcgatactcttatccttcttaaattcaaaaccttgttaggcgataaaatttcaacacctataaattttactaatccacaatttggagactatatttgctctaaagttctgacatctaacatttcaaacggtgtcttttctctcgattctatttgtggattagaaatgaaaaccgtccctattaatattgttttatatagatgtgagattatacctcctaatactaaaaactctattatcgaattcaattatgagattccttttcaagataaagtagaaattagcatttataattactatggcgaaaaagtagcacaaattatagaaacttttcttcctgctggctcctataaatactcatataactgcgaaaatataccgaatggtgtatatctatgccgctttaattcaggggtttttgtcgaaacaaaattaataaacatctgcaaataatgaaaccattgtcgaaaatattaattttctttacaattgtattctgttcgttttctcaaggcttcgattggcaatattctgcacggctaccttctacaagccctaattttttttcaggcttaaatgcgagctttagctatcttcttcacaacgggaacattgattttactgaaaagcaaaacttatgttgcaacttcaatcaaggatctggtataggaacttcatatggtatatctggcgaatattggtattctggaattgtagctttcaactttataatatcatataatcctactacagcaaatttttcaattcaaagcgaaccattacctcgcccaaatggcttttttatttcagaatatcgctacgaaacaaaattagcttacttgaattttgaaccaggcgtgaaatacagaatttcattgacccactttcacgttggcgcttctgctcaagtctctttcttaatgcaaaacgatagcaaatactacgaatccgttttagaaccgaagaactggccctggcgtgaaagaataatctccgagggtaaaatctctgaactcaactccatcttaataattccaaaaataaacataggttacgattttacctttgctttaaccatgtatgctacagcatatctaagcttaggtattccaattatgaatattacaaattctactgaatggcgaacatggcgtttttctgcaggtttaagcatttttagaggtttattttacctcaaatgattacgattaagtaattatattatttgagaattaatgctctttcccccaataaaatatatcagaaacaaatgaatcagattacattaccataatcaaagtatgtattggagttaataataaaaagaaaaagaattagcttttttataaaaatataaagagccgaatatatttattttatttctcttagctcattatcaagattttgataccatttaccttcagtaataggaatatatttcacaattttatatttgttaaaatcaaatgatttcaaatcgactgctcttaaagaagtattatcataatccctaaagtaatagactaattctttatgatcgcgtatcacaatccattgagtataatcaccttcatctacttcacctttatttactagaacattattcataatatttgccattaacccaatagcttctttagtattttttggtgtcggtgagtatttatttttaaaataagctctgataaatcttgaagaaggcatagcatctgcaggcaatcccctcatacctgttccgttcggtagtgttttaaaagttgcatcttttacatttttattcgtcagatttgaataattttcgagatttaaaagatgccaactaaaaatcggatgatttgttagtacttttgcttgattattataaaaaacagctttcccttctaaccattctactactaaatcattaccatttttatcatgtacagataaatgcaaaggaaaatccatttttgtgctttcattaaaataagctattactggaatctgtctcaaagcaatttgcacttcatcaacattctgaaaatttcccagagcccaagatacaatatcaattattgctataaagttttcaccttttacatcaatatctgaaaacttcgagtcagttagccaaagagtcgcacaagataagccacattcattcaatccatcagtaaaatgtaattgccccaacgcattcgtacctacaaaagcgtatttgtttgtccatgatatacctcgctcttgtttatctgaataagatataaagttaattcctctcggaacaatcactacacttgtgccaagctccattgcaaaatccattgtcctaccagttatttgatactcacccgaattattaagtcttacgtccgtgcatgaaaacatatcatttgtagaaacaataagaactaacaaaaatgtcaaaaagattttcatataaccctccaatattttaaattttaaaaataaattattctacatattttaaaatgatcagcttatttaataaaattaatttaattagatttttattaaggagtctttggaatattcttaattactttaaatacaagtaattaattcattcgcttcaacttaactttcgtattcataagtattatcctcatgctctgtagacaaattcctgagtaaaagactaaaatctgatataacctcatcttcagctttataatcagggtaaatacataaaccatctttttgtttcttgtaaagccaatgagaaatgatttttatctcatcaatatcttctaaattataatttaatgtttggcttgaattattaaagaatattttgtgaatatttaaatatattttttctaagggagcttttcttcctattatctcttgaaatacaagtttgccagatttaataaaaaatatttctgcgagtttttctctatgagatgcaggtaaaatgattattaaattactcttatctattgaagtgggtatattattgtttttataaagaatcctcctcaaatcgaaaatttgatttcttaattttgctgctttttcgaaatcttgttcttccgatagtgcaatcatctttctttcaagttgatgaattataccgtcggaaaaaccattcagaaaataccttattttctctatttctaaaagataatcctccttcgagatgctttgtgagcatggtgatgcacatttatgaatgtgaaagtaaaagcaaggtttctgttttttattaggattaatatcattatcacattttcttattttatattgtctctctattgtttctataatgttatcaacaaaaaatggactattaaaaggtccataatattcggaattatcagcttcaataatccatgttttctcaactcgtggaaaatcctcattaactgttagcttaataaaaggaaactcacgataactcttgctcatagaattatattgaggtttatatttctttattagcttagattctaatatcaaagcagaaagctcggttcctgtgcattcccattttatgttgcgtactcttttaagcatctcacttatcttctttgatgttattttggaattgttaaaataagaatttactctctctttcaaagactttgctttacctatataaagtatattgcctttaacatcaaggaagaaatatactcccgattcttctggaacctgttttaaaattggttccactatcttatatgttttacaaggcggtttgaaatgccttaattgcatattttgaaatcttagcaaatcctcttttgtctcaattccaaattccgattcggcacgctctaaaagctctattaaaatatgtgctgtcgcttcggcatcgcctaatgctctatgtctattataaataggaatctcgaggaattctgagagagagcctacattttttttcttctgctctggaaaaattcttcgagcaagctttaaagtacaaagacgaggaacaaagactggttctaattcagctcttgctattgaatgcatcacaaatgaccaatcaaacgatgcattatgagctacaaaaactgcatcctcttgagaaagtattgatgctaccttcgggaaaacaatctctggttctggcgctgtatataccatttcgttagtaataccagtcatattggtaataaaataaggtataaattgatggggattaacaagcgaatgatattctgaaattatcttatgaccttttaccgttacacaagctatttcagttaccctatttcttactgcatcagaccctgtagtctcaacatctattacaataaatggtatttcccaaatagatttcataaaataaacacaattgtcatttccaaaattaaggaaaatatgtctttatttaaaataaaaatgccctcactgcgagggcatttcatctattctacttttttcttatcagtacttattttgaacgggatataaagtggacaccatctgattaatcctgtaagtaatggaattattcctattaaaccaagccatgattggaacactattcctaaaacgattattgctaaaccaataattattctaatagctctatctactttacctacattgcatttcatataattttcctttaactgattattaatattgttaattatatatattcttaaaacgtcacataaatgatattattttatcagatttttctgtatgataaccgaatattttgattatttcatcgattaatttctaattagcacgaaattaacgaaactttaatataattaattagtatttagctttaaatgacaaattaaatatcgtactttgaaaaattaaaagcatttagcgaaacctacagttagtctctccccctgactgttgtcttttcggggcttatgccccgatattttgaaaaatatattaattataattcatttattaatttttttagaaaggtgtaaaatgaaaaattcaaattatcttcgaatgtttgccgttataataatcggtataatatcatttgctttttatgcatctgcaaatgaacagccccaaaaacaagtaaaaataaagacttattatgtctcaaaagatagcaaacataaaatcgaaaccattgctaatttacttaaaggggtttcagatgctcagttcaacaatgaaaaaaaagagcttacagtaaagtatgatccaagtgaaattaatactgatatgattgtttatgctttggatatactcggttacgattcagaaataattgaagataaagaagttgataaaatctctgtcgagaagaaaaccaaagatgcaaccaataaatagttgtttcttgttaattatctatcataattagaaataaaatgttggaaggagcttgtcattcttatgagctaagctccttcttctttttttaactatcaataaacattaaaccaattgacgaaaatattgaaaatacttactatactcttagtatatatccattaccatcttaaaatattataaatataaaactaaataatagtccaaaagaaatattatactaaatgtaaatatattctaaaagtgattgatgagaaaaaaattattacaaattatttgttaaaacataactatcttaaaatcaatgtattatattgattaatattttcgtaatatcatattcattttttataattaaaaaatattggcctgaaggcaaatgttttgtattaaaaactaaatttttctctaattcaaaaacatatccttcataaaaattagcaacttcttgcccaatattatcatataaaaaaattgagattttttgtggtctattcaataaaatattaataatagaataatcatcagcaggattaggaaagatcttggtaattattttttcatctaaagagataatatctttaacacttacaacgcttttaacattagttgaaaatacaccgctaccttgtgttgctattacaacatacccgtccgtttctcttgctataatcatatcaacaatagcataacctatagaattgcttccttctctaacccacaatgtgttatcaccttccaagctaacagtcgaaaacaatccaacacttgtcccagcaaaataaatcatcccatcagaggctttaagggatctaatccaacgaattgagggtccgcttccactgccatctggattttcctccagattacccccctgatgagaccacgtgctacctccattagaactataaaatatactctttatattataattcgaaaatacaacaaatatcttatttgcatctttcgtatccacatcaatacatgaaataaatccatttgctggaaattgattacctgtaatttcgaatacatttggattacctacatttgcattatcaactctaaagaccctacctttaactgtaccaaaatataatctatttggtggattttttgaaatgctaatagctgttatgtactcttcggcaggaagtcgtgcattcgtcatttctacccaaccattttcaacaagtgtagaatcataagcaagagattttatatcattatttcgccatatactattctttgcagcaagatataaagttttattatcattcaaatccaatgcgaaatttgtaaaaaaagcaaacttatcttctgttaaaaatgatggagttatatgataaacgctatctggtaaattattaaccattctataagaaattatatcgccgtaacaaaaagagctcaaaatatattccttattgtttgctacaattgttgtcataccatcaccaccagcaacaaaatcccattcgtttgagaattttcccttattcaaacaatagaccccgttcccctgaatacctccagcaatatatctatcaccattaccttggttgtcaattccaacccaataaaactgagtagacaacaaaccataagaaatgaactcccaattatgtaatggtaaaagacagttttgaagtaaataaattccaccatcagttgctacgagcatagtatttatattacttttcaaaaacttaatacaatggatatctgggtgtaaattactatgtgaatcatcataaggatatcctcccatccaattagtatagttcgaatcggaaaaacctgaataattccgataaagattaattcctccaagaaatacagtattttcctcgaacggatgtacagccaaagccaaagcatatccgcctcctgaacaaaaagccccgtgcaagctatcctttattgctgattttagatctccaataccgccacctggtagattcttacttctctctaaccatgtccctttgccagtcaactcattgtatgagtatctccaaaatgtatgcttagaagcagtatatgcatacatcgggtctttccactttattggagcttctgtaacaacgtaaattactttattattcaaaggtgaaacagcaagtttgataattcttgtcgtatcaggaaactttggtggtgtaatatttgcccaatcaataccattagtcgaacgaaatatcccagtttgcaatggacgtaagccatttattgtccaagagcttatcgctgcataatactcatttttacaagtacgtataacataagttgaaaaaggcttatttattgaatcaccaagcaccatctcccaactctctccgccattgcttgttctcattattccaccataacaagctgcaagtatagtttcactttctgcatttgttgtatctactacaatactccacacaccttgaaaaaactcagaaagtccatttttatcattaactatcgttgttggtatttgctcccaggtctcaccagaatctattgacctataaataccatctcctaaactaaatgttcttggttctatactaatcctactgcttgttgtacttagcaattcgccagtaccataataccagatattccttttattataagcaatattttgagctatgcaagttacgctttgacaagcatttaaagaactttttttatcccaagtcgctcccaaattagtagttttccatagacctccagaagcgctccctgctaaaattatactgtcgctttcaaaatcgatttctactgctaaaatcctcccaaccacattcgttggaccttcagaattccaattttgtgttactatatctgctttattaaacttattttcccttttatttatggcatcttctttggttggcaattccgaagcaaacctaagctctctctgccttatatcattaggaacctcatttgtttgtggatcacgcatacgtagccattcatactcagcagcttctataaaaagcccagctttgttttgcttgtatctcatttgtaacttattaccatttggagattttgccagaagaggcagaccaaaaacaataattaagaaaaaagtcgctatcactactctttctagtctatttttcatttagcttgctccaactttttccttaattcagctatcattaataacgtattaaattgtaagatatttaacaacaaataatataccaaaaataatacacaagatcacatataaaataaaaaacccggcactcgaccgggtagatgatttctctgcgtgcctttaagcaattttaatgcttatagcacttattttgataagattacagaaaaagaactatttattttttgcaaaaataatactttttttttaatttgcaaaaaatttccaatatcaaggaataaaaaatgacaaaaattttagggttagacataggagcaaattccttaggttgggctttgcttaacaatgataataacacaataattgatatggggtctcatgtttttccagcaggtgttagcgacttcgatacagcaaaagaaaaatccaaaatggctgaccgaagatcagcaagatcagcaaggagaagattctggaggaggaaaagaagacttagaaaacttcgttatatatttaaagaatataacatatcaaatttaaaagtacacgattataattctcttgatccttacgaaataagaaaaaaagcccttgataaaaaaattacttttgacgaacttgcaagagcaatttatcatcttgcaaaaagaaggggatattttgacataagttgcgctgatgccggagaagaagcaataaaagaaaaagggaaaatattcgatggattaaaagaaaagggggaagtggtaatagcaggtataaatgacttaagaaaacaattaataacgtatggtggtaatttcagaactgtcggagagtattttgcttctgtaaatactgacgaagtaagaataagatgtagatatactgaacgacaaatgtttattgatgaattcgaacaaatttggaataaacaaaaagaatattatcctgatatcttaaatgatgaacttaaagaaaaaataaaaaaagctgccttctggcaaagacctcttaaaatgcaaaaatctttaattggctattgcaaattcgaaaaacttcatagacgagcacctaaatctcatcctatcgctcaactctttaggatgtaccaagtaattaacaatcttactattagtggaggtaatagaattttagataatgaaaaagaattgtctgaattagaaagaagcaaacttatcaataagctcctaatttctaaaggcattgaactcggaaaaaatgcaaataaacaaatagttgctttattaaaactagataaaaactctcactatgttactaattatgatcatcaaggaaaaattgatggaattaaaacatactcagccatttttggaatccttaaaaataaatcaatttttaactacaattttaaacaaattaccgaaacttcactccaagaaaaaataaaaatcaacgaagaattaaaaaaagatttcctcaaagatgaaattactattgaagagctcttgcaagccatttggagaattatttttactgaaaagagaacagacattagaattaataatctaaaaagaaaatttgatttagacgacgaaacagcaaataaattagcaaatatcggtcttgaaccaggctatgcttctcttagtataagagctatgagaaaaatgcttccctatctaagaatgggttacaaatatgatgatgcagcttgcaaagctggttatcaccattctttgtgggacgaagaagtcgaaaaacttgattatcttcctcctccagctttcattcgtaatccaatagttaccacctctcttaatgaattacgcaaacttgttaacgaactcataactcgatacgggaaacctgatataattagggttgaattagcaagagatttaaaaaaatccagaaaagaaagacaaaaaataaaagaacaaaatctaaaaaatagagctgaaagagaagaagctattaaagaaattaaaaactattttagcgattctgaatattatgctcaagattttcctcgtgaccgatatatcaccaaatatcggctttggaaacaacagaaacatttatgcatctactctggtcaaaatattgggataaatcaattattttctgctgaaaccgatatcgaccacatccttccatacagcaaaactcttgacgattctatgaataataaagtagtatgcttccgttacgaaaatgcttttaaagccaacaagattccttgggaagcttatgcacaagataaagctaaataccatgctattttagatagagtgaaaactttcccaacatcaaaagcaaaaaaatttcagatgaatactaaacaatttaaagactatatccaaggcaaagatgaggaacacaaagatttcattgagagacaactcaatgatacaagatacatttcaaaagaagctctcaagtatttaaaacatatttgtgatgaagtcaatgtttcaactggctcaacaacagcatatctaagaaaatattgggggttgaatacaatccttgcaccagctggagaagattttaagaaccgtgaagaccatcgtcatcacgccattgatgctgttgttatagcattaactaatcgttctactcttcagcgtttatccacatattctcatattacgggagattattatttggaagattttgaacaatacaaccctaatcaattccctttgccttgggaaaactttaggaaagatgttcaagaaaaagttgattgcataatcgtttcccacaaagtaaatagaagagcaagagggaaacttcatgatgaaacttatttcggtcttcgaaaaaatcattatggacaagaaagaaccgatgaaaaagggcaaaaattgtttcatgttcgtaaacctcttgattctaatcttactcactcccaaataaaatctattgttgaagaagatataaaagaggctattttccaaagacttcttaaattcggaattgacccagattctaaatttacactaccagttgattttttcaatgaacctttagtaatacatgctaaaaatggtaattcatatagaactaaatctgtaagaatcgctgtcccttcttacacaatgagaaagattagagattataacatctgggttgagactggctcaaatcatcatatcattatctacaaagatattactataggcaagcaaaatggaaaagttgtaacactgttagacgctgtccagagaaaacgcaaaggcctccctgtaattgataaagagctcggtacaaacgaggaatttatgtattcacttattaaaaacgaattagtatacttaggtgaattcccagaaaattttgatctaaataataaaaactattacaaagtaatgtttgataaaatatatagagttcaaaaattcgatcaatatggtagaattattttaagacaacataacattgctgttttagaatctatagataaagaaggtaaaaaggttgaaccaggaatccttagaaaatctgcaccatcattagaagccactaaactcaaaattaccacattaggttttttgtcaattgccaatgattaaacgaattatatatatagaaaccccaagctacatttctaccgaaaacgagcagatttggattaattataagaatgcagaaagaagcgaaagaatacctgctgaagacctcggatttctgatactcgataattaccaaattacaatatcaaccaacgcaataaataaaattggtcaaaatggtggtgcaattcttacctgtggaaataaccaccaccctttgatgcttgctcttccaatagaggccaactatttacagacagaaagattacataaccagataaaagcaagtcttccacaaaaaaagaacttatggaatcaacttataatgtcaaaaataaaaaatcaagcttttgtgcttaagtattattctaaagaatataaaacattactaacgaaaattgataaaattagaagtggtgatgtttcaaatcaagaagctatagcatcgcaatattattggaaaacactattcgaagatacaaatttcagaagagaccctgatggcgactatcctaataatttactcaattatggctatgctattattagggctatcgttgcaagagctgttgtaatttccggtttgcatccttcaatcggaatctttcataaaaacaaactcaatgctttctgccttgccgatgacataatggaaccatatcgccctattattgataaattagtatttcagtactatattaaaaatccatataatgaaatcttaaacaaagaagtcaaaaaaatgcttttggaatccgcttttcttgatgttagaattaataaaaaaactcatcctttaagcattggagttcaaattacagtctcctcacttgttgattactttgcaggaaaaaccaaaaaattgaatttaccagaattatgcgactaagtgcttacagaataatgtggatatttacatttttcgacctaccaacaaatacaaaagcggaaaggaaggcatatagcacttttaggaaacgtctaatgaaagacggttttgaaatgcttcaattttctgtatatattcgtcattgtgcaagcatcgaaagcgtaaatgctcacataaaaaaagttgaaaaatatctacctaaaaaagggaaaatttctctcttaactataacagacaaacaatttagtagtataaaacactactggggtgtagagcaaactgcgacaccgaaaattcctcaacaattagaattattttaaaaaaaaagaaggaaatgcttctaactttcatttccttctaatttttttatattacaatttttataagtttaataatataatttacttataaaatgtattgtaatataacactttttctgtaatcctaccaaaacgatgaaacgacattagtaaccgacattacatgtaatataacactttttctgtaatcctaccaaaactttcttttcttcctttcttttttattttaatgtaatataacactttttctgtaatcctaccaaaacaatctttctactaataaagcaaaaagtaattgtaatataacactttttctgtaatcctaccaaaacaataacattgaataaattataaacgtcatttgtaatataacactttttctgtaatcctaccaaaactatatttgttaatagttgaagttaaatcagtgtaatataacactttttctgtaatcctaccaaaacttcagctaattttaacgcagtattaccatctgtaatataacactttttctgtaatcctaccaaaacctgtaatccaagttggtcgctggacttgcttgtaatataacactttttctgtaatcctaccaaaactctattgtatcttgttcgtatttcattgtttgtaatataacactttttctgtaatcctaccaaaacaagtaatcattcctaattttatcagttccatgtaatataacactttttctgtaatcctaccaaaactttagtcaatttattacgaacgggtaataatgtaatataacactttttctgtaatcctaccaaaactgggagatatgctcgttaatataaaatacatgtaatataacactttttctgtaatcctaccaaaacactacttatatcagtattataatattcctttgtaatataacactttttctgtaatcctaccaaaactgtcgagtaagtttaaattaaaactcaacatgtaatataacactttttctgtaatcctaccaaaacaagtcttccatccaagaatttggacattcatgtaatataacactttttctgtaatcctaccaaaacgtgattataattataaactacacgacccggtgtaatataacactttttctgtaatcctaccaaaacactaatatagcagtcgtatttaatggcggctgtaatataacactttttctgtaatcctaccaaaaccaatgacaaaaacacatcaattaaaaagcatgtaatataacactttttctgtaatcctaccaaaacaacagcggcaaatgggacgtatgtagttaatgtaatataacactttttctgtaatcctaccaaaactctaaatgagcgacgtggaattttgttgcgtgtaatataacactttttctgtaatcctaccaaaacatactgatgacaagttgcataacttttatttgtaatataacactttttctgtaatcctaccaaaacggacgattgattacatcgccaaaaaagatgtgtaatataacactttttctgtaatcctaccaaaacttgctaatagtgttattaatatgttttttctgtaatataacactttttctgtaatcctaccaaaacatatttagtggctggaacgcaactcacatatgtaatataacactttttctgtaatcctaccaaaactaacgctgcaacagaattatcgaaaagagttgtaatataacactttttctgtaatcctaccaaaactatttccgcgcgattgatgttggattaaattgtaatataacactttttctgtaatcctaccaaaacgggcgcaagtggttgttttttatacacttatgtaatataacactttttctgtaatcctaccaaaaccagtttaggtttattatcttcgaaaaaacgtgtaatataacactttttctgtaatcctaccaaaacttgagatactaattaaaaatggtgctgatgtgtaatataacactttttctgtaatcctaccaaaacctaatagtcttctcattacataatcgtcagtgtaatataacactttttctgtaatcctaccaaaactgaatttacatccgcaccgtttttaattagtgtaatataacactttttctgtaatcctaccaaaacaattaacacattgttcagatgcattaagcttgtaatataacactttttctgtaatcctaccaaaaccgttaataaatatcacggcacttatggtactgtaatataacactttttctgtaatcctaccaaaacttatttcaacatcgtcattattttttttaatgtaatataacactttttctgtaatcctaccaaaacaccgaatgtaatattgttgtatgatggcgttgtaatataacactttttctgtaatcctaccaaaactagctattgatgttggattaaatcttttattgtaatataacactttttctgtaatcctaccaaaacattatctataaagttcaaagtataaccgcctgtaatataacactttttctgtaatcctaccaaaactgttttgccatccattaatgatttgataattgtaatataacactttttctgtaatcctaccaaaactataataaaaagagacccagactatatatctgtaatataacactttttctgtaatcctaccaaaacgaaaccagcaatagcggagtttaatactattgtaatataacactttttctgtaatcctaccaaaacgaacttacatatccaatcccacttttcatctgtaatataacactttttctgtaatcctaccaaaacgtattaatgctactataacatcttctaatttgtaatataacactttttctgtaatcctaccaaaacttgaaagaacagcgacttacgaataaagactgtaatataacactttttctgtaatcctaccaaaacatttattcaactctaattgtttttcgattatgtaatataacactttttctgtaatcctaccaaaacttctttaatttatttactttcaaatgaatctgtaatataacactttttctgtaatcctaccaaaacttgaaagaacagcgacttacgaataaagactgtaatataacactttttctgtaatcctaccaaaacgaaatgaataaatataaattcatttagaattgtaatataacactttttctgtaatcctaccaaaaccaactccgttctttttgtctagaccttctatgtaatataacactttttctgtaatcctaccaaaacaaaaaatttaatcatatcaacgtcatcagttgtaatataacactttttctgtaatcctaccaaaactatatatgataatatctttaattgcattgttgtaatataacactttttctgtaatcctaccaaaacatctaatgatttactatctgctgtaatttttgtaatataacactttttctgtaatcctaccaaaacaaaaaactccccgctcttctttactaaacctgtaatataacactttttctgtaatcctaccaaaactacttctcaacaaatcaacagttgctttgatgtaatataacactttttctgtaatcctaccaaaacattagtattattctaaattgaataagttattgtaatataacactttttctgtaatcctaccaaaacaactgcctcaaatgcaagctttacaatttgtgtaatataacactttttctgtaatcctaccaaaactgactattttagagtattctcgagggtctttgtaatataacactttttctgtaatcctaccaaaacctgttcattgatttcttttgttactttactgtaatataacactttttctgtaatcctaccaaaacgctaaatagttcattaattgaaattaactatgtaatataacactttttctgtaatcctaccaaaactgtaaaagccaccagaactcacattagcgttgtaatataacactttttctgtaatcctaccaaaacaaattgcgacgctctcccacatagtaaacatgtaatataacactttttctgtaatcctaccaaaacttttcaattaatttaagtgaacaggataaatgtaatataacactttttctgtaatcctaccaaaaccaagcagcgggataatattttttgaaatatatgtaatataacactttttctgtaatcctaccaaaacttgctaggtgctttaacatctatcatatcatgtaatataacactttttctgtaatcctaccaaaacctatcaagctccgtttgtaaatcggtttggtgtaatataacactttatatgtaaactaaaaatttatcttaatctttttctcgttcatttttatcttttctatattcttgtccttaatcttgcatagatttgcttcattatctaaagcacattgataaactttaggacaattcttgcaatttgttttataatttatttctctcatttatttttgggaatttttactataaaaatagaacctactccaactttactttttatttctattgttccgccaagtaagtcaagtaatttttttactattggaagacctaatcctgagccaaatgtcccttttgcacttttacccctataaaaagcatcaaaaagatgcttttgctcttctgcacttattccaatcccttcatcctcgactgagatttctatgttttgccccaaatccattatttttgttctaattgtcctactcatttctgaataatttattgcattggtcagtaggtgcgtaattatttgcgtgacataattcctatccgaattaatattaaagttctctcctacagtagaaaataaaaaattatgcgtcttttcctcgtatgctggtagagcttcaattatttcataataaagttcttttaagtcaatatgctccagtttaggaagcatcttatctgtttgtgcttcgccaataattaacacgtcctctaataaacgaagcatttcttttgccgacgattttatcgaagtgatgtatttttttaacttctcaaaatccattgattgtgcataatttaatgcaagtgttgctgaagacagaatgatagaaagaggggtcctatactgatgaattaccatatcaacaaatttactctttaattcattaagttccctttccttttccaacgattttgctaaatcttggcttgttattttaagtatttcagctgtccttttcctttcttcgttttcatatttcaactctactaatgctctttcaagctctcgcgttttctcatatactttctgctcgagcatagtatttagctttttcatttcctcttctgccgctcgttttacggttatatcttctcctattgataaagtccctatcacctgtcccaaatcattagtataatatgtattattccagtttatcaatagcttttcaccttctttcgtcaagatatgattttcataatgtaatggtagttcctttttaataataaaatcgctaaatctactttccaagataacacggacatcatctggtaaaaagtattcaaaccagcttttaccaattatttcctcccttgtccaacctgtcaatcgtaaaagaaaatcattacaaaacattattttcccattaatatcaagtactaaagcaatcagatttaaatttctcaaaagctcttcaaatcgcctttcagactcgagaagtgcttcttctgaaagcctttgttcagttatgtcatatataaccgttatgatggcttctgcttgtcccgcttcgtttaaaactggagcagctgaaacgcttatggttataggtgaaccgcctttccttgttaacaataactcgtaattatatattcttttaccctttaaaagggtatctttcaataaattaatagtatccttatattcaggataaacatcaaatatattttgtccaaccgcctcttcttctttccatccaagtatcaattccgatgctttgttccaagataaaattaatccttctactgtaagacttattatgcctgctggtgaattttgaagaattgtttcaagtttcctattcaaatttcttattctattttcaactgccaatctctcctgatctatttcataatattcaatcgcaaaagacaaatcagaagctaattcagccaataacttttgctcctcataatcgaaaaagccaatttcatccgaaaaaatctcaataaaacctattattttatccttaaatttcaaaggataggttgctaatgaagagcataaagataatcttgatttgaagaaaatagaagaatatgtttcatctgcttctatgtcattgttaatataaggaattccttcttttaatacattttcccaattttttggaatttcattcaaacttattatatcaccagcttttctgtctatttgaaactttgaattaacggatttcaagattataccattgttcaattcatctttgaaacctatgcaagataaagaaaattcgccatcttcagttacaatcttgcatatctcatcaaaaagtctatctatctgtttttctcttacaatagcttgatttgtattgctcaatactgaataaactctatttaatcgctttatttctaattctgaaattattttttcagttacatcttcgaaagtaataatcatactctctaatttctcattgactaccgttggaactatccaacctgacatataagcaaatctttttgaaggtagaattatagagtggcgttccgatttgatagcctctttttcttccttggcttttttataatccctaaaaaaagtatctggaagtagccaagtaaaatctgtaataatatttttgcccactactacctgagcatctactccactaaaagctaaaaatgaattattcacataataaattatatcatctttatcgcatacaatcagcgactcttgtattttttcaattatgctctcatagaactgcttctgtttgtttatttcttcctgagctgtctttatttctgtaatatcgttaaaaatagttgcaaatttatatttttctggtgaatatgctctaacattgtaatatctattaaatctattactataactctcaaattcaatactttcacctgtcagagctacttttccatatttttcaatccacattttttcaatattcggtataacctccttgactgttttccctatgatttcctttgctttaagcccagttaatctttcaaattcaggatttacctctaaaaatttataatctattgcctcacccttgctatctaaaataatttcatgataagcaaaaccactctgcattttatcaaaaagtaaatgaaaacgcctttctccttcctcaactttttgctttataatctctaactctgttatgtcttctccaagagaaacgacaaaaaatctgttattatgcaaatcctttgtaggtgtattaaaccatttaattaatctttcccctccgtttttggtcaaattcttgttaatattgatatcgggatatcttttttccattaacatctttacaacattttctatggaaattttttcagattctggtataaaaaaatcaaaaaaattcctaccgatcacctcttctttagtccaaccaaaaatcctttcagacacactattccagtcaatcacagaaatattgtcttcatcaacaacccaaaaaactaatgctaaaggagaattagacaaactatcttttaaaatttcattataaatattttcttcatctatcataagtttcaaaagtataatgaaaaaataaaaaattcaaaattaaatataattaattcttaaaaaattccaattatttttcttttctaatttttatttctttacgtattggttttaattctgaccatctgaacgaagggagataatattgcgtgggattcaatgttaccatattttccgggaaggcttcacctacaatagaaccaagccaaataatattttccggtttattctcagaaaaattaacaaacaatattgtatctgctcctgttctatcaacgccttcagctgaactatcagcataaataaaatacaaagatttcgaatttccatagcttgcaataagcttaattgaatcattttcgaaaaacattttgagttcatcaccagatatttgattaattctttttgcatctaaggtatcatcctttgagccagcaaaagcatttgacaaagcaagcacaagcttcaatttattattttgtgtttgaatgacgatcgaatctgcgtgaagttgagtagaatcataccacaaaatcggcaattcatacaatctgaactcttcttcgcttttattataaattgcccttccagcccttgctgatatatgtcctttaattatttcgacgttcccaataaaattatatatttcttgattaccatccctcttagaatccataagaatggaggttactatcaaagaatcatacttaaaaacatttatagtatcagaattttcttttgatgtgtctcccttagtataagattttatagtatcaatctgtatcaggacaggctgaccgattgcttttgtatatttttgatgttgaatatgtataatagaatctgctacaagcaaaacgtttgtgaatttagctttaacaagtacattcccagaggcatagctatctttcgtagctcctctatgctcaagagaatcacagataatctgaacagagtcattatctatgtgtatattaccaaaagcaaagcttacccgtgttttacgattataacggatatgatctgctcttatacttacagtgtcgtcagttacagaa

SEQ ID NO: 3388 - DNA, 4953 bp, synthetic construct
  misc_feature 1..4953: note = Synthetic
  source 1..4953: mol_type = other DNA
aaccgtcattgtttagatccttctgccagtgcccctgatactttcccgtgcacgcactttcggacttgagagactcaagcttttcctcaaggtttagcggtctagtcccggcacaaatgaatatttcttttttagttggtgaagtcaaaacagcaagcgggctcttgttctcaagagccagacgcggcacaaacaaatatcccagcgataaaagaagtaacagcgcaccactgatcgcatacgaaactactttctgagattcctcgcgtgaccgagccatagttgcctccttataagacagtagtttcattgcttctgcttctcataaagcttcgtcttcgtatacccagtcgagtatttgaaagtaaatagaaatggcaccccgaaaggtgccatttaccgagttacccctcagggcagagcccgcgaattgaaaatcttgtcaagacaagacgtccatcaggattcagtagaaatttcacgatacagagattgcttgtgattgtcaagaggggtgtttctaaatgctgtgattggcacaccctcttagtagtttcactgtaggaactagaagacgggggatgctatggaacgggtactcggcttagatttaggcaccagttcttgtggttgggcccttgttgacgttccaacaacggatggagaatctggaaaagtcattgctctaggtactcgtgttttcccagcgggcgcagaaattagtggatcaatttccacaactccaggtaaggaaagacgcgaaaagcgcacgatgcgtcgtcaaatagctagacgcgcacatcgcaaagttctgctgagaggagaactcacgagactcggattgctgcccggtgatcttgtcgaatatgagcaacttatggacaaaaatccgggtgagctcctcaaaagagctgaaaatgacgagcaactttcacttcgcgatattggacgaataatttattggatgtcatgccgtcgaggttttttgtcgctccgaaagggaggaagttccttaatcgatgaagatgacgaaagtgattggcaaccatcccggtttcgtcttagccaatacaacccaacaacaggggaacgagtggttactggccaagaagaagttttggtaaacgttttagaaagccaacgacggttttatccagaaattcttactagtcaaatcatttttggtcgaagaggaagaatgacgtatcctgcccgaccaattagaagagatgcgtttcttggtgacggggacggaaattatgtcgatgagtttggtattcacggcttagttttttttcaacgaagcgtttattgggataagggcaccatcggatattgctctcttgacccaaagtcgagaaaacaacgtgcttcgagggccgacagggtaagtcaagaatttatcattcgacaactgctgataaacctgaaagttggttccgataagcgtcaacttacagatgttgaacggcaacgtttatttgaggtcctaatgcaacagaaaacacttgcgttcagcaaagttcgctcaattctgtctttgagtgatgacgacaaaatcaattttgagcgtcaagacgacaaaggtctttcaggcaaccaagttgatccccctctttcaaaagcggtcggtgctacatgggctacttggtcagagatgaccaaaaataatttcgtaaatttactgatcggttcagcaacggaagaatcaatacggactcaactcaccaaacagttttcacttaatgacgaccagatctctgctgttctcaaagttcctctcccaagtgggcggatgagttatagccgaaaaactattttgagacttttaccatttatgagcagtgctctgactgtaaaagatgtgattcagcaggcaggtttttcaagccgagaagacaccccggcaacaagcacggttgatcttgacagcattacgaacccgctcgttaaatcatcgatgcggcagttggcaaaagttttgggagatattgactcgcggtttaaacgaaatgatgggaccacctttgacaaggtgagaattgaattagcacgtgatgtcgcgaattcggcgaaaaagcgtggcgaaattacaaaatctcagcgaaggaacaaaggtgatcgtgataaggccaaagtaaaaatcgctgagtttgcgccaggtgcggaggaaagcagcgactcaataagacgccaaagactttacgatgagcaacgcaatatctgtgtgtactgcaataaaccaatcagccaagtagacgtgttttccaataaagttcaaatcgatcacattctgccgcgctcgcaaacactagataactcaatgggaaatgtcgtactggtccacagcgccgagaaccaggaaaaaggtgagcgcaccgtcttcgagtggcttggccaagaaggtgttgatcaggttgttgagacggctaagcgacttgatctccgcgagggcaaaatcaataagttgcgtttagagcatgttgaacctgatcacattccgcaatcacttttaacaacaacgggctatatcaccacgcttgcccgggactaccttcgcgatatcacgggtctttccgaaaaatttattgaagttagtcgtggtcgcctgaccgcatcactgctttacttaacgggtttaagcaaaaaagatttggtagacgaccatcggcgtcacgcccaagacgcagtgatggttgctttgacttccccaaaaatggctcaaaatttagcgaaacgctacaagcgtgaacgcgacttcaataaaccacgtgacgatgaatacggcacgagtgaaccgtggaggggtttgcgcgacgacatcaagaagcatttgtcagtgatggtcacatcacacaaaccaaaccgaaaaaatagtggtcagtttgttgaagaaaccaactatggcagagtcaacagtccatatttgaaaggaaataccgtctacgctcgccgacgccctctcgtttctggttttacccaagctcagttcgcacaaatcgccgatcctgccatcaaacaaattctgatcgaagatcttaaacgtcgaaacattgacgttacgacagcatcaaaaatcacgtttgatccaaaagaccctccaacttttgatggaaacgcaatcaagtctgttcgctgtcatgcaaactatccgagtcacataattcttaaacctgatactgaaccgaaaacaggagttgcttcaggtggcaatcacatcgcctatgtctacaaaaatcagtctactaatgactatcggatgaaggtaattaatcggcttgattcgtatcgtgttcgaaacaaacctgaaaaagagcgacaaaaagatttcattgaaagtggtgaggttttcgttatgtcgctatgtgttaccgacacacttgaagtcttaaaagatcgagttcagtccctgtataaagtgacctcaataggggctttaccaccagttatttatttggcacctataaatgactcatctggggacaataagtggaaagtgtcgataaatcccctgatgtcgttttcctgcaaaaaaattgttgttacaccttccggactagtcagacgttccaaccaatagttcttgggatcattgaccatgggacgtgcggtcatcatctcagacaatgtcaggcgaatcaaagtaattgatcgtcaactagttggcttagttgacgaaggtaacccaccacctcaaccaataccttgtgaagatctcgacttgatcgctattgacagcacagtacctgttgtgatggacacccacgtattacgtgttcttgccgagactcaaaccgcactgatcatcactgaccgtcgccacattcccataggtatttcattgccgtttttcggcacacttgatcgcggccgagtcctggaagcacagttcaaaatgtcggtaccccgcaaaaaacagttatggcaacaattggtgaaggcaaaaatcatcaatcaggctgccaatatttcagacgagaatgtcgttcgaagattaaaaaacattgcaagatcaataaagtcgggcgatccaaataacgatgaagctgtcgccgcgaaactttattggcaggctctagttgacttcccgtttcaccgtcaagcaggagacaatacgggtctaaactctgcgctcaattttatatacgcgattgtgcgctcgttgatcgcgagaacggtcacatcggctggtatcgagccgtcactatcaatttttcactctaatcgagttaacccttttgctctgattgacgatctcatggaaccatttcggccgatcgcagatcggcatgtgctgtcgtctggtttggaagcgggcgatgcactcacggtttttgcgagaaaaaaattgattggcattatgtcagtgccagtccaactcgacggcaaagtaggtcccttggcagaagttgctgaacgttttactgatgatgttaaaagattcatctttgaggaaagcaataccgttgcgatgccaactgcagttgatgatggccacgatcagtaagtggcgtgctatgtggatggtagtgatgttcgatcttcccgtaaaaacaaaacaacagaagactcgttacagatggttccacgacttccttctagatgatggtttcgtcatgatgcaattttcaatttatggacgacattgcgcgtcccgtgaaaaagcagaaacgcatgccagtcgagttcggagtcgaacccctgtccagggtgaagtccgaatactgcaagtcactgaggctcaatttgagcgaatgcagatttttcgaaattcttcacgcaaaccctcagaacgagtgccccaacagttggaattgtggtaagagaatttacgcgttccgagatctaagaaggtcttttaactgatctgattctactgaaccctgaagggcgtcctaccccgacagagaatgcgagcctgtggcgtgaacggcggattctactgaaccctga

SEQ ID NO: 3389 - DNA, 24056 bp, synthetic construct
  source 1..24056: mol_type = other DNA
  misc_feature 1..24056: note = Synthetic
acgcgccaaaggccgcggcaaggccaacgcggaaaccaaatccaaatcgtgaacctgtggcaaccgacatcgaccgcgtacacattccagtcgccgcgtgagccggtgccgctgacgctgacgatgcaacactgtcgcgccgtcgccgacgacgaagacgatttgatccgaacgtacatcgccgcagcccgcggcatggtcgaacacgataccgggctgtgcctgatcgaacgccacgcacggtatcaattccagcactggcccgatcgggtcatcgaattgcccctgtggccggtccaatcgatcacagcgatccggtacatcgacgacgaatccgacagcaacgaaatcgacgacgccgattacctggcccacaccgacgcacggccggcggcgatccaccgcctgaccgacaattggcccgacatcgtggcacaccgccccgacgcggtcacgatcgaactggtcgccggattcgataaccaatccaactttccgcccgaccaggcccgacaagcgatcctgatgctgaccgcccactggtacaaaaaccgcgaatctgccgtgatcggcacgaccagcggcgacgtggccatggcgtacgatcggctggtcgaatccctgaagcttcggaggtatccgtgacacgcaaatcgatgttcgaattttggttcaccatgctggtgctggcgtgcatttcactgctgggtgccgtcgccgtcgtcaaggccgacgaccacgccgcggtgttcaccgtgcacagcggtgcgattccgaccggacagcccgaacgcaacgtgctggtggtcaccgacgtctacacgctgtcgctggatcccgaaaccaagctggccacctggtgcgcgtaccgggtgacgccggcgtcgatcgaaggccgaaaccagatcggccgcaattggctgaaccgataccccgacgcgacgttggaacaccaggactatgccggcagcgattaccagatgggccacctggcgccgctggccagcttcaaagccgaccccaacgcgtaccaactgaactggatgggcaacgtcgcaccgcagcggcccgaattgaacgtcgggccatggctggacgtggaaaagctggcacgcgacgcggccacgctgcacggtcgtgcgatggtcaccgtcgggccgctgttcgaacgggacatgccgcccttgcccgccgccacggaatcgcaccgcgtgccgtcgcattactgggcgatcattcgcgcacccgacaaaccggtggcggatgatgccgccgatcatgccaaagcgttcatcgtgccccaggactgcgacgtcaccgatccgcccgaacggtttcgcgtcaccgtcgacgaaatcagccgccgcagcggtttgcaattccccatcctttcgatcgatgacatcagccatgcccagccccgccggaaaactgaaccaccgaatcgtgatcgaatcgccggtgaagactcggaagcccaacggtcaggtgattatcgattcgtggcgaccactgcatcgtggccgactgccggcgtcgtaccaggtggtcagcggtggggaaacggtccgcggcgtgcggatggaatcgaccaccaaaatcctgatgcacacgcggtacgtgcccaaagtgaacaccgaatgccgcgtgcgatggatcaccggtgcggatgctgctgctgtcacggcgggcgatgcggaaattccgattctgcacctttcagcggtcgacgacccggacggattacgattcgaattgatgttgcagtgccgggtgaaaacgacatgagccaaaacaagatccacgcggtcttcgaagacgacggcaccgccgaccgcatgctggtgctgttgcccagcgaaatgcgatacaaggtcctgcccaaggccgtgcgtgaggccggatgggtggtcgcccatgcggcacgcgaaaaggtacgggcgcccggctatcccggcgacaaacccggccacgcaccgctacgcaaaacgatcgtggcccgcgttcgacgttacgaacgggcgatcgtcgcggtggtcggcccgctgtacatcctgggcgccggcaaccacggccacctggtcgaattcggccaccgcctggtgcgaaagatcaaaacggccgacggcgtggaaaaggtcgaaatcggattcgtgaaaccgcacccgttcctgcgtcccgccgcgatggaaacggccgacgaacaaacccgcaccctggccgaagtggtccggaccgaagtcgaaaagtttcatcggcaatttgtatcgtgagccaaatcggtagtgccctgcgaacgttcgccctgtcgtcgtcggcgatcgacgacgcgatcggcgatcgcatgtccccagggcaccggccgcaaggcgaaccaggcgacggggccgcggtcacctatcaaatcatcacatcgacgcccgacgaaagcctgaccggcgacgcccgacacgaaaccgcccggatccagtttgacgtttacgacaacgacgaagacaacgccgacgccgtcgcccggcagctgcggctgcgactgctgcaggccttcggcacgctgcccgtcagcgacgccgacgacgcggccgaactgttcgtcaccggtgtatcgaccgccggcggcgtccgtcattcatccaatcaagcaccgatcgacgcgtccgacgactggctgtaccgcgtcggctttgacctgaccgtcagtttcaacccacccagctaacccacgcaacgcaaggaagccaccgccatgaccggaaccggcaatcaatccaccatcgttttcccggtcgcgcagatcgtgggcaaattcacgatgatcggcggcgttgacacggaagtcggcgacgaagacgtcagcaacctggcgaccgaagacgtgcaggaaaaggtgctgcacgacatcgggacgatgtccgacaccgaagtcgaaatgttgctgaacacggccgacaacctgctgacgttcgcgtcgacgccgaccgcgccctacctgaaactgaaacacaaagaactgatcacgatcaactgggccgcccgccaagggcaatcggccggtgcatcgttgtcggcctggggcggcatcaagaaaatcagcctgcccgaacacgtcaacaacgtgacccagcgattgaagttcaccatcgcctggttgaaccgcgacaacaccggcgtgcaagtgaagccggcctggaccccggcgacagaaacaccctaatcgcgtcgcccgtcacgcagcccccaccatccaccgccaccaccgaaacggaaccccgacatgtctgaatcgccgttcaaaatcgaattgcagccccacatggcacagcgtgaacgcttcggcgtcgtggtcgacgaaccgctgggccaattccgcgtcctggtcaacggccgactggccggatacgtccacgacgcgcccgggtcggcgtttgtcgccgtgctgccaccgtcgcaattcaacgacgacattctggggcagatcaaagacgcgatcacggcacactttgccgccgaaccgtcaccggcacgactgccgcccgaggccgacgacgccaccgatggcattgacgccgacgatctgacgggcgactttgtcgaagtggtggtggattcggacgacgtgtccgacattgacccggccgacgaaggcaagggcgactgaccacgcgtcaccgatccgccaatcgttgacccccatgcaccgcggccgcggcatcacgccggaccgcacaagccgaacggaagcccatgaacacgctggaccgcagcacgctggaaaacaccgccaaaacgcgtttcaaagatgtcgcgctgcccggcggcggtgcaatcaaaatccgcagcatcaccgcgacggagaaaacggaatacgattcgatcgtctacaacaaagacggcgaattcgaacaccggcgactgtcgttgcggccgcgcaagctgctgcaactgtgcctgttgaaccccgacggcacgcaaatgtatgcaccggaggaagtgccgcggatcaaatgcgacggcggcgtgtttcaaacgctggtcaatgcgtgcatcaagcactgcggactggaccaggccgaattgtcgatcgacgacgccaaaaaaaactcgcccacaatcgacgactccgcgcggtcttccggctttgtctcaagctcggaatcgacgaccccgtcgcctggctcaaccgcaccgaccccgacgtcgtcacccgatggatcgcctattgggaacttgaacccttcggcgacgactggcgacgcaccggcagcctaggcgccgccctgtcgcacgtcgaagccggcctgtatgccacgcgaggattggaaccgcccgacattcgatcgatcgattcgtttttgccggtgccgtccgatgaccaggcgaccaccggccgccggcgactgaccgacgacgaagcacagtttgcactgatggtcgggttcgggatcgacccgtaggagaatcgaagcgatggatagcgtcggcggactcgtttacaagctgcaggccaacaattcgtcgttcgatcgttcgatgaaattgtccggccgcgaaatggcggcggtgaagcgtgaaatgcgcaagagccgcaccgacgcggaaaagctgcaggacaaggtcgacatgttggaccgtgctttggcccagggggccatcacgtccgacgaatatcatcgatcgttcgtgcggctgaacagcgaaacggacgaagccaagcgggcgcagcgggaacacgccgacgcggtcaaccaggccgccgcgatgacgcagcggtacaagaccgacaccgaacggctggccgacgaaatccgcgaactcaagcgactcaaaccgcacttggacgccagcacctacgcacgcgcggtcgcggacatcaacagccgattgccggcacaagtggccgccacggaaaagctggaacgcacccaggcacgccagcaacgccggcaagaattgttgggtcgcgaaatggccgaaggccggcggatcatgcagtccgtcgaaacggaagccgaacagtatcaacgcgaaatcgatcgactgaacaagctgttgcgtcgcggtgcgatcgaccaacaaacgttcgaccgtgcggcacgccgggccggccaaggcatgcgaaatcagcggatggaattcgcatcgcagctgcccgtcgtcggccaattcaccggactgctggtttctgcaaatccggcattggctgcaatcgcagtgaccagtgcgatcgttgcaccagcgctctatggcttgcaacgtgcattcgatgcggtgaccgacggcgtccaacgccagatggaagcgatcgacaaacaagccaaacatgcgcggttacttggcgcagacctgcaggcactgcaggcgattcaatacgccgccgcacaaacggcaggttttaccgaagaccaaaccaatcaagccctgcaacgaatggcccgacgcgtgaccgaagcggccatgggcaagggcgaagcgcaagaaatcctgcagcggatggggctggacgctaggacactggcgcagcaggaccccacgatgatgatccgcaaaattgcggacgcgatgaaaaccctgggcggcgaaaacgaacagcttgttgcctggttcaagctgtttgattccgagggagccaagcttggtctgatgctacgggatggttccgccggcatcgacaagtacgcaagcaagattgaaaagcttggtgcggcaatcaatgggctggatgcggcgcagatcgaatcggccaacgatgcgatcgccgatgcgcagatggcgatcgacgggctttacaacaccctggccgtaaagctttcgccagaaatcgaactggcaacgcattcaatcgtcagcatttccaaggccctgcatgaatgggacggccgaatccttggaatccgaaccagcttgtcaggactggccgccgactggatggactggtcgacccgaatcgaagcgtacatgaacctggatcctgtcggtatctacaattcgttttcgaccgaccgttcggccgcgatggaccagacagtgaaattcctggaaaacatgaaccggatccaggcaaagcagactgaacaagaggccgccgaacatcgacggatcaaccgcttgattgaccaagtcgccgaggaagaacggctgacccaggagaaacgcgagcaagaacgtctggaccgcgaatccgaccggcttgccaaagagcagcaacgcctgcaggaacaagcacgccgcgaagcggaacgcgaaaccgaacgccgccaagccgaagcccaacgccggcacgacgaagtcatgcgacgcggcgaacaaatccgcgatgcaaaccgcaccgaattggaagtgtaccgcgacaacctggtcgaactgcgggcacttttccgcgtcggcgcgatcgaccaggccaccttggcccgagcgtccgcggccgaacgcgaacgattccggaaatcgcaagccgaaaaggaaccgcgatcgcagcccgccgcgacgattcgcgccggatcccgcgaagaatacgacgcgatcaatcgaatcatgctggcacgccgcgatgttgaacagcgacgacacgtcgaagcccaacgcctgcaggaacttcacgccgggttcctcgagcgcatcgccgaagcggtcgaacaattccaactgacagagggcgtttgacgtggcagtgcagtatcggatcaccgaagcccgcgacagcggcgacatgtcggtgaccaaatcggacgacagtatccaattcgtcatccccgccgttttcaacgtcgaagttttcgaccccgccgaccccagtttcgacggacggtcgatcgaccgttgggatgccgcatcggccgtcgattcattcaccggccggcggatcccgaccgtcggcgtgtcggtctattacttcgacggcaaagtgatcccgtttttgacgtgcacgtcaaagcgatgcgtccggaataaggatgtcgccaaccgattcacgatcacgtgcaaatttgacagcggaaagatcgccggcggaaccgaatcggacgcgcaaaagcaagacccacccgacgacctgaccgacttgaccccacgggtcgaaccctactttggcgaagacaagaagatcctgcacgtcgactacaacgaccgcgaagtgcttttgccaaacggcaacccgttttccgagccgttggaggaacgcatttcgacgttgggactcaagatcacgcaatacgaaccgtttctgtcgtacgaagatgccgacgcccggcggttcaaggtcaacagcgacacgttccgcggcgacgacccgtacaaatggatcatcgacgacgtcagcccgaaggaagtcgaagtggttctgtcgtccggcacggtcgacgcggtggaagtcacctatagcctgctgcgcaacccgactctgtacggttggatggatcgccgcgccttgatcgatgtcgagtacttggacgacgatggcaatcgtgtggcattcaccaccgacgacgcgttcggcagcagcatgggcttgctgaccgtcaccggtgaaaagaaatccggcacggaaccggactatctcaactttgaaccacagccacgcatcgaattcggttcattcctgcaggtttcctaagccatggccgtttacggattcaaacgacgccgcgatgcggtggaaatcaaacgccgcgtgctcgacaaagcaccctacacagccggcggccagctgcccccgcacttgcgactggaccggtatttctacgtcgccccttcggcgatcgccgcagccaccatcgacgaagtcgacttcaccgattccatctatcgttcagtggaatgcccggcctatcaattcgtggacaatggggacggcacgttttcgccggtggaagtccgcaaccgaaacggcgatcacgtcgcgcacgcaatctgcaatccgtcgcccaccgaaatcatccccgccggcgcgaagtttggcgcgatcatctatcccggcggaatccggttcgcatcgctttatccctgctgatccggtgcgggacttcggccgcccgctacctgtccctgcgcttcgcttcggcccagcaagcggccggcctacgtctgcatcactgacccggccgcggatccccttcgatacgctgcgcgatcgacgcggatccgcggccttcaaccccccccctccaatctcgttttcatttcagcgaacctggcgtgtggtctaccgcccggcgatttagcagaaatcggggcccgggggcctgtggataacctgtcagcgatcgaactgttgacgatcagcatcgtcggccgatgggcccggcggcgcatcctttggtgggatcacgcccgaccgaatgtcgttgaggatgcgaacgagaagcgaatcagtcgcacgatttagcagtcctttgcggtgtcgttcgaccagggcagcgcacctattccgttcctccaatacgactggttcgctgtccatggtgatgccttgtcgttggcggcatgatcgatcgtgtggccttgcgtgggtcaatgtaacttgcccacgccaatgttggacctgaacggtggcccaggtacttggttgcgccatcgggttcggcacactcgactgcggtcgcgccggtgcggcggatatgctgcatcgctcgattgccaatcgttgcgtcgataccagctagagcacgtgcgcgacgtatccagtagtagaacgctgattcattgaacggccaatgcagcggcgtgcgtgcgtgccgtgcaccgatcgccgataggtgacgatgcaacgccatcaagcccgcatgcgtttctggtgtcacttcgatgacgtgcacctgtccactcttgttttgcgtcatgctggcccgtcgctgatcatccagccgcgtgacatcgaatcgccacacgtcggtgcgtcggagcccggtttcaaacgtgaaccacagcacggttgagaaatacaacgcacgtcgcacaccgttcttcaggtgaccgtgcagtcggccggccgcttcggccacggcctgcatttcctcaaagtcccatgcttcgggtggacgcttggcaacacgcaccaaccgcacggccgacgttggtgctgtcgggtcgtgccacttccacaacgtcaggatggactgccggacgttccgccgactgcgatcggcgatctgtccgctttggcgttcgtgccgcagccacgcattgacagcgtcgggcgtcaagtcgccggcaacggccggtcgccccaggtgcaattcgaaccgccgcacggcgtattccaattggtattcgtagtcggcgctcaattcgtgcgccagacagtacttggtgcaaatctcggaaagcttcatcagtgaaccccggaatagcgtacacgcgccatccggggcggggaccgacggtccatcgacacagcgggtgcaaaacgcaacccgcgttcagcatgcaccgtttgggcaaacttcgcggccaaaaagcgctccactaggttcgagtcctagcggggtagccttcaaaaacccggtccgcattgcggtgccgggttttttcgtgggccgacgccaatcgaagatttgccgaccggccaagtgtgcctcgccccacggatttcaacctgctgtatcgctctgtagccgatgagctgccgtatttttgcaagtcggacagatcgtgcgttcccacaaattgccggcgaagcggtcttggccgccgatcccgatggacccgaatcgaccagactttcctccaaatcgttcgctcgcctagacaactcgctgccagaagtagcagcacaaaaaaagccaggacatgacttgcatgtgctggctttggtcgcccgaaggcggtgcctgcgtattttcaacaagtgaattacttgttgcgaaaaagtggcaggccgaggtcagatacacttcccgaatcatactgcagattcacgttccccacaagcaaacccgcatttcgacttgctatacattggctaccatgaggtatccattttagttaagcgttgagggtagcgaacatgaatcggggcatcactatcggtctggacattggctccaactcagtgggtagtgcgtgggtagatgaagacaaacgtgaaatcgaggtcggctgcagcgtttttcccgcgggggtcgaagactcagaaaaaggacgcggtgcacccaaaaatcaagatcgacggcagaaacgatccgcacgccgtagtatcgcgcgacgcagccaacgcaagcgaaacttacgaaagttcttaattgaagtcggactgcttccccgcgatcgtgaatccgcggaaacgctgtttcgccaagatccctggcaactgcgacgccttgcattaactgaattgctgactccacatcaattcggtcgcgtgctgctgcatctggctcagcgtcgcggcgccgcgggattgcgtccggtcgtcgaagaagacggcaaatcagcaaacgatagcgatggtcccatcaaagaggcgatcgatgaaactcgaaagaagatgcttgcacgcgagtgccaaacctttgggcaattgattgccgatatcgcagatgagcaggctgtcccgctgaccgccccggacggcaagccaaagcgaaacgaatacaaccaagtcgttaaatttcgcaacaagattcgcaactcatcaggcgagtttctgtatcaagccaatcgggaaatgattcgcgatgagttccacatcttgtgggaaaagcagaaggagttgggcggtgatcttgcgaatctgctgaccgacgaagtccgactcgcactcgacgatccgacacgtgacgaaacttggcggcatcgcggcttgatgttcggtcaacgtaaaacgtattgggacgttggcacgctcggccgctgtgacttggaaccttccgatcgtgtcgctcccgtggccgattgctacgcatctcgctttcgggtcatcgaatatgtcaacaatattcgcattcaacgacctggtgaaacagaattcgaaccgctatcgcaggatgaacatgctgcggttgttgaaaagttaggcaaacaaaagaccgcaacaatttcaacagtccgccaagcattgaaaatcgacacaaaaagcctgaagaagtcgaatttcagtacggatgactttgtgctcaacctggagcgagatgaacagcgtccaccgaacacggactggttcgaatgcgccatcgcatcgccactaacggaagcagggcatacagacttactaagttgctcagtgcaactttccaagttgaacaaagccatccttcggttcgatccagccgaaccggacgatgaagttcgacttcgcaataaactcgttcatctcaaactctgccaacaaggcatcgatgccgtcgtcgaaggctggcgaacacgtccgaaactcgaaaatcgcctcaaactctcacgcagggccattcgaaacttgttgccgtacatggaacagcctgatagtgatggtcactggcgaacgcaaattgaagcgagatgtgcgtttgccgacgacgaacatgtgctggactccgcaactggaaaaccaccaacggacgaacagcgaaaacgttatcgattaggtcgtggccgattgaactccgccgcccggcactatctcaagaaacatccggaggaatatctgccgcttccgccggtattgtccaacccggttgtgcgaaaagcgatctacgaagtacgacgtcacatcatcgcttatttaaaaaggcacgacggacgtcggccagatcgcattgtgattgagttcgcacgggaggcaactaagcccgcgatcgtcaatgatcgaatgctggcacgcaaccgaaaccgagatcaaatcagacgacaaattcgcgaatccatcattcgtcccgcatggggtgctaagtttgattcgctgacgacgaaccaaatcaaagcagccgagactcgagtacttctgtgcctacaacagcgaggcgtctgcgcttattcgctcgaatccgttctggatgatgaaaacgggatgtgtggttattcggggcgcagcatcacgccacgacaggcggctctgggcaccaatttagaagttgatcatatcgttccttacagtcgatgtggcgacaattcgatgaacaacaaagtcctctgctacatcgacagcaaccgagacaagggcaatcgaacattgcgagaatggtggggtgatcagttcgatgaacggatcaaaccaatgcgtttctttgaaaacgcccgaccagccaaaggcgactattttgagattcgagactacactaagaagtggcgaaatctttcggctgacaaggttccaaaggaatggcaaggcagccaactgtctgacaccgcctatgccgctcgggaggtccaggagtatctagaggcggcgctgtggcccgacgaaccaggccatctggaaggcggaccgcggagaattttcgtgacacgcggtgggaacaccgcccggcttcgtcgcgactggcaactctatcgtcaagcagatccaaatgaacttccaccgagtccggaagagcaggaacgtcggaatgcgaaaaaccgtggcgatcatcgggagcacgcgatcgatgcggttgtcatcgctcttaccagtgaatcgcgactgcaaaaactggctagggatgttaatgaccacaacgatgcctggactcaggcacgtcgtagtggtcagcgaccaaagcaattgcgtcgaaaaccgctgccgccaccctggggtgacgttcaatctttcagacagcaggtaatgtcactgatttatcccaccggcgcagacgaaacgagcaatacgccgctcgttgtctctcatcgtgctgtcggtcgcaagctttcaggtcgactgcatgaggaaagtctttttggaccagttgcccgccaaaagaacgtctttatcgccaagaaggccattggtgatctcacccccaagcatctaagaatgcaagttgccgaaaatccccaagatgcgattgtgcgactggcaaagcggtatcagcaggctgatcgcaacctatccgccaaggatgccaaagctcgggcgaaaaaagtcgtcgaaggccggggctatcaaccgcgaatggtcgccccatcacctgaaaagagcggattaattcgagacatcggtttgcgacgagtcttgcgaaaacagatcacggaacgagcggaaaaactggggattctgcgggatgcagatagtttcaccaagagtgatttaaggaagatgcttgcagaatcctttggtccatttcgacaagaatcaggcgttccaatcaaatcgtttcgattgctacgaacgatgaacggacctgttgtgatgcctcgacgtgaattcgattacgaaagaatgcagtggattgaactagactcgaagaaaagaccaacgtcgccacgtgctcatctcagcggcaacaatcatcatctcgagattcgccgagaccttcgtggcaagtgggttggcaacgtagtttcgatgtacgaagcggcgaggcgagcaaagaaactgggggtcgatccggttgatcgcaccagtgatgatgaacgcggcacctacgtgatgtctttggcaattggcgagacggtgtacatgaaagacaaggagacgaatcaaccgggatactttgttgttgccaagctcgacagcagaaagggaaaaaatcttgctgagttttgcccccattgggacgcaagacgtgctgtcggtgaaaaggacgacggtggaaacctaattgatggaacctgtcgtaggacgatatcgatctctccctcacagatgcaatctcttgcacctcccgatttcgacacaccagtgaaagttttggtgtcaccgatcggtcagatcaccgttattgaaccgcacgagccgagaaccgttgaccttgacgaactcgatgcagaggtggtcgcaatcgcccgcgaagccattgccgcaagacaatctcgcaacgcagagaagaggaaagggcgtcgctgttacggatcctggtcatggatgagagagcgtctgcgcaaatgcaacaaggatcatcttgcggcagagctttcgagtgcaatgcggttgatgacgtcgtgtgaataatcgttcagcatcgcgcaatcgagcacgtccaactctcgattgtttgcaaagtttcgccgcatacgacattcgttcaccgcaccgcctgtgaaatggcgtgattgttgaactatgcttgaaactggagtgctttcccagggacggaatgcgttctcgttccagcaggtgcaagtgtgctaaaacgcaccatagaaatcagctctcagccaacgcatctctcgatgcgtcacgggcaaattactctctcacgcgacggcgaaccgataggcagtgtgccatgtgaggacgttggtaccgtcgtcgtggatcatccgcaaacgacatacacgcacgcggtcctgcgagacatcgtggcgcaaggtggcactgtcgttatctgcggccacgatcaccaacccgcaggcgtcttaatcccattgggaagccactgtcaaatcgtgcaacgcacccgagaacagatcgaagcgacgctaccaacgagaaagagaatctggcagcaactgatccaaggcaagatttctgaagcgtctagggtgctcgagggcttggattcgggcaaacggttgcgtgctttagtccggcaggtgcgttcaggtgatccgaccaatgtcgaagccagagccgccaagctgttttggcagtcatggcttcccaacgaagttgcatttcgccgcgatcacgacggcgatgatttcaacggattgcttaattacggttatgcaatcattcgagcgttgatttcgcgtgcaatcgtctcggccggctacgcgcccgcaatcggtatccatcaccaccatcgcggtaaccccttttgcttgtcagatgatttgatcgagccgctacgaccactcgttgacggctgcgtccgaggcttattcctagcgggacacttcgagatcaaccggaataccaagacgcgactgcttggtctacttaatctgacgaccgaacttggcggcgagcatggtccgctgaacgttgtcgtccaccgctatgtcaaccaattcggagcttgtttgagaggcgaaactaaaactcttgactaccccaaacgagcaacaccgtggaactgagtgcatatcgaagtatgtggacgatcgtcatgttcgacctgccggtcgatacaccgaaagctcgcaaagcctatgcgatgttccgtaagcaactcctcagtgacggcttttttaagctgcagtacagtgtgtacgctcgcccttcaccgagcaaagaaattgcgaatgtgcatatcgctagagtagaacgatggttacccaacgccggagaagtccgagttcttgagatgacggataaacagttcgaagcaatgaagatcttttggggccgaaaacgtcgtcctcctgaatcaacacctcaacagcttgagtttttttgaccgagttcatgtcgtaaattctttgacggtaaagccttacagcagaggtagtgtatctgacctcggcctgcgaccaatccgcaaccttcgccttcgtatcgctcgacgtccgccgagtgtatctgacctcggcctgcgaccaatccgcaactagtccgacgactgcaccacattgatcgtgagtgtatctgacctcggcctgcgaccaatccgcaacaagccgcggccgacatcggcagagctcgagagtgtatctgacctcggcctgcgaccaatccgcaactttttgttgttcgtcgcggtgtcgcgttttagtgtatctgacctcggcctgcgaccaatccgcaacgaaccgggtcaagcatggtttccgttttccagtgtatctgacctcggcctgcgaccaatccgcaaccatggggtcaaagaccagttggtatctgacagtgtatctgacctcggcctgcgaccaatccgcaacgatgaatcgaatcgatgtaagccctaccttaagtgtatctgacctcggcctgcgaccaatccgcaacacgatcgcagcggcaacgaccaccacctgaagtgtatctgacctcggcctgcgaccaatccgcaactcatcgccaaggtcatacggcggcacgaatagtgtatctgacctcggcctgcgaccaatccgcaacatcctcgacccggacaataaaacgatcaagagtgtatctgacctcggcctgcgaccaatccgcaactggccatttgcaggacccaggacgcaccgaagtgtatctgacctcggcctgcgaccaatccgcaaccatgcggcgaatcaacaaaagcaatcaagcagtgtatctgacctcggcctgcgaccaatccgcaacacaagtgctgagatagcgccactgtgcctaagtgtatctgacctcggcctgcgaccaatccgcaacaacaaaccttcgtttccgcgcgggtcccaaagtgtatctgacctcggcctgcgaccaatccgcaacttgtcggtttgcgtgatcctgtgtcgcttcagtgtatctgacctcggcctgcgaccaatccgcaacggccgaccttctgcgcttcctcgctgatctagtgtatctgacctcggcctgcgaccaatccgcaaccatccgccacatacggaaccggcgaccaaaagtgtatctgacctcggcctgcgaccaatccgcaacgtgatctggtcgacttgctcctgcgaaagaagtgtatctgacctcggcctgcgaccaatccgcaactgcggcaagctgctgacaccgcacttggtgagtgtatctgacctcggcctgcgaccaatccgcaactgaacggcgttggcgttcaacgcgttcttcagtgtatctgacctcggcctgcgaccaatccgcaacggcttggcgtcttcgcctccgacgaactggagtgtatctgacctcggcctgcgaccaatccgcaactacgagctaaacgcttcaccaattatgggaagtgtatctgacctcggcctgcgaccaatccgcaacaataccgacactgtgtgccactatgcatcgagtgtatctgacctcggcctgcgaccaatccgcaacaccgccatgtacctatttgacgaaagctgaagtgtatctgacctcggcctgcgaccaatccgcaacacgtccagggtggcgggtgtgatgccgccagtgtatctgacctcggcctgcgaccaatccgcaacgtgcggcgaacgcgatcgaacgcgcgtggaagtgtatctgacctcggcctgcgaccaatccgcaacgggcctggatctggacccgctggatggaagagtgtatctgacctcggcctgcgaccaatccgcaacggtgagtacgtcatggacttggccgaggaaagtgtatctgacctcggcctgcgaccaatccgcaacatgatcaacgacgaacggaatgaatacatcagtgtatctgacctcggcctgcgaccaatccgcaacctgaaggaacagtgggccgaagcgatgcaagtgtatctgacctcggcctgcgaccaatccgcaacgaccagatcgacctgaacgcgacccacaaaagtgtatctgacctcggcctgcgaccaatccgcaacaaggaaatctgccgatgtagtcccagttattgtcgaagtctgtgtcctcgaatgactgaaaatggccgcgtctttgattgaaatcatcacgccccagcggcccgtcgcttgggctccggtcacttctatctaaaagagccccctctttccatctgctgtgattgatagccgcccgcttgcttgcgagagggccggcctcttttgttcgggacggacgtcgcgatacccgggcaagtccgatcaggtgccgaattgaagcttgtaaaatcagcgcgccgcaaagagactcggggactcagatagcccgtcagtgccccttcttgctcccgcgccatgttcgccgctctcaaaagactcgtcccaaaccgattccgccagcgccgtcaatcatcgcaccaagcccagccctggacgtgcggtccgctggaggaaaggcacatgctgtcggcgatctcggtgctagccgccggcacgacgggcgacgaaaccatccgtctgtacgccgacgatgaactggtgggcacttacagcgacttgggcagcggcgccgacagcggacagttcgttcggctggacgccgacaccgatgcctcgacgccttcgcagatccggatcgaattcatcaacgatgtttatgagcctcagcttggcatcgaccgaaacgttcgagtcgatcgtatcgaggttgacggggttggctatgaaacggaatcacccaacgtcttttcaacggggacttggctggccgaggatggaatcacgccgggcaaccgtcaaagcgaatacctgcacgccgacggcttctttcagtacgacctggccggcaatcccaccggatcgctgattgtcgtcaccgctgacggcagcacgggcaacgagaacatgtcgctgttgatcgatggggaaaccgttgccaactgggacgtaggcacgacgacacagacctattcattcgtggcggcacagaccgtttcggccgaccaagtccgcgtcgcgttcaccaatgatcgctacgaaccggatgtcggcatcgattacaacctgcgcgtcgacaacattcaaatcgacggtgtgacgtacgagaccgaagatccgagtgtgttctcaaccggcacttggttgccctctgacggcatcgtccctggcaaccgtcaaaacgaaacgttgcacaccgacggttattttcaatacgcaagcgacgacgtgcaggccggctttgttggtttggctgtcacgcaggtgaccgtcaatgagtccgacggtacggcacaaattgggatcgaccggtttgatggaaccgatggtccggcatcagtcttctatcaaacctttggcgtcgaagccgaatcgggcagcgattttatcggaaccgattctggacgagtcgattttgctgatggtcaatcgtccgcattcatcaccgtcgatctgatcaacgacgaagaattcgaaagcgtcgagtcgttcagtgtgtcgctgttccgcagcgagggcgcagagttggccgaaccgcgaaccgcaatcgtgaccatcgtcgacgatgaatctggactcgggctggtcggccactggcgactggatgaatcggcgatcggtcaaaacgtggccgactcctcgggcaacggcaactcgggaacgcatacgaacattgccgcgcccgccggtcccaccgcaaacggggtggattttgattccgccaatgccggtgcactgctgttcgacggcgacaacgatttcgtcagcatcgcaggtgatccgtccctggatctcagcgacggtcagttcactcagtccgtttgggttcgtcccaccgcaacgggacgcacgtatcagggcgttcttggcttccaaggcagtggcggagtcgccgggcggtatccggggatctgggtccagaatgacacacaagtgcatgccggctttggtgacggaagcaactggaacagtttgagtaccggagaagtcttgacgctgaatgagtggaaccatgtcgcgacgactttcgacggtacgaactatcgagtctacgtgaattccgcggaggtttactcgaccgatcagtacgccggacgcacaccgaccgctgaaacacgcgtcaacattggacgtgtcgacaattactttgccggtgccgtcgacgacgtgcggattttcaaccgcgccctgaccgctgcggaggtggccacgctgatcgatggtgccgacgtgccgtctgtgccgctgtccaatggacagtacgtgaccagccaactagccgcgggatttgatacaccgattgaggtggaacaactggccgatggccgctttctggttgccgagcaagatggcgtcgttcgcttggtcaatgcagatgggtcggttcagtcgacgcccgtgctagacattcgatcgatcgtcaactctggcaccaaagatcgcggaatgatcggtttcgccgtccatccggatctggccaacaatccatacatctatgcgtcgtacacctacgatccgcccgagatcaccggtggtggtttgggcggcgtcgacggaaacggatcacgcgtctcccgcatctcgcgcttcaccgtcacggaaaacaacggggtcctaacggctgacccagcgaccaacgttgtattggtcggcaacaacagcactttcgacaacatcggtgatccagattccagggtgggactggagggtccacacagttgcgtcgacgccggcggcaacccgatcgaagactgcatcccggcggatgaaactagtcacacgattggggaactggaattcggtcccgacggcatgttatatgccgctagcggggacggcggttcctttggtcgtgtcgacccgatcaacctgcgtgctttggatgtcgactcattggcgggcaagatccttcgcattgatccgatcaccggccaagcccccagcgacaatccacttttcaacggcgaccccgacgccaacgaatcaaaggtctttgcgtatggcctgcggaatccgttccgattcgcggtgggcggcacagccagcaaccccgagatcttcgtcggcgatgtcggatggactcagtgggaagaagtcaatcgaggcgttggcggcgagaactttggttggccggctttcgaaggcggcgatggcgagagcctacaaaccggacgataccgtgacttggctgaggtgcaggcctactacgcaaccaatcccgacgtgaccgcgcccatgtgggcgcgacttcacagccagggagcccgcgcgatcgtcatgggcgactttgtcggtccccaaaacgcttcgggtaccgggacgctgctgttcaccgacatcggtgaccaaatcctgcgagcggcgacattcaacgacagcggtgaattcctgggcgtcgaagtcgtctcgggtaacgtcggattcatcgtcgacatgcataccggcgtcgatggattcacttactatgtggacatcaccggaagcatcggacgtttgaattttcaaaccgtctgagcgagcgataagcgaatggccgcgacgtgtctatcgaagtcccgtcgtcgccatcggaatcgtaaagacgctgtcaccggcggtgatgaacaactggtcgaacttgggccccgcgaaagtcacgttcgcggtccagcccttgggcaccgcaatggtgtcgattcgcttcccagtcttgtcaaagaccataacaccctcacggccggtcagataaagattgcgatcgacgtccagcgtcacaccatcgctgcccgacgcacagaagagctctcgttcggtcagcttgccgtctggatcgattacatatcgatacatcttcttgtcaccaatatccgcgacataaagatgacgcttctctgcatcaccgatgatgccattgggttggaccaagtcactggcgacttgcgtgatcgatccatccgttgaaagccgatagacgccacgcgggtgatcgtcggcaatggagtgcttccagtacggtcgcttgtaaagcgggtcagtgaaatagatcgcgccgtcttgatcgacccaacaatcgttgggccccgagaaacgacggttttcaaactggccgaccagcaactcatgctctttcgttttcaagtcgatacgccagagttcgttgttttcgtccgcgcacgcgatcaagctttgcggtgccacaaagaaaagaccgttgctgcgtccgcagggtgaaagccagtcggaaagttctccggtcttggcgtcccaccgaacgattcggtcattcggttggtcggtgaagtagacgtttccagcatcatcggcggccggtccctcggtgaatttgtaaccgtcaccaatcagcttcagcgtcgcgccctcagcaacgacggagtcgctttgcgtttcttgtgcttgcacgtgcgagagcaacgggaagagcggcaaaaggatcagaattcccgtcagtcgtatggttgatggcatcagtgttcttgatctcaaagggaaagtgattcagtcgttgtgcgaaacggtttcggcttagcttcgctgtctcgtgggagcacacgatcttactgaatatccgatgacaggagatgaggcatgtcgaaagttgtgcttctgagtcgctgaagagggtcgcggatcctgatgaaacctcaacacctccgcggccgtttcgatccagcaatgagcgtcaaccaccgccaaaaagtggatcattttgccgcggcgtagtcgacgacgcatccgccagtgtcgttcgattcataggcggcttcgacacaggccatggtgcgcatgacatcgtcgatccccgtgggcatgacatcgcaactgccttcggcgtgacgctggaccgatgccatggttccgatgaaggcttctgggaaccaagatccttccaaagcaatggtctcccatttcggcggctgatcgtctttcaaaaaacagacttcgaactgatccggtacgccgtcgggatagttcatcagcaatcccatctttgctttgaccgccccgcgggttccctcccatttgatatagctttgttgattgtgcagtccgaaatcgtaaccgtgattggtcaaaatcgtggcttggatttcgtcaccatagtccatcatgatcgtgctgcgagtggacgccaattcgcgctgcttgggatgcttcaccgttcgcgcgtacaccttttcggggtccccaaaaaacgaccgaatcaaatcgacatagtgaatgctgtgctgctggatctccacacgcggcaacggatgaatgtgggggaacaggtgccagggcgtgaaaacctccacatgcacttccatgtgatgcagttcacccagcaatccttgctgcaacaaccaacgcgtcgccagcacgaacggtgcaaaccgcaactggcaattgatcgccgcgtggtgccctttgcgctgacaaacatcgcgaatcgcttgggtctgttcccacgaatcgcccatcggtttctggatcaacacgtgtgacccatcgggcaactgattcaacacgtcgacaaattgcggcggcatcagggccagatcccagacgaccgattccggcgcgtcggcgaccgcttgttgcaccgacgtgtagacattggggatcccatattgatccgccaagtcttgcgccttcgcgatggttcgattgtagatgccgtgtacttgaaaaccggcttggcggtacgcgggcaaatgggcatctttgacgatcccaccggcgccaagaatgatgatcggacgtccgctttcgggcagttcgggcttgtattgaatgtccatcatcatgatccttggatttcatcgatgcgagactgtgcgagagccgtgatttgctcgaccggcttttccgaattcattgcttgaatgaccaagtcatcgatgacggcggccaattgcgaccagttggccaatcgcggcaatgtgcgggcaaattcatgcagcgattccagacgatggtaatacgggacttggccattcacgtccgcatcacaccaagtgctcgtgcgacatcccgttccaccattcaacgtcaaccgtttgtcgttttcacgattgaccatgaaccgaatgaaatcgtaggcaaccgatgcatgcattgaccccgccccgatcgtgtacagccaataacagttcaatgaggccgacgaaccatcaggatcgtgtgggattggggccaagtcgacctttcctttgaccacgctttcatccacgacctcgctcatcgatgcgaacccaaaccaattcaccatcatcgcgacttcgccccgtgcgaaagccagccccgatttcactgaatcgaagtctcggcaatcgggatgaatggcggtcgtatcctgcaacagttcgcgatagaaacgcatcccacgatgggacgccggcgaatccacgatcactcggttggtcgccggatccaccagttcaccgccacgtgtccaaacgtgaagcgcgaaatcaaataccgtgttatgaccatcggggaatcctgccaccacggttccgt

SEQ ID NO: 3390 - DNA, 24050 bp, synthetic construct
  misc_feature 1..24050: note = Synthetic
  source 1..24050: mol_type = other DNA
gcatgttcttgcccaactcgatccgctcatgccgagcacgttgcccaacgttaatatcgaattaattcggctgttcactttcctgcagagtccgaccgttgctagaaacgcaatcgatttgattcgcaaccggactgcaccggagatgcccgactggggcacgttggcctcgcgtaacagtagctacgggagcgcagtgaatcgaatgctggagaacccgccgccatcgcaggagatcatgatcgcattcatgctgcggaccctacgcaatggctggtcgctggatctgcgacgcgagtatttccaattcctcaacgaagccgcgaaaacctcgggcggctcgagcttcccgggctacctgactcgcatccgcgacgaagctctcacgggatgcagcaacgaggaacgcacggcactcaatgagatcacgggcgaaaatttcgatcccgcccccgatttcgagatcgcccccatcgaaggccctggtcgcaagtgggacatcgcctcggtactggctgcagcatcccagggcaaacccgacttcgaacggggccgatcgctttacttcagcggcaagtgtgcgtcatgccatcggatcgccggattgggcggaaacattggcccagacttgaccagcatcccgagcaaattcgatcagaaatacgttgtcgaagcgatcattgatcccagtaaggtgatctccgatcaatacggttcgtccacggtcttgcttgccgacggcagcctgctgaccggattggtaatcaaacgcgaccaaggcaacttgaccgtttatccaaatctagcggacgccgaaccaatcgaagtcgatgccgatgacgtcgaagaagtcgttccctcatccgtttcgcaaatgccactcgaattgctcgacggcatgaacgacggcgaggtacgggatctattaggatatctgatgtcgggcggtaacccgtctgaccgccgataccgaaagtagccttccgttcgaaacatggcggcgtcgttcgggttccaatatcccggcgacgcgccgtagatcgatcttaccgctaccgattccccgccatggccgatgcgacgaacccgtaccagccgccatcgttcatcgaccaaaccgcggacacgggcaacgaagaaaccatcgaactgaacggtcacgtcagttttgatgacctcgtcgcgttgatcggaaccccgttgatcattcgcattctgcaaattgccagtgtgatcggggcattgagcgcgggtgtgctgccgattgtgtttggggtcgcgaatctcaacaagaccaccgaggcgttggggatgctcggtctcggtgtggtaactctcgcaacgctaacgctagtgaattggtggtgctctggaaagcaacgtggccgacgtctcaccaaaacacatccaggcatcattggcccgctcaacggacgcctcgatgaattcggtctgacctatcgatccgattcaggcgaacgcgattaccaaatttcgtgggcgaccttctccgatgttgccgtgacacccaagggcattcgtttgggttggtccaaaggcgtaccgacgacaatcgcgattccggcaatgtgcatcatcaattgccccgcccatgccattgcgtcaaaggtccgtcgttatcgaaagaacgcgaccgagcccgccattgccgaagtcgtgcccgactgggacgaagcccccacgcacgcaatccgctatcagtcgttcgttcccgtaaaaccgccactctcgccccgcgaagctcgccgcgtcaaaatctacaacggaatcatgactgcaagctgggcgaactcggtcggcctctggtggttctacggaattgaagtcgcgattgctttcatggcagggactcaaggcctcgcctactggttctttcgacacgagatccatcgcagccagcccgatgcctacgttttccgcatgtggggctggatcacatccgacgccattcacggctttctgcccggacaaacttggcagcgttcattgcacgacgccacgcggcgagagttcgtcaacggcaccgtccaagtcgaattcccagatggttcggggatcgcgttctctcccgacaaccttcaccccgccgacgcggaacgttggcccgaactcatcgagatcgtcaactcaacacggaacaccaccatgcgcaacacgccatcgtcaccgtgagatcagcatccaaattcatgcgtttcgaaagccaacgatcgatcgaaagactcagcaccgcccgaccgttattgcgaaaacgttacgatccgaacgatcggcgcacaatcgcatttcaccgcaaaaaacgcattcaaattcgccaacattgaaccggggcgacattccacaacagcgggcgacttgactccgataagcactccgaagtgactcatcgaagccctcttgcaatccggcaacaaaaactctgttgcggcaccatgcaggatggttagactataaagattgcttcgagcaaccatcgacgctcccaccttccaacctttgccccaccaaaacactgcagcatcgctttgaggctgctatctcgatgcctcgggtcgtgtgacgttccgcggcatcgcctggccggcacctccgtccggtcttctgaatcaaaacaatcgaccgttttacacgttgaaagttcgatcatgctcagccgtcgacaaatgttgcggggactcgcagccagcaccggtgccgcgttcggcgcgccgcttctttcggagcgtgttctcgcgtctcccttggggaacacgactcccaaacgagtcatcttcttcatgcagaaccagggattcgatcccaagacgtgcattcccgagggaatgaaacacagcggcacgttggcaaacgcaaaacttcccgaaccaatcagtgcactggagccctataaagaacggcttcacatcatcaacggtctacacggcctccatacgagtccctcgcacagtgcgttcttcggcgcactcggtgggtatcgcggcagcgacggtgtgccgccgagcgcttcgacgatcgactatgaactgagcaaggttctgccgcaaacattgctaccgcatttgtgcatcggcatggactcgatcgagaacatgaaagccaaaccgacgatcgcgacgttgtccgccagtggtgcgggccaaccgatcttcatgcattcgaatccgaatcacttgtaccagatactctacggcggtatctcaacgggcgaaattcgattgcaacacgaagcccgatcgagcgtgctcagccaaatcgaattgctcgctgcggcgaaaggccagtcgctccccgcatcggaccaacaacgctacggccaatacgtccaaggattccaagaagtcaacggactgcgtgaccggctcgacaccgtttcggatcacttacgtcaattcgcaccgaaggtggacgatcgatacaccaatccggaattcgaaaccgactggcatgattgcttgctcgacctcggtatctcggcgctcacatcaggcgtcaccaacacgctgacgatcggttcaggacgtggcgagatcttcggcgcgtggaaaggactcggtattgatcaacagggtcacaatctggggcacatggaccaacccgacaacccgatctggattaagatccgccaatacaacagccggatgttggttcgaatcatggaaaagctcgagagcgtgcccgaaggcagcggcacgatgatggacaacaccgtcatcgtttacaccagcaacaacgcggataaacagcacaccaacggggccaattggccggtcatgttgctgggcaatttcgacggtgccttcaagagcggatgcttcaccaacgtcgaaggcaaacgtccgatcaatgccctctacacgtcgctgttgagagccgccggtcaaaacgtggatcgcttcaacatggacgacaaaatggcgaagaagttcgacgacagcaccggaccgcttagagaagtattggcataacaatgcgaatgtcctcccgatttgaattcccacgcgtggtctcgatcgtaatcgtgttgttgggtatcggccgcccggcaaccgcggaaacctacatacccggcgaaccgatcgaccaagactacgcggagttggcagaaccgtttctcgcgaactactgcgtcgactgtcacggcgagtcggatcccgaaggcgatctatcgcttgaaggcctaggtcccgtcgatgcaatcaacgcgagtgtttggaccagcgtgtgggcacaggtcagcctgaaacaaatgccgccgccggacatgacgcagcctgaagtcgtcgagcgaataaaattctcagattggatcgtcagtgaactcacgcgggagatgcaagacaagggcgggttccacgctcatcgcgatcccaacaaaggcaacttcctcgatcatgaattgctgttcggttcgctgcccgagggaatcaaactcgaaccaacgtcgtcgcctgctcgcatttggcgggtgactccccaggaacacatcacgcgactgaacgaactgatcaacaccgaacctgaattcgatcccgccaaacccggactccgaacgcacggcgatgtcgtcccgactaaccatggcggcgaactgaaactgtacttcggcaccgaccgcatcatcaaatggcagggcggcaccgttgcctacgccacgtccgttaagagcgtgcccgtggtcctgtcgtcggcacgcaaccacgggttggaaaactaccccgacttctacaccgtcaacagcgccgaagcgacccaaatcatggggatcgccaacgacatcatccggtacatggccgatgggccactcagcatcgccgagccctaccaaattacggacgatcccaaatcgatcgaggacaagatgaagggcgacctgcgtggtctccccacgagtctggtgtacagcacgaaaacgctgcgcccgctgacgcccgtctatgatctcatgaaagatgacgacgtcaccgccgaacgcatgcgcgccgcggtcgacttcctcttcgaggcgttaacgtttcgcccgcccagtgacgaggaatcgaacgcgtatttggcgatcctcgaacaatcgatcgaaaagctcggcacgaaagacggttccgtcctcgggctgtcatccatctttctcgatcgcgacgcactcttccgacccgagttagccgcggccggcaaaccggacaaacacggacgtatcatgctgcgggattgggaactgggattggccgtcaatcatgccctctgctatctcaaacccgacgcggaccttcgtcgtgcgatcgtcgaaggtcgcatgcgaacacgaagcgacgtcgagcgtgaagtcgtacggatgctcggtgacgatagtattcgcaagcctcgaattttgcgattttttcgcgactacttcgattacgacctcggcggatacatctgcaaagacaccaaagcgttgggcgaaacgggcgtcaacaacaagggagtcgctcactacaacgcaatgttcgacgcgacggccagcaccgatcgtttgatcgaattgatcctgcaagaggacaccgacgtcctacgacagctgctgacgacggacaaggttgtcgccggaaaagccgacaccacctattttggcaaacagcgatcacgtgaagagattgccgcatccatcgccgccgagaaagcagccgctaagaaagcagcgatcgcgcgtgcagaacgacagaaagcgaaccccgacgaagagctgccggaaaagaaaccagcggccaaaaaaaacaaagtcaatcacgctgtcacggaagtcgaactgaatggaccaccaattttcgctcgcgtcagtcggcggagttttggtcggggctcgatgaagcccgaacgcacgttggcgaccgtccctgagggcgaacgtctcggcatcttgactcatccgagctggctcgtgtcgcactccgacgcgatggacaatcatgcgatccgccgaggccgctggatacaagaacgcctcatcggtggtgcgattcccgatgtgccgattaccgtcgacgcgatgctccctgacgaaccacgtacgcctctccgcgaacgaatgcgagtgacgcgagaagactactgctggacgtgccatcaaaaaatggacccgctcggccttccgtttgaaatgtataatcacgcgggtttgtaccgagaaacggaatatggcgaaccagtcgacacgagcggcgaaatcatcgactccggcgatccggaactcgacggcaaagtcgccaacgcgatcgagatgatccaaaagctcgccgagagcgaacgcgccgaacaggttttcgttcgtcacgccttccgattttggatgggacgaaacgaaacgctccacgacgctcctgttttgcaggatgcgtatcgagcctacaaagaatccaacggcagcatgaaggcgttgctcgtatcgctgcttacctccgatgcgtttctctaccgcacgcgttccgatgccgtcatagtggacgcgaattgacctcgccgtatcggcagcatcttacgaaagcgaatcgcttcggtatcgcccgttttctgcgactgactattcgggacgatccgcccgccacgacaacccgatcagcacgatcgcggcggccgcgcataacaatgtcgcgggctgatatctcccaacctgatcgtgcgacacgctgaacagatacggaccgaccgcggttccggcgaccacgatcgaagtggaaaaacctgagatggcaccgaggtgcagacgcccaaaaaagcgaggccatgttaccccggagatgatgccaaacattccttgcatcaaccccatccccaccacgacaaacacgatcgaaccgcccgcgtccaaaaacgacaaccccaaagcaagcatcaggctgccggtcgactggaccatcgcgagatatttcagtttgacgaaatcgctcaaccaacttcccgcgaactccaccacgacactgacgcacgccgccggaacaaaaatcgcaaccgctcgactgcgcgacatccccgcgtccgcaaaaatcgagacgacatgaaacgagaacgccgttaacaataaaccggacaacacgacactgaacgtgaacacccaaaaactgtaggtgcgccgggcttcggagagcgtgaattgacgaccactgagtgtttcggcgtgcgtctttcgcccctcttttgcaaacggcccgtctggcagcatgccatgctcctcaggtcgcgatcgggcgaaacaaaacgccaacaacgaaaatcccccgacgatcgttgcgatcacctgccacgcccacgaccatccaccacgttgaatcagccactcgaaaaagggaggcgtggccgagaaaccaaacgcgatcgaaatcccaatgaacgccaacgccatccctcggcgttgctcaaaccattccaaaaccatgttgcgtgatgacaacgtcagcatgccttgcccgaagaaacgcatcgcgaagaagccgagcattaaaacaaaaaacgagacactatctcgataaccgcccggcaaaacagatgccaccgctcgcgcgatcacgtcggaaaaactcattcccaccaagacaatcgccaacatcgcggccgagatcgccgaaacccatcgaccgccaaaccgatcgtaatagcgtcccgctcgactgatcaacaacgcgctgccgatcgtaccggcgagatacgcaaaactgatccaactgcgagacaacgcgtgggcttcaatcaggaagtctgtgaacacggacacacccaccgtttgccccggcgcactggccaacactcccaacgtcccacacaccaacaccaccgttccataaaagaacggcagggccgatggatcgaatggaaagttagcgaaacgcgggcttggttggcggccgtgagtcagtcggtcagatttcatgcgagttgtcggtggaacggagagtgattcggagcattggactgtccttccccgccgaagtcagcggggattgacagacaacgcactcgcttcgcctccaacgcacatgcgacaacgccccacgcctggggaagatcgactgtcgcgttgccaatgattaagttacgtacactaccaatgaacgatcgccgaattcccgcctcccttgctccgtcatcacgatgaaaactccccacgtcttaactctcttgtttctgatgacggcacccgtcttcggcgaagaatctgccgcgtacaaccgcgaggacgacccacacgatttcacggtcttcatgaccgaaggcggatggtgctggtaccaagacccgcgggcaatattgcacgaaggcaagatctttatcggttcagtatcaggcaacggtgccggtcccgccttggtcggcgtctacgacctcaatcgcgaccaaccgctcggaaccgtgaccgtgcatccgaagttcgatcgagacgatcacaactcccccgtgtttcatgtctgccccgatgggcgtgtgctgacggtctacgcgagacacaaccgggatcgacttcatcattcgcggtactcccaacccggcaacccgctcgaatggaccgacgaagttcgacacgaacgtgtgatgtccaacccacgggacaacgtcacgtacatgaaccttcacgagttgaaaaacgaaaacgacctctatcttttcttccgcggaatcaactttgacccgacttttgttacgtcgaatgatcacggcgaaacatggagcgatccagtgcatttcttcaagagcgaagtcggaggacgccatcggccctacgcccggtacgctggcaacggccgagacaccattcatgttgcgatcaccgacgcgcaccctcgcgacttcggtaacagcatctactacttccaattccgcgacggaaacttctatgccgccgacaacacgttgatcaaaaacctcagcaccgacggaccactgcgaccgagcgagacgggactggtttaccaaggaaccggcacccccggccgaggtgcgaacttaagtgccattggtgccgcatggaccagttcgatcgaagtcgacgagtcggggcatcctcacatcggatacaccgtctacaacagcaatactgatcatcgctaccgaatcgcatcgtggaacggcagtcaatggatcgatcgtgaagtcgcctatggcggaaaatgcctctacgaccgtgagtccagctacacgggactgatcacactggatccggttgacccgaccgtcgtcgtgatctccaccgatgtgaacccgacaaccggcgaagatctcggcgggcggcatgagatttatcgtgccaagatcacatccaaagacacggtcggatcgattgagtggcagccaataacgaaaaactcaccggtgcgaaatatcagacccgtcgtgctgcgcgacgacaaccgccgagtcatcctctggaatcgcggcgacttcaaaacctacacgaactatcaactcgacaccgtgggactgatcgaaatgcaatgacgccatatacaaacaaaaaatccctgcaggtctgcgtaccggtgtattccgcgatacttcacaattgatgtgctatcgagggattcgaggcggctcgctcgcgtgcacgtcagatcgcgagcggcagttttgtttttgaatgattggctcaattgggggtaagcacgaaccgttaactacatacggtctgctgtgcatcaaaccttcgcactcggtgccgatgctcttggaacccgacacagtcccatgtgctcccagtagccagtgagcaccaacgcagaatggtcacaaaaaaagccaggacatgactagcatgtgctggctttggtcgcccgaaggcggtgcctgcgtattttcaacaagtgaattacttgttgcgaaaaagcagcaggccgaggtcagatacactgcgaaaataatacctctatcgagctttcacgacaacccaaccagcctgaaaacatgctataaatgagcactccataaagaaaccaaatctatttaataaatcgcaggcaaagaaatgaagcggggcgtcactatcggtctggacattggttccaattcagtcggtagcgcttgggtagacgaagacaagcaagaaatcgaagttggttgcagtgtttttcctgccggcgttgaagattcagataagggacgaggagctcccaagaatcaagatcgacgccagaaacgatccgcacgccgtaatatcgcccgacgcagtcaacgcaagcgaaacttgcgaaagttcttaattgaagtcggactgcttccccgtgatcgtgaatccgctgaagcgctgtttcgccaagatccgtggcaagtgcgtcgcctcggattaactgaatcgctgactccacatcaattcggccgcgttttgttgcatcttgctcagcgtcgtggtgcagcgggtttgcgtccggtcgtcgaagaagacgccaaaccagcaaacgatagtgatggtccaatcaaagaggcgatcgacgagactcgaaagaagatgcttgcgcgcggttgccacacctttgggcaattaatcgctgatattgctgaggagcaagctgtcgcagtgaatgaccaggacggcaagccaaagcgaaacgcaaacaatcatgtcgttaagtatcagaacaagatacgcaactcaacgggcgagtttttgtatcacgccgatcgtgagatgattcgtgatgagttccgtatcttgtgggaaaagcaaaaagaacggggcggagagcttgcgactctgctgaccgacgaagtccgactcgcactcgacgatccgacacgtgacgaaacctggcggcatcgcggcttgatgttcggtcaacggaaaacatattgggacgttggcacactgggccgatgtgacttggaaccttccgatcgtgtcgctcccttggccgattgctacgcatctcgctttcgggtcatcgaatatgtcaacaatattcgcattcaacgaccaggtgaaacggaattccaaccgctatcgcaggatgaacatgccgcaattgttgagaggttaggcaagcaaaagaccgcaacaatttcaacagtccgccaagcattgaaaattgacacaaaaagcctgaagaagtcaaatttcagtacagatgactttgtgctcaacctggagcgagatgaacagcgtccaccgaacacggactggttcgcatgcgccatcgcattgccacttgagcaagcagggcacacggatttgttatcttccaccgttcagcttgcgaagttgaacaaagccatcctgcggttcgatccagccgaacctgacgacgaagctcgacttcgcaataaactcgttcatctaaaacttagccaacaaggcattgatgccgtcatcgaaggctggcgaacacgtccaaagcttgagaaccgcctcaaactctcacgcagggccattcgaaacttgttgccgtacatggaacagcgtgatagtgatggtcactggcgaacgcaaaatgaagcgagatgtgcgtttgccgacgacgaacatgcagcggactccgcaactggaaaaccaccaacggacgaacagcgaaaacgttatcgattgggtcgtggccgattgaactccgccgcccggcactatctcaagaaacaccccgaggaatatctgccgctgccgccggtattgtccaacccggttgtgcggaaagcgatctacgaagtccgacgtcacatcatcgcttatttaaaaaaacacgacggacgtcggccagatcgcatagtgatcgagttcgcacgggaggcaactaagcccgcgatcgtcaatgatcgaatgctggcccgcaaccgaaaccgagatcaaatcagacgccaaattcgcgaatccatcattcgtcccgcatggggtgctaagtttgattcgctgacgacaaaccaaatcaaagcagccgagactcgagttcttctgtgcttacagcagcgaggcgtctgcgcctattcgctcgaatccatcctggatgatgacaacggaatgtgtggttattcggggcgcagcatcacgccacgacaggcggctctgggcaccaatttagaagtagatcatatcgttccctacagtcgatgtggcgacaattcgatgaacaacaaagtcctttgctacatcgacagcaaccgagacaagggcaatcgaacactgcgagaatggtgggatgatcagttcgatgaacggattaaacccatgcgattctttgagaacgctcgaccagccaagggcgactactttgaggttcgagactacaccaagaagtggcgaaatctatcggccgacaaggtcccgaaggaatggcaaggcagccagctctctgacaccgcctatgccgctcgggaggtccaggagtatctagaagcggcgctgtggcccgaggaaccaggccatttggaaggcggacggcggagaattttcgtgacacgcggtgggcacaccgcccggcttcgtcgcgactggcaactctatcgtcaagcggccccacatgagcttccacttggaccggacgaacaagaacgtcgggacgcgaagaaccgtggggatcatcgagagcacgcgatcgatgcggttatcatcgccctcaccagtgaatcacgcctgcagaaaatggcgaaggacgttaatgaccacaacgatgcctggactcgggcccgtcgtactggtcagcgaccaaagcaattgcgtcgaaaaccgctgccgccaccctggggtgacgttcagtctttcagacagcaggtaatatcactgatctatccaaccggcgcagacgaatcgagcaacacgccactcgtggtctctcatcgtgctgttggccgcaagctttcagggcaactgcacgaagaaagtcttttcggaccagttgcccaacaagagaacactttcatcgctaaaaaagccattggtgatctcacccccaagcacctacgaatgcaggttgccgagaagcctaatgatgcgattgcgcgactggcaaaacggtatcagcaggctgatcgcaagctatccgccaaggatgcgaaagctcgggcgaaaaacgtcgtcgaagggcgcggctaccaacctcggatgggcgatccatcacctgaaaagagcgggttaattcgagacatcggtttgcgaagggtcctgcgaaaacagatcacggaacgagccgagaaacttggtatccctcgggatgcggacagtttcaccaagagtgatttgaagaagatgcttgcagagccctttggtccatttcgacaagaatcaggagttccaattaagtcatttcgattgctgcgaacgatgaacggacctgttgtaatgtcccgacgcgaattcgactacgaaatgatgcaatggacccagctggactcaaagaacaagccaacgtcgccccgtgcccatctcagcggcaacaatcatcatctagaaattcgccgaaatctgcgtggaaaatgggttggcaccgtggtttccatgtacgaagcagcgcaccgagcgaagaaactgggcgtcgatccagttgatcgcagctgcgatgatgatcggggcacctacgtaatgtcgttggcaattggcgagacggtgtacatgagagacaaggagacggatcaaccgggatattttgttgtaacgaaactcgattccgaatcgaatcgcgtatttttgtgtgcacactgggatgcacgccgatcagtaggtgagaagaatgaaagcggattggttactgaaggcacaaaacgccgtacgcttccctatccaccgtcaaagatgcaatctcttgcccctccgggatacgacactccagtaaaaatatcggtgtcaccgatcgggcagattaccgttgttgaaccacacgagccgagaaccgttgacctcgatgagctcgatgcagaggtggtcgcaatcgcccgcgaagccattgctgcaagaaaatctcgcaacgcagagaaaaggagagggcgtcgctgttacggatcctggacatggatgagagagcgtctgcggaaatgcaagaaggaacatctcgccgccgacctttcggctgtcatgcgggcaatggcatcgggagaataagagttcagcatcttcgcgatttgggacaccggtttcataagtaatttgtaggcatcgatcgcaaagtaaaaacatttatatcgacagccagtgcaagtccgcgctagttgaactattctaggcgtctgagtattcacccagggacggcatgtatcaccgttcctaaaggtgtcgacgtgctaaaacgcaccattgaaatcagctctcagccaacgcatctgtcgatgcgtcacgggcaagtcacactctcacgcgacggcgaactgattggcagtgtgccatgcgaggacgttggtacggtcgtcgtggatcatccgcaaacgacatacacgcacgcggtcctgcgagacattgtggtgcaaggtggcagtgtcgttatctgcggtcacgatcaccaacccgctggcgttttaatcccattaggaagccactgccaaatcgtgcaacgcacccgagaacagatcgaagcgacactgccaactaagaaacgcatttggcagcaactgatccgcggaaagattctggaagcgtccaaggtgctcgacaaatcagatgccggaaagaggttgcgagtcttagtcaatcaggttcgttcgggagatcctacgaacgttgaagcgagagcagcgaagctattctggcaggcgtggcttcccaaggaatttgcatttcgacgcgaccatgacggcgacgaattcaatgggttgctcaactatggttatgcaattgtccgcgcactaatttcgcgtgcgatcgtctccgctggctacactcctgcaatcggcatccatcaccaccatcgtggcaatccattctgtttgtccgatgacttgatcgagccgctacgaccactcatcgacggttgcgtccgaaacctgttcttggctggtcatcgtgagatcgatcgggaatcgaaaacacaattacttggtttactcgactcaacgaccgaatttgatggtgagcacggcccgctgaacgttgtggtgcaccgctacgtgaaccagtttggcgcatgtttgagaggtgaaacgaaaacgttggattacccaaaaagggcatcgtcgtggaactgagtggatatcgaagcatgtggacgattgtcatgtttgacctaccggtcgacacgccaaaagcacgaaaagcctacgcgtcgttccgcaaggaactactacgtgacggctttttcaagttgcagtacagtgtctacgctcgcccatcgccgagcaaagagattgcgaatgtgcatattgctagaatcgaacgctggttacccaacgccggcgaagtccgcattttcgaaatgacagacaagcagttcgaagcaatgaagattttttggggccaaaaacgtcagccacccgaatcgacacctcaacaacttgaatttttctaaacccgaaaaatccgtaaatcgttttacaaaaaggtgttacagaagaggtagtgtatctgacctcagcctgcgaccaatccgcaactgtagccctgcgcggctgggctttgtcatgagtgtatctgacctcagcctgcgaccaatccgcaaccctacgacaataatcaattgattggttacaagtgtatctgacctcagcctgcgaccaatccgcaactgaattgggcgaaatcggaaagaagaattcagtgtatctgacctcagcctgcgaccaatccgcaacgggtgccgccgccggtaccacgctgaaggaagtgtatctgacctcagcctgcgaccaatccgcaacttagacagcgtgatcgtcggcacatactggagtgtatctgacctcagcctgcgaccaatccgcaactctgcacactcaacgaatccggaacgctcaagtgtatctgacctcagcctgcgaccaatccgcaacagagcgatctacccgaatatcgttccaacgagtgtatctgacctcagcctgcgaccaatccgcaaccaatggactactcgacacgactgaccgggtagtgtatctgacctcagcctgcgaccaatccgcaacgctgcggggattcggcatgcgatcatcaccagtgtatctgacctcagcctgcgaccaatccgcaacttcacgccccgtataaagattccctcgacgagtgtatctgacctcagcctgcgaccaatccgcaaccaagatcatgggtgcctaccatcgcgagcaagtgtatctgacctcagcctgcgaccaatccgcaacacgaagacgcatttagaaaacgcttcaccgagtgtatctgacctcagcctgcgaccaatccgcaacagaatttgaagctctgggtgtcgatctcaaagtgtatctgacctcagcctgcgaccaatccgcaacgcatgctcgcatcgcagcgggacggccgaagtgtatctgacctcagcctgcgaccaatccgcaaccgattccaacgacatcatggtgcgactcgagtgtatctgacctcagcctgcgaccaatccgcaacggatcgacctccgaccagtccgtggctggtagtgtatctgacctcagcctgcgaccaatccgcaaccgatccattgcataagctacatgaagcaatagtgtatctgacctcagcctgcgaccaatccgcaaccgactctgttcgctgtcgctcgcatcaccggagtgtatctgacctcagcctgcgaccaatccgcaacgagtacccgccccacgttccgccccatccaagtgtatctgacctcagcctgcgaccaagcagcattactacggatcgataacgatcacccgcctttcgaattcgtccaggttgaagcaatacccaggagctaccgccaaatagagagcggctctttaaaaaattagatgactcccgttttgaacgcgataacgggacgcccccttccactacccaagcaacgcagtgccattctgttcagaagttcgttaacgtgcccgccgtagcgtcgaaaacatttctgcacaccgaggtgcagaatgaaacaacaacgtttagatagagcccctgtgatgcggcggaagattcaaacttgcattgatcgtgaacgtgactttggtgttgagaaattgtctcttcttgaccaccgatcgtagcggtgtgaacttcagcggaaacgacgtcttcgtacgtgtttccgggcacgaagaggcggaactgatcggccacctacgttgatcttccatctacatccaccagattcgacgagtcagatttgcttgggggaaagaactcgctcgattgctacggcaatgacgaggacacttcgctgggcgccgaccgagatgaaggagactcgcccaattgcgtcgcgttaaaccggtatcggcagcagctccaaagcgccgctcaatattcgcaacgaaagcgaccacgctccatcctgagtcgcggcgggcaatcatccgtgtacgcgggctcggttgagcatgctgatgcataaacgctcaagttacgccgtggttgatgcatttattccacacaattcgattcccgctgattgattcgccgctgacgaccgcaaatctacagtccttgtcgctcacagcgtcttatattcgtttgatcgattaccgagctttctaggcggaaacggctcatttgatctgtcaaataataaaacagaaatttctatgcccctagaaaagttaaagagatgtccgcgtcgatttccaccgcttccgtattatgtccttcgaatgaaaaaacctcgcagcctgacttagctgacgactcgcaatccaacagcaacgaaaagttaacgacgttaatccaagacctggcccgagccgtcggagttgctatcgatgagatcgatacgatcaacgcccgtaccaaactgctgtcgctgaacgcccggatcgaagcatcacgggcaggagcacatggtgctgcattcggggtcgtcgctcaagaaatccaaacgctctcgcaaaagaccggagcagtcgccgaggagatggcgagcatcacaaaatccagagtggatcaattgatgcggatcatcgaaaccagcattcgaggtgtacgcctctctgacctcgcccttaactgcgtcgacctcattgatcgaaacctatatgagcggacatgtgacgtccggtggtgggcaaccgacaacagcgttgtcgacgcattgtctgagccaacaaaacaaagtcttgagtacgcgtcccagcgactcggcgtcattctcgatgcgtataccgtttatttcgacctcgtaatttgcaatcgaaatgggattgtctccgcaaacgggcgcaaatcccaatttgattccattggctgcaatgtttccgcgtccgattggtactcgcaagcgataagccattccacgggcaacgaattcggattcgaatcagcccacgcatccgaactggttgctcagcaacattcgttggtctattcgtgttcggtacgggaacagggtatggcaacgatgccgacagtgggagtactcggtgcaatcttcaactgggacggccttgcgaaacctgttctcgatgacttgccgatcgctgaaaacgaacaaagcaagacgatcgcgtacatcctcgatacggatggcaatgcgttggcttgccgatcaggaacggacccattgcacggaacacttcctcggtgggaaacaatcagatcagggggcaaaggcttctttatcgatcagtatcgcggtcgaacgtattgcatcggatacgccaaggcgcccggttttgaaacctactcgaccgactggatcgccgttgtcatgcaggaaatgtaacgcaccgcacctggatagcgagcagaggcattgaccagacgccccgaccagacgtctcgaacagaaacgccagacaggaatgacacgagccactcgctcgtcaagcgcgtgcgacgtctgcgctgcgctgaagcatcagattcgatttggcatgcctgattgaagagcaagttcaccccgccccccttcatgcggtcagcaaccgagcgagatccggtacccaagcggcggtagaacctttcgcggcggacgtccattggttagcagatccatcgcccccgctgcctaacctggagtcgcgtctcagcctatacgggcatcttgatcgcagaccgttcccaattcaaaatttgtccgatcgttgacctgccattcaacgagtcagcctccaatttgaagaccactcgttggatcattatagcaatggtgaagccgcgttagcgggcggcactcatgtagaagctgaacattcgctcgtcgtcgaattcggacttcatgactgggaatgcaaagtcgaacgcgagcggggctggccccagcattggaattgcgacgcggaatccgaaacctggggcgacgcggaagttctcttcgctgatttcgatatcctcctccacggtaccgaagtcgacaaacgcgactccacgaaatgcatcgtcagcagttaacgggaacatgtactcgaccgagttgagccactggaatcgtccgccaacttcgatcaaccctgccgctgttggcacgaccggagacgcaccccggaaatcgaaaccgcgaatcgtggcataaccaccggcgaagaagttttcaaagagaggcgtgtcttcgccgctgattcctacttgagtcccaaacgacagcgtctgctttccagatccgtcagcacgttctctcatcaaccaatatttacgatactcgccttcgaagcgaccataatcaaaatcaccgaacgcttgctcataactggctttgatgtaatgcccctcgctgggttgcaacgggctgtttcgcgtgtcgtggatcaacgaaaacacaccactgtaaagcgtgttgtcgcctagcacttcggcgatctgtggcagcgacgggtcggcagcttccgaaatctccacgttctgtccggtgatcccggccgaaaccgaaaggtcaggcgtgatacgatatccgaatgacaatcgaccacctaaacgaccttcgtcccaatcgtcgaaccgacggtcgtagtagaatccactgaccgacatgctgatcggcaaatagccgagcaagttcgggtcagcgaactgggccgtgtatcgctggaactgactccctggaacagcttcgagacggaacgtttgccccgcaccacgaaacgccgtaccgctgaacagatcctggaatgacgtcggccaacgcgagatatcaaagttacgctcgtcgatcgtcacttggcccgtcacaccggcatcactgttgacggcaccgccgaacatgacgcgaccggttcgtgccggatagccttggatgatcaagtccgcctcacgcacttccgggcccatcaccattggcgggtacggagcaacgggagggtaattcacgggaggatcagaatacgttgggttgaacgccggcggttgcgagtaaacatcgccaccatacgtattgggtgtcgcttgtggtgcaggcgcggtgttgtaaccgggaccggcaaaactaggcggtgtcgttgacggcgctccgtacgtggacccgccgtactgtggcgcgggctgcggtactgaatacgccgatggcggttgctgagcgaacgcgtctaccggtgcaaacaaagtcgtcgcactgagatgaacaacggtgagcagagcgacggcacgtttcacggtaatattcttctttgggaatttcatgacgtcgatcatcgcaaagcatcctccttcggcacaactttaatatcgggtgcttcggcgatagccgggttagtttctagcaattggctacgttcaatccgacgccggctcaattccaacgtgcgccggtcgatccagtcaccttctctcatgtccaccaaattcaacatggtggtttcacgcatcaggtgcggctcgccgtcgatgttgaccaaaatccgaccgactttccatcgatcgccttcgataatttcgtaaacgatgtcagcgacaccgttctcgtcacgcatgatggttttgggtttgacctctgcgtagataaaaccgagctctccgtacccgtagacgatttcgccgacgtcacgacgcatgatcgttccgtcaaacatgtcgccgacgtggagttcgagccgggcccgcagcgattcttcggtaataaattcgttacccacaatctgaacgtcaccgacggtaaagcgtgggccttccttgaccacaaagacaaccgtcacccacttgcccgattcgtcatattcgaatctccgcccaacggtcgcggtcaagaaaccgagcgtgtgatagtaggacgagagcaaattaacgtcttcgtcgatcatcttcatattggctttattgcccatgtagctgagcacacccgccatcgggcctcggctacgaatgatcttcttcagccgagcttccgtaacgatcgtgctgccttcaatttgaatgtccgcgattcgctcgagcggaccttcattgatgcgatagatcaccgtgcccggtggcaagtcagtcgcagaaacgcctgcggcggcaccaccctcggctcccgtgatcgttgccgacactgcggcttggttgaacccctcttcttgatagtagtcgagcaaacgccgacgccccgactcgaccgaaaattcgctcagaggatcacctgcggcgacacctgctcggccggaaagctctcggtcgttgagggcacgattaccatggaacaccaccctgccaaccatggggcgttcgtgaacgtagaacgtgaccaccacactgggcgttagctcggcgttgggattcgaaggctgaacgtcatcatcgatcgtcgagttcggcccaacgggctgcacttcaaaagtgacctgatcgaatgaccctagatcgttcaaacgccgaacgtccgccagcaccgtttcgctgtcgtagaaccgccccttgcgggtctgcaattccgaaaagatatccgcggcggataccgtacggtttccaatgatgcgaaccgacgcgacgacggcatcaccgcgttcgcgacggaacgtcatgcccgctcgtgcgtgaatgtgatcgcgaaactttgtctttacttctgcctcgggagcctgagcaccgccacctcccataccaccgccgcccattcctccacccatttgggcgaaagcaaccgacgacagcaagcaaatcaggacaggcaataatcgtgcaaatatcacggcgacacgagacaccgtcgtgcagggacggtgcgtcgataccgaacgcgttatcggcgtgtggctcgtcattggcggtgacggcggaaaggcaacgggaaaaggcatcgccgagcggttccttgtgagtggtggacgcggagcgcgaaggcaacttttctggttttgcgaccgatgagaaacctttgcgtgtcgtacctaccaatgccgagcacgtcaccacaagagtgaaatggcagcaaattgaccaacccagcccgccagccaagatatcaacaaaattgccacacaaatttcgtggcattatcgctcgcacctcagcctgagagtccctctaaacccccgtatcgtaacgggttacgccatgcgtcgtgattcctcgggtgacacccgaattcccctccgcctaaacccctaccaccgtcacaaaatcagctgcaaaattcgccccgaatcgggccccagccgcccgactttgcgccagcattttcatgaaccaaggccggcgagcggctacgcggccgctcgatagcgaacgcccgttttgtctcgcgatgtcgactcaatcgccccagcgtgccgcattacgtacgcgatccgctgagcgatccaacgggcacagccgatcgcgccggcgaggtcgagcgtattgaactcaacgtcgactaaatgcgaggggatcaacgcagcggaatccgacgcggtggcttcctgcggatccgccaataatcgccatagatcgacggcttctcgcagttcgatcgaatcatgcacctgtgtcaactcggtgtcttcgacgatgtagcccggatcgcgtcggcgacgacgctttttcttggtgaccaatcgatattggttcacgtccacgattgggatttccaaggttaagcgtggatggggaaatatgtcgcgcagatagattaactcctcaaacatttcatgaggatgtccgcgtttgggactcaatcgccgcgaaacaggctcgccacccttgcgttcgcgtttacagatccgggtgcgcgcgaccgacggtttgacgatccgaacgtcatgacgcttcagaagatcacagaccttgcgacgaatcgctgacaacgacgcgcactgaatctcgatcaattcttcgccgcgaaccacatcaatccgatacgcacccatcgccacctcgatttgatcgggtgttgcggcgtaatgcgatttcagttgctggtgaagcgaggtttccaatggggtatccggttaccgacgtgctggcattggagcggtgataccagattgcacgaaaaaaccccagagctttctctcgaaaacactggggttcattttctaccgccagacgcgtcccggacaggtcggctggcgatggctttgtcgagcggtctggatcagagaccacattcacgacaaagctgttttagtcagcggggccggttacccgaccccgccacacaagacttccttagaagttgaagtcagcaccaacgtaggcaccgtgcaacaacaggctcgagtcggcgtgcagggcactggccgatgcggacgaactgtagtcacgcgagtagttgtcggccatagccaaaccggtcacgcccatcacgcgatagccaccacgaaccgacagtccgtcgatgacgcgaacgccgaggccgaggtcgaactcgccgagggtcgagagcacggtctctttggtgtgataatcgatatccaaaccaggcatcgcaccgagctgagccacgttctcttgggttcccaagcgatgacggaattcagcttggttgccgtacagaccgaacttgccgcccacgttcaggttcacgcggctggccaagcagtacgtcaggcgactgccgaattgataacccaacaggtcg

SEQ ID NO: 3391 - DNA, 24332 bp, synthetic construct
  misc_feature 1..24332: note = Synthetic
  source 1..24332: mol_type = other DNA
ttttcgatgattttttatcggccggaagcaccttgatggatacctgcttggtcttataatctcggtcgttggcacggatggaggccggaccgatctgaaaggtgccgaccgatttgggcatcagggtatatgtataagtgatacttcgagacaaagtggtcttgccgttggaaatggaactgaatgagcttgtagcagtggccgggccaaaaaggacttcaaagtcgctcatggcaggagctttgaattccgttccattagcatctttgagggtaaaactcactctgaattgttctcccatcgccacactcgcaggagcttgtacagtgaaagaaacctgcgcatgggtacaccaagcgaggcataggaaaagggttgtaagaatatatcgcacctttgtcatcgtacagtacagtcagtgattattgagatctgttttgtttcttaacaccggcattaaaaattatccgaagcgttcttccgttgagtcattgcttttatgaagaggatgctaaagtacacattactttctggagctgtgcggagataacaagattgaaacagctaatcgcaaagaagcggactaccactgcttggtggaattacctttttgctgcttcatgcgctgcttacgcatctgctcaactttttcgcgcgttttctcctcgtcctgttcgtaggctttcaatatcttttcagcactttcacgactcatttcattctgtcgtggctgttgatctttttgtgtattgtcctgtttggacggttggggctgctgctgtccgccctggttattgttattcggattgttttgcggttgttttttgtcgtgattattctccttattctgatcctgattgtctcctcctccttgctgttgctgtttctgaagcaacttcatggccaaagccagattgtagcgagtctcttcatcggtcgggttgattcggagcgaatgcttataggcctccacactctgccgatagtctttctttttcataaaggagttgccgagattgtgcatcagttcggctctacgcttaggtgtcaatgtcgggtcttgtacaagagcagcatagttttggagagcttcatcggtgcggccttgtgcatactgtgtaccggccaaaccgaatcgtgcctcggtgaaagtactgtccttggagagagctttgcgatatgcgacctcggcattggcatattgatggcgtcgatatacttgtcgagcccgacgtacttcttctcgcatattctgtgccaaaaggctcgatgaagcaagaagcatgaagaaggttatgaaggtggcatatcgccatgaatttctcatctgtcaaacaatttgatcctactgaagaacctactcttccgctcctgaatcaggaattccaacaataaacatatcaaagccgcaagtccgaaccatccgtacacttcgcgatagccggaagaagacgaagatgaaagtacggctttggggagtttgtccagctggctctctatagcccgaaccagcgcagaagcactctgtccggaaaagaaagtaccctctcctgctgaagcaatgtcacggcacatcttttcgtcgaatttggtaacgacaggattgcccgtttcatctttgaggtatccttcttcaataggtataggtgcccccaaggctgttccgagaccaataacattgacccgtatgcctgcttcatgggcttgctgtgccgcttcgatggcatttccttcatgattttctccatccgtcaggacaatgatagtcttaccgatttccttattatcggaaaaagatttggaggcaagttcgatagccgctccgatagccgttccttgggctgtaaccatattgggacttatatctgcaagaaactgtttggctgcagacaaatccgtagtaatcggtatttgcgtataagcattacctgcgaatacaaccaatccaaccttgtcgttctgcaagccgtcaaagagctttcccaacacttgcttggcaaaactcaaacgattgggcttgacatcttcacagagcatggagttggaaatatccaaacaaatcatagcctcgatacctttctcctctttaggcacatccacacgaatacttatttgcggacgggcaagcatcccgatcaagaaaacgatggcaagaagaagaaatccgttgcgccagatccgacgtttggtacttgcttccggtttgagagcctttagcagcggaagttcggcaaaccgtctttcttgcgcccgtcttttgcgataagcatagaagcctacccccacaagcaatgggagcagcagcagtaagtataagtattcgggtgaataaaatctgaacatgggaatctttttacgggttggaacgaagaagtgtattgcgaagcaaaaactctgtcagcaacaagagaaaagcaataagggcatagacaaagtatttttcctcataagccttgaagctcttggtcataagtctcgtcttctccaatttgtcgatttccttgtagatttcattcagcgtttcattatcgacagccctgaagtattttccacccgatacctcggcaattccgtccaatgtgggttcgtctatatcgacaggcacattctgaatccgaactccgaattccgtctgaatggggaaaggagcttctcctcgtgtgcctacaccgactgtgtacacacgaataccgaacgttctggcaatatcggctgccattcggggtgtgatgtcgcccatgttgtttgatccgtccgtcagcagaataaccacgcggctcttggctttgctgtccttcagtcgattgacggccgtagccaatcccattccgatagctgtaccatcatccagaacacccatctgcaagtcctgtaccatattaagcaatatggtatggtcggtagtcaatggacattgagtaaagctctctccggcgaatgtaaccatcccgatattgtcgttcggacgattgttgataaaggaaatcgctacatctttggctgcctccaagcgattcggcttgaagtccatggcctgcatactgcctgacacatccatggccaacataatatctatgccctcgatcgaatctttctgccagctattggtattctgcggacgagccaaagcaataatgagaaaaccgaccgaaagagctctcaatatcggcaacgaatggcgcagatagaccctcaaacctcggcgacctccttcaaagggcttcaatgaagatatggtcatcgttgccgaagtcttacgtgcttgcaggatataccaagtcgctatcaaaggcagcaggatcagcagccaaagcaattcaggatatgcaaatgtcatgactcccggatattatgcacctcatcgagaaaggcgcgagcatctcgaatagcttccacatcctctccatgtatcggtttatacttggcaaacttggccaggtcggccgtttgcaatattccatgcagcaggcgacttcctttttcaggaagttcgatccgctgaagagcttgtaatatctcgctgctggtcatctccctggcatctatttcgcgagtttcggcaatatagctccgaagcaaatcggtcaattccgtaaagtattccttatacaaaccggcttccaccagtttttttgcacgtaatgattccaaggctgcaatagctcggtcataagccggaatagccggggcctcaggtgtcaccacaggacggcgagcttggttctccttgtatctcttataaaagaggtatgacaatacagccaaaaaggtggcaagtatggtccacgtaaggggatggcgaagcatgatattgaatatatcgctccatgtataagacactccccacggttccttgatgtcataaatagaatccggtttggaaagatcgatctccggcatcgttactttgaggaaaagactcttggacatgaccttatcctgtccatccgtaacgataaaaggagggatctccagcagggttgaatcgaacgaggtaatcaccatcttagcctttatctccacgatcggatctttcacaacaaccgtatccgtaatgccaaaagccaaaatttcgatccgactcatcgtcgaatcagtaggtatttgcagatgagtatgcgtcaaatctgccgtgcggatagtaatatctatgactgcctgctctcctatttgcatctctgcacggtcgagtttgcctatgatagaaagctcttgcgccttcagaaaggaagagacaaagagcatgcaaaatgcagaaagaacaaagcgaatggcaagagagtgtctcatgagcgttttttaaataagataagaagctgctgcacaaaatcctgccccgtacgtatctcagtagtatctacaccacatcgtttgagcaaaacggcaagtgctacttgccgtcgctcataggcatccgcatacgctttccgaacggagctatcagctgtatccacccaatgagtctgccctgtctctgcatcgcgaaagcgcatcaaccctacatttggcagatcggcctctcgccgatcgaatatcctgatggctacaatatcatgcttacgagcagacatcagcaaggtcttttcataagaatcttcctctgactggaaatcggaaatcaggaatgctgtacaccgcttcttcaccaagcgagtcaggtaagagagcggaactgaaagatccgtggccctgctctgcggacgaaactccaacagctccctgattatatataggatatgcttcttccccttggcgggcggcacatacttttcgatcctgtccgtaaagaaaaggactccgatcttgtcattattttggatagcggaaaaggccaatgtagcagctacttcagccgtcaactctcgcttggtctccacctctgtaccgaaagacaacgaaccggacatatcgaccatcaacataactgtcagctcacgctcctcttcgaagactttcacatagggacgtgcataacgtgccgtcacattccagtcgatgtcgcgcacatcatctcctacagtatactcgcgcacttcgctgaacgccatacctcgtcctctgaatgcggaatgatactgtccggcaaagatttgtcgagaaagacctcgcgctttgatttcgatccgtcgaactttcttaagtaggtcgcttgtctgcacttatctctgattaagggacttctactttgttcaggatttcattgacgacagcatccggagtcaaactattagcctctgcctcatagctgagtccgatacggtgacgcatcacgtcatgacacacggcacgtacatcctcaggaatcacataacctctatgcttgatgaaagcgtatgcacgtgaagccaatgctaaattgatagaagctcggggcgaagctccgaaactgatcatatctttcagagcattcaagccgaattgttcgggatagcgcgtggcaaaaacaatatcaactatatattgctcgatcttctcatccagatacacctgccttatcacttggcgcgcttccagtatttcctccgtagtgattatcggacgaatctctgccgaccggccaccgatattctgacgaatgatctgcatctcctccttcttttggggatagtctatcagcaccttcatcatgaatcggtctacctgtgcctctggcaactgataagtaccctcttgctcgataggattctgggtagccattacgaggaaaggctcagggagcttgaaagtcgtttccccaatggtaacctgtctctcctgcatcgcttcgagcagagcactctgcactttggcaggagcacggttgatctcatcagccaaaataaagtttgcgaaaatagggccttgctttacttgaaattcctcccgtttctggctgtacatcatggtacctaccacgtcagctggcaagaggtccggtgtaaattgtatgcggttgtacttggcactaatcagtccggccagagttttgatagccaaagtcttggctaatcccgggactccttcgagtaggatatgtccatcggccaacagtccgatcagaagcgactccaccaaatggttctgtccgacgatattctgcgccataccgtgcgtgatgagattcacaaatgagcttttctgctcaataagctctgtgagagccttgatgtcaatggtttcactcatttttttctatatcttttcttgctaaatactaatgaagattatgcacaccatctcatgttgagatagacatatagcatcctgcagggtttaagcgcgaagttcagccaacggccagcattcgctcgatcgagagcaaagccttctccctgatttcagcaggcacctttacttcataacggttgtggcggagagcttccaagacctcccacaaacctgtttgtttcatatgaaaacagcggttgtcgggttgaatggcaataaacgttttacccggattttctttccgcaacacgtgtagcgtctccggctctgtcgcaataacaaacatttttttgtcggactcccgagcatgattaagaataccggccgtggaatacataaagcagcgatcgctactcagcactcgtggcgaatgagagccctcgctctccggatgaatgagaatatcagcatcgggatacagctccatagcctctaagatggattcttccgtaatccgctcatgtacgaaacacgaagcattccaaagttccatctcccgtcctgtctttcgcgagatataagctccaaggtttctatccgggccaaagagaatttttctgtctcgaggcaagctctccactaccttgagtgcattgctgcttgtacagcagtagtccgtccaagcctttacctcggcagtcgtattgacatagctaacgatgagtccatccgggttctgctccttccaccgacgcaagccttcagcagaggcaccttcggccaaagaacaaccggcgtatttcgtgggagtgaggatagtcttctgcggcgaaataatcgaagccgtttcggccatgaagtggactccgcaaaagagtatcgtatccgcctccgtatcggcagcctgacgggacagaccaagagaatcgccgatataatcggcaatgtcctgcacctcagggcgtgcatagtagtgcgccaaaataatggcattccgttctttcttgagaagttctatctccttaagaatatcctttgtttgcatacaaaaaccaacttaaagcttactgagtaaggaggaaattcatgctgatgtccatggccgtaacgctatgagtcaaagcgcctacgctgatgtaatcaacacccgtttctgccacactttgcagccgttcgagtgtcatattgccgctggcttctgtcctggcccgaccggcaatcagcctcaccgcttcgcacatggtatcgttgtccatattgtccagcatgattatgtctgcaccatagcgtactgcttcttcgacctcagccaaattggacgtttccacttccagcttgatcgagagagggagtgctcttctcgccgcttcgatggcttggggtatccctccggctaccttgatgtgattgtccttgagcataatcatatcatagagtcccatgcgatgattatgtccaccgccatggcgaacggccatcttgtccgttattcgcataccgggtgccgtcttacgggtatccaaaagtcttacagccgtacctttcaaagcctcggcatagcgagcggtcatagtggcaataccactcattctttgcaaaaaattaagtgccaatcgttcggcttgcaacaaagcccggtaactgccttccacacgcaggattacttgaccgcgttttacggagtcgccatccgatacatagggagtccaagtcacggcttcgaatcgttcgaagacacggcgagctacctccatgccggatatgatgccatcagccttcattaccattgtggctgcagctccttccgattgggggataatggcattggaagaaatgtctccatcggcaatgtcctctgcaattgccagatcgatcaatttttccaaaagcatttcttcatgagtcataacttaaaagtgatgagggtattacggatgtttatttggtatttcccgctccgccggcaagggtgtaagaggagtgcttgcgataggcttcgctcgtatcgggatagtcttcccgataatgccctcctctactttctcggcgagctatcgccccccgaacgatgagctgacccactgtcagcagctgctcggcaaaacaagcataaagatcttctgttccgagtagtgtccgccgaagttcttctatcttccgatccacggacagaagaccttcttcgttacgaatgataccgacataatcggtcatcagacgggacaactgctcttttaccttatgatagagcgatgcatctttcggcttaggatagccaaccacgctcaatggcattgtcggatagtcaatcgaatccgaggcaatcgtatcagccacaacacgatgaccgaacacgaggcattcgatcagagaattggaggccaacctgtttgcccccattattccggtagaagccacctctcccacagcatatagatgaggtacggccgtacagccattcagatccgtactaatccctcccactgtgtagtgtgcagccggagccacaggaatacggtctgtcagatccaaacccaactctgcacagcgagcacatatcgtgggaaaacgtttgcgaatgtgatccggatccagatgtcgcaaatcgagatagacatattcgtctcccaaacgtcgcatctctaagaagatccgccgtgccaccacatcgcgaggagccaattcgcccaattcgtgaacgccttgcatgaagcgttcgcctctactattatatagatgcgccccttctccccgtacggcctcactgatcaggaaggcttctcctttcggattgtacagagctgtgggatgaaattggacaaactccatgtcgcgcacctcacagccggcatgatagcagagggcaatcccatctccgagggtaccctgcggattggtagatcttcggtagatggcagccgatcccccggtggccatcaccgtatgcttgccatagaaaacgacttcacgcccatgtccccaatcccatgtacgtacgccacggcaaccgaggtcgtctatcagcaattcgaccgcttggtgattgacaaatatctctattgcagaagtttgcagcacgctatcgatcataaagctcgtgagcatcctaccggtagaatcaccccctgcatgcagaatccgcttgtggtggtgtccgccttcaagccccagagccaataggccatcagcttccgtatcgaaacgcatcccccaacggatcaactcatcgatccgctccggagcctcttcggcaagtacccttacggcttcatcctcacaaaggccccgacctgcttcgaccgtatcgttatagtggttgtccggtgcatcgtcagcagcagtaaccgctgcgactcccccttgtgcaaagtacgaattgctctcatggatgtcagctttggttatcagagctacccgaccatgcttcgaagccttgaaagccgtatagaggccggcaaggccgcctccgactacgatataatcaaaccgattcattccggacaaattgatatgcccgcaaagataaagcaaataaaaggttatccgaaggcagggagagatggagggtaagctaaaggtctaaaggcggattaacacgattacgaataaaagaagaagctccccgaattattttcgggaagcctgttcttaatgttttcacaacggaataaaatccttgttgggaaatgcttcaaatttagttatgcaaacttagtacaaataattgactcggcaaaatatgatccacaccatagttttatttatttttgtgtgaaaaaacttttttcatggatttttattccaacattacaaaggcaacattaaaaggattatagtaaacacctatatcacaatgaaaaaaatacttggattagacctcgggacggcgtctatcggatcggcttacgtattagaagcagaaaaatctgcggaccaaacgaaaatagtctatctgggcacacgaattatcctttcatcggcagatgctgaaaatttcagcaaaggattatcttgctcaccgacaacagaccgcacattcaaacgctccatgcgccgaagacttcaacggtataaacagcgccgttcaagtctgatacagcaattcaaaaaaatcggaataataacaaataccgaacagataatccgggagcctatctccgagactcacgagcttctcagaatacgttccaaagcggtatcggagcatgtctcacttgaagagtttgcccgtattcttttgacgattaataaacgcagagggtacaaaagcaatagaaaaacaagtaaaagtacagaagaagatggcaagcttgtcgatgctatggctgtaactaaagagcttataaaactcaagaagactcccggacagtacatgttcgaacgatttaagcggggcaaatatgctgagatagacttttatcctttcgatcttatcaatgagttaaagcaaatctgggaagtacaaggacaaaaatatccggatgtccttacagaaggcctactaagctcattgttaaagcaaaagacgggaaaggcaaaagaactcatatactccaaatcagaccttaatccggctgaagtaccaatcgattatcagaaagggaaaaagctacgtaaaaccattctcaacaaatattttgcatacgaaagccgaagccttgctgtcacaaatatcattcctgtagagcaagcaataaccgcgatagtagccatctgcaaacaaatcaacaatagcagtgggtatttaggagctattggggatcgtagtcgggtattgtatgcgaataaccagactattggtcagtatttatatgaaagaataaaagctaacccgcatgataggatcaggggagaagttttttatcggcaagactatcttgacgaatttgaccgtatttgggaatgccaacaaaactattatccggcaatattgaccaacgatcgcaaacaatatatacgcaatcgaatcattttttatcaaaggccgctcaaatcgaaaaagtcggaattggcattttgtgaattcgaatcacgggaagtagaacacaatggtaagaaatatactgaaggcttgcatgtcgcaccgaagtcttctcctgttttccagcacttcagattatggcaaagattgggacagatagaagtctcccctcttagaaaatgggacaaacagagtaacgagttatttgaacaacaaaataatgcagaccgagagggaatacttaacacagaagctaaacaaaaattgttcagctacctgaatcttctggatcaccttacagataatgaaatcctgaatatcctcggctatagtccggataagtggaaaatcaatttccgtgagatcatcggtaataggacgaataatttgatgatgaaagctttcttcagcatgaaagaaatgactgatggagaacaaatcgattgggaaaaaaatctgacaaagatcaccaatggacagagcttgatatctccggagcaaatcgtagaccttatccgccaattctttgaacgtgaaggaataacgacttcacttttatatttcgaccccgcaactgataacttccgtgagcaatcccactatagtttatggcatttactctactcttatgaagacgacaattctccgacaggaaccacatctctttgtaagactttagctaagcgctatggtattcctcatgagttatgtccacttttagcgtctttgacctttgagcgacagtatggatctctcagcaccaaagctatgcgcaagctacttcctttcatgcaagaaaaaagatatgacgaagcttgcgaattggctggctataggcatagtgcatggataacgaaggaagagaacgctaaacgtacgctgaaaaacaaactacccctccttcgcaagggctctcttcgcaatcctgtcgtggagaagatcctcaaccaaatgacgcacgtcatcaatacacatattgctgaatacggcaatccggatgaaattcgcattgaaatggctcgcgacatgcaagccaatagcaaacagagaaaagcgatgactgctgccatcactgaggcaaccaaaaggaatacacaatttattgaagaaatacagaaggaatttgggttcaatccttctaaaaatgacctgatcaagtacaagctatggaaagagttagcaccattgggaaataagactctctactcgaacatatatatccccaaagaggaactctttactgccaaattcgaaatagagcacattatcccgagagcattattctatgacgacagtttctccaacaagacgttggagttgaactctgttaataaactgaaagggaataaaacagctctggattatttagatacacttggacaagaaaaggccaatgactatattcttcgggtagaagaattaaaaaagatcggagccatcacacaagccaagtataaaaaactccttatacgagaaaaggatttgggggatgattttaccaatagagatcttactaatactcgttacatcatccgacatgctgccgatagagatcttactaatactcgttacatcatccgacatgctgccgacatgcttctgcaggttacaccttcgattgtacacaccaatggcagtatcactgccatacttcgtagagactgggggttgctcgatattttgaaagagctgaatctgccgacatacgagtctattgatcgcaagatttctgatccggaagaaaaactgactcaaagtgtcgatcgaaaagacggtcaagccattaaaatgatcaaagattggagcaaacgcgatgaccatcgacatcatgctatggatgccctcatcacggcattgaccaccagaaagcatgtacagtatctaaacgggaatagtggtgcagaagagactgataaagctcaaaagcttgaacaattaaaagccctcagaaaacaattaattggatcggacggtcatttcatccctcccatgcatgatatccgagtacaggccaaagaggccctatcacgggtaattatctccacaaaagtcaaaggaaaagttacgactcctaatactaatattatctgcagtcgagacaaaacaacagggcgtaaaatttatgtcagacaaacgaccttaacccctcgtggagccttgcatttggatactaaatatggtatcaatcgctattaccaagagagagaggtttctatcggatcaaaactcacccaggaggaaatccgcttagtaagttctccacatattcaatcgatcttattggaaagattgcgggctttcgataataaccccaaatcagcctttaccggacgtaactccgttgataaaaagcctctggaagacaaaaataagaagctcgtatatactgacaaaaaagtgaaacaaacgattttagcaaatcgatttgtaaaaagagatcgggtcaatagcaaactggatctcgacaatgttattgatacagggataaaacgaatcttggaaaggagactgaaacaatacggagggaaatacgagacagcattctctgacttggagaataacccgatttggctgaatgaagaaaagggtattgcaatcaaatctgtccgtattaggggaaaaaataatactatcacaatccgccagaccaatacttgtcggattaaatacgtcgccaatgacaataaccaccatttggctgtatatgcactgcctgatggaagcataaaggacgatattgtgtccttcttcgatgcggtagaacgatctcgcaaaaggcttccaatcattgataagcataaaaatcaatcattaggatggaaataccttttcagtatcaaacagaatgaatactttctattacctcagcaagtagagaagatagatatcgataccggtgaaatatccatgcagacaaccttttcccctaaagatcttagccatgaatacattatgaatccggataattacgctgaactcgcatcccacatattcagggttcaatccatctctaaaacgcctcagggaaatagagatgtacggatatacttgttcaaacaacagtatatctccggtagtcaaaaggattcattacatctcaaagggataacccatcgtcaaattagctcagccaaagacttggcggaacttgttaagattcgcgttaatcatttggggcgaatcgtttctgtaggagaaaagtaaaagattttggtaatgatcaaacgaacgctttattttggctcaccggcctatctcagcttaaagctcgggcaactggaggtaagactaccggaagttgaacaaaccgacagtctgcctgagcatatcaaaaaagccggccgccaatcaatcccgatagaagacttgggcatcgttgtattagatcataaacagatcaccataacccaagccttattgtcagccctgatcaaaaacggctgcgctattattagttgcgatgactcccaccacccgacagggatgatgctgtcctttctcggccactcagaattaggcgaacgtgtacaagatcagataggagcctctctgccactaaagaagcaaatgtggcaacaaactattcgagctaagatcgctaaccaagcagtcgctctcagccaaaccaccaagcagtcccactccaatatgcatgcatggatagatctggtaaaatccggagatacagataatatagaggctcgcgcagctgcatactactgggctaatatttttccggaacttccttctttcaaaagagacagagagggtgattggaccaacaaactgctcaactacggatatgccatcgttagggcaatggctgcaagagcgattacagctgcaggactattaccttctgtcggaatttttcatcacaacaaatacaatcacttctgtttagcagatgacctcatggagccataccgtccctatgtggatattttggtttaccggttaattcaaaaagacataaaaaatccaccactctctttgtcctccgaagataaaagagaacttctgagtttacctgtgatagacaccatcatagatgacaaagcccatcccatgagcatcgccatgcaccatagtgctacatccctatatcaatgcttcgccggcaaagagcgaagaatactctatccccacatgtaatgagtcattacagatccagatattcagcctatagaagtatgtgggtaatggtattcttcgatctacctacggaaactgcagccgacaggaaacgtgcagcaatctttcggaaaaatctgattaaagatggtttcgagatgttccaattttctatctatatcagacactgtgcaagtagagagaatgcagaaacacattgccgacgggtccgttctgctattcctgaaaagggcaaaataggtttgatgacaatcacagacaaacaattttcagctatggagatcatttgtgggaaaggaagagagtattatcagccacccctccagcttgaacttttttaaatatattctatcatcttttgtggaattagtgcttttcgtctggggcatagaaattaaaaagccgagatttctctcggcttttcagttacgcacagttgtttttttcttactcacaatcaccctctatgtcctgtattacaggtgattacggggattctgctgtgcgttgcaacaaaaatactaaatctgaaagctattcccagtcggaggtatctatcgcttccatttcttcacgctgtgcgttgcaacaaaaatactaaatctgaaagctattcccagtaagccggcacgagccatctgtcgcagcgtcgctgtgcgttgcaacaaaaatactaaatctgaaagctattcccagtatcaagagataataaacagccgagatatatgctgtgcgttgcaacaaaaatactaaatctgaaagctattcccagtcgaccgttcttcgggtatattttctttccagctgtgcgttgcaacaaaaatactaaatctgaaagctattcccagtggaaaggtgagagtcggcaagttggtgaaggctgtgcgttgcaacaaaaatactaaatctgaaagctattcccagtaagggaagcgtatttcaaaaaggaggagggctgtgcgttgcaacaaaaatactaaatctgaaagctattcccagtagcatcagaatcgggaatcttgccaaaaacgctgtgcgttgcaacaaaaatactaaatctgaaagctattcccagttccactgagttcgtttcctgtgtcttggttgctgtgcgttgcaacaaaaatactaaatctgaaagctattcccagtgtagcggcgcggtactccattcgcgcgtttgctgtgcgttgcaacaaaaatactaaatctgaaagctattcccagttgcggcttgttctatgatagattgattgaggctgtgcgttgcaacaaaaatactaaatctgaaagctattcccagtttgcggacgctttcccatcgtctccggtctgctgtgcgttgcaacaaaaatactaaatctgaaagctattcccagttatgtccgttctgggatatttccggtggcggctgtgcgttgcaacaaaaatactaaatctgaaagctattcccagtgtcccatttgtctttctcgttcggataaaggctgtgcgttgcaacaaaaatactaaatctgaaagctattcccagtaaatgcgtgtaacaagaataaatcactttagctgtgcgttgcaacaaaaatactaaatctgaaagctattcccagtttgtaactgtgaattatcgtatccctgcatgctgtgcgttgcaacaaaaatactaaatctgaaagctattcccagtcaagcgttttcggcgaaaaattttcgcaatgctgtgcgttgcaacaaaaatactaaatctgaaagctattcccagttatgcggtagcgtatgacttgagccgtatgagctgtgcgttgcaacaaaaatactaaatctgaaagctattcccagttctttttagaacaaccatagtaaattagatgctgtgcgttgcaacaaaaatactaaatctgaaagctattcccagtatctactgcgagggtgtgcgtatcacgctcgctgtgcgttgcaacaaaaatactaaatctgaaagctattcccagtaacctcgattttacccagttcacacaagtggctgtgcgttgcaacaaaaatactaaatctgaaagctattcccagtacttggtgcagacgaaagaaattcgagcgggctgtgcgttgcaacaaaaatactaaatctgaaagttattcccagtaggccagctggggtgtgacggggtataacgtctatgactacgaaaaagacgggaaaacttacagagtcgggttcgaggtaatagagaaagaggctgcgaggtggaagcagccgtattatgtaaaaaagaaaaactgatcagggtcagttacgtgctaaaaaaatcgcccgaattcgcgtccctaatcagctttctgtactgcaaatataaacaaagtttctgaagctgcgttgcaacaacattactaaatctgaaagctattccctgtgaaaaaagggagaccacgaaaataataatctgctcaaaaatcatgcgccaaaaaagttttcaacaacgaagacgagtttggaatgattccaaataagcatccatggagaagaaaaaagcaaggtaaaagtggagggaaaaggaactgccacagatcgaaataccacttaaaacaagtgagacaacgatctgtatataaaacattttcaatttatatataaatcgttttcgttttatatataaatcgttttcgttttatatataaatcgttttcaatgaatatatagatcgtaagtgatttgtatataaatcgcgggctcaaaaaagccttttccgaagctgatataaaagaagcacccgccgagttctacggagaactccgacgggtgcagtccggatatgtatgtggtggggcctatgccaagatgctatccttttgcatgtgattcgatgtagttgcacgattccgctctacagtctcggaccggatcgaggactgtcgctgctgtgctgagggatccgaataggagcctattcgggcttgatgtcaggtgatggggcatagtcggtagtttatggatgtgtggcatactaatataatactctcttttttcagttaattgctcgcttccaatacacgaagaaattcactgtccggagcaatgcttttcggaaggcaaaattagtcaattctttttcccttgacaatgactgctgtgcttatacttgaaaaacggaatgtgcaagagcgcaggggaaccacatcaaaatccgagtaacatcttcgttgttgaaatttttttttcgttcctgtttttgggcctatgtatcatcctttttaggtacatatggaggaaaaaagaataaacaaaatgcaagcattaaattgcggcagagaagagatagagcgaaaggcttttcgttccatttctttcggttgcgtacttgttttattaagtttgctcctatgaagcagatagaagatatatccgagtttcgctcttcgcctgagcttgtggacaaactgtataagcatggcatcctcaaggtctacaaggccggcagcgttatcctcaatgagaatgcacatgtccggtccattcctatcgttatcaaaggggtcatgagagtaatccgtaccgaagaggatggcagagaaatcctgctctactatatcaaggcaggcgaaagctgtatcatgtcttttcttgggggcctgcacaatgagacaagcaaggtgaaggtggagatcgaagacgatgccgagattcttttcttgcccgtcgataaggtttccctctttatgaaggagcatcccgaatggctcaactacatcttccgctcctatcacaagcgattcgaggagctattagatacggtgaatgccattgctttcaagaagatggacgaacgcctactggccctcattcaaaagaaagccgaactcgtggagggtaataccatacagatcacgcacgaacaactggctaatgaattgggaacagccagagccgtggtatcaaggctgctcaaacaattggaagaatccggcatcgttcgcttagggcgtaacaaaatcacccttatgtgaccaaagtagctgtacaccgctccggatatgatgacctttgcctcatcataaaaccggagactgtatgcttatagcaggttacttggcatctattttaatcggcctgtcactcggccttatcggtggcggagggagtatcctcaccgttcccgtactcgtatatctgatgggcatagaccctgtcttgggcacggcctattcgctttttatcgtgggagctaccagtgtggtcgggagtatctcatacttccgccgttcgctggtggacgttcgtactgcagtgcttttcggcctgccatcgatcttcgccgtattcctgacgagagcttatctggtaccggcgattccggagtgtgtattgagcccgggcagttttgcgatcgaccggaacatgctcctgatgctcttgtttgccgtactgatgcttacggcatccgtcagcatgatcagaccggctaaaatgcaggagaaagcatcacagagaccccccaagccgaaacagccccgttatgccctgatcctccttgagggaattgtggtcggtacgctcacagggcttgtcggtgccggaggaggcttcttgatcatccctgccttagtcttcctcggaggcctaccgatgaaacaagctatcggcacctcacttgtaatcatatcagccaaatcgctcttgggatttctgggagagaataatccggcaggtctcgactgggggcttctcctctcggtaacagcttttgccatcatcgggatattcatcggaatgaaactttcccaatatattgacggagacaaactcaagccggcattcggctggttcgtcttcgtcatggggctatacatcattctcaaagagaccatactcgtatagctcgcgtcattgtgtgactaaagtagctgtacgagccggaaaggtggttgatctttgcactgacagacaagcaataataacattcgacaaatatgaaagtagaacagatttacacaggctgcttagcccagggtgcatactacatcacttcgatgggagaggctgccatcatcgacccactgcgtgaaatcacgccctacctcgaacgtctcaaacgcgacggggtaaagctcaaatacatattggagacgcatttccatgccgactttgtgagcggacaccttgatctgagccgtgccacaggtgctcccattgtttatggacctacggctaagcccggattcgatgcgatagtagccgaggataatcagatcttcgagttgggtaatgtaaagatccgagtgcttcatacacccggacatacgatggaaagctcttgcttcctgcttatcgacgaaaacggacgcgagacggctctcttcagtggcgacacactcttcctgggggatgtcggccgtcctgacctggcgcagaaagcagcaaacttgacacaggaagagctggccggcctgctctatgatagtctctacaccaagatcctccccttgtcggacgacatcatcgtatatccggctcacggtgccggatcggcctgtggcaagaatatgatgcaggagacagtggacagtcttggcaaccaaaagcgcgttaattacgctcttaatcaaccgagcaaggaagcgtttatagcatctgtgatagagggtttgctgccaccgccggcatatttcgggggcaatgtagccatgaacaagatgggatatgacagcatcgacaacgtgatggagcgcggactctccgccctctcggccacggacttcgaagcgatagccgaaacgtccgatgctctggtgctcgatacgagagctcccggtgtgttcgcccaaggcttcattcctcgctcgatcaacatcggtttggatggggatttcgccccttgggtcggtacgatgatcgtagacgtgaagcaacctctgttgcttgtggcagatccgggacgtgagcaggaagtgatcacaaggctcagccgtgtaggattcgatcaggtactgggctatttggatggcggattcgatacatggaatgcctcgggtaaagaaatcgaccacgtcgaatgcattacggccaacgaatttgctgaacgattctgccctgaagagagtctcgtgttcgatgtgcgcaaggagagcgaatacgcagctgagcacgtggaaggagcttatagccgtccgctcgcctatatcaatgactggatacaggatattccccgagaccgccacttctatctgcattgtataggtggataccgcagtatgattgcatccagcatcctactctcgcgaggctatcgtaatttcacggatatcgaaggcggattcgcaagcattgcgcagaccggtgttcccaaaacggactatgtatgtcaaagcaaagtgtcaaaaaaataatatcgttttccttaaccatcattatcgcaattgtcatgttaggattactgaaaaatctattctcgcagcctgatgataaggctctgaccgaggctattcgcaacagcgcctttctggtcgatgtgcgtacgccgggtgaatttgcatcaggcagtgtagccggagccgtgaatattccgctggaccggatagcatctcgcctgaatgaactcaagaataagaagaccatcatcgtcttctgtcgcagtggcaacagaagcagccaggccaagagcattctcgaacgcaacggcttctccaacgtactcgatggaggcacctgggggcatgtagcctctctgaaaggcgatcagtgataacgaagtctgagaaagacttcgaccgttacaactctttctctattaagaaggattggtttttgaatttttgtctttccgaagacaagaatatcatcataaaaccaatccttttttacatcatataaatgaatcctattctcttttactctgctgtctatagcatgcaaaaggtctcaaaatccgatattaccgctttctataccctataaatcacatccaaagcagggcaatcgcatttgaaatataggtctgatgatgttccgtccggaataaacacgaattaatgtgttagagatcctaattgtagaaggaagagaccaaggatacggagtacaacctttcaaatacgatagccccctgccgaaggggccggtctcttcggggaattttctgtagtctgtgttgcgcttactatcggaaattacaatcacgggtgtctttctattatgagaaatgagtcctgatcttcccaaacaagggggaaaacgaattttgaagacgcaaaacagggaaaacttccaagattattttcatttcaccttaattggccataatgtactggtaattagcatgttgtaatgagcaccgtaggcctacgccggtctcctgcaccatgcaggaaggtttcgtgccggcttttcaacacttcttcgtattcctcgacataatcttcaatctcgtaccagaggtatcacctgagagcgtagagaggaaaacgatcaggaataaaaagtcgagaggataaacttctttgctctctatccgtttggatccgagaccataaagaggccttccgatagagactgaatacatgactgacggctcattcaacgactataaaatttatagaacgctgttttgaatgcctctgccctgacatccaaagtgatgtccttttcaagatcagccttttcctaatttcttttcgatttttttctccgggatgtaaaagacatggattgcatcaatgggcacgaacatgtcgatgagatcgaatggatccgaattctctcgtttttccgatatgtatttggatttgctttgctattagacagtctaagaccctttttaggcttttttgatgaaaaaattacggagataatatgctacttttgtggcattgtacaaacaaaagattaccaaataatggatacgatcaacaggcgcatacgcgtacgtttcgctccgagtcctaccgggccgttgcatataggaggggtacgtacggctctatacaactatcttttcgcccgtcagcatggaggtgatatgatcctgcgcatcgaggatacggacagcaacagatttgtgcccggtgccgaagcgtatataatagaggcattggaatggctcggcatcaaattcgacgaaggtgtaggctatggtggccgatttggcccttacaggcagagcgaaaggcgcgatatttatcgcacatatgttcgccaactactggattcgggacaggcatatatcgccttcgatacgccggaggaactggaagctcggcgagccgaggtgcccaacttccaatacgatgccactactcgtgggcaaatgcgcaactctctgacactgcctgccgaagaagtggagcgtctcgttgccgaggggacgcagtatgtggttcgtttcctcgtggagccgaatgtggacgtagaagtgaacgacctgattcgcggacgagtggtgatcaactcttccatcctcgatgacaaggtgctgtataaaagtgccgacgacttgcccacctaccatctggccaatatcgtggacgaccatctgatggaagtgagccatgtgatacgtggtgaggagtggttgcccagtgcaccacttcatgtactgctctatcgtgctttcggttgggaagatacgatgccgagatttgcccatttggcactgctgctgaagcccgaaggaaacggtaagctgagcaaacgcgatggcgatcgtttgggatttcccgtatttccgctggagtggaaagatccccaaacgggagatatatccaaaggttatcgtgaaagcggttatctgcctgaagcagtggtaaacttcctcgcgcttctgggctggaatccgggcaatgatcaggatgtcatgagcatggacgaattgatccgactgttcgacatcgaaaagtgcagcaaggccggagccaagttcgactacgagaaaggacgctggttcaatcaccaatatatccagcgtaaggacaatgctgagttggccgaactcttccgtcccatccttcgcgaaaatggagtagtggctaccgacgagaaaacagctcatgtaatctccctcgt

SEQ ID NO: 3392 - DNA, 24317 bp, synthetic construct
  source 1..24317: mol_type = other DNA
  variation 17277..17373: note = note, n is a, c, g, or t
  misc_feature 1..24317: note = Synthetic
tgagctgggtcattccatcctgaaaggccttactgtcggactcattggcggagcgatgatggccgctgcggagcaagatgccgtttatctatgggaaggagttctcattggagttgctttgaccatggggatggccggattgcggatagtggtattaggggcaacctttatccctgacacgaagtatggcgcattggaaggcttcgcacaagtttataggcgaggatctgtttttatgcgtaatggatccggaataactttagggcgccatgttgctgtcaaacgaaccggaaatcttcattatgacagatatttgttgcagcacgaaacgggacatctggctcaaatcagtgacgtgggcgtggtcgaattctacggccgtatcgtcaaagaatatgtaataaaaccggggtttagagcttcttatcacacacccggcacattggaatatggggcaaattactatgcctttcagcgattgggctattactatagtggtatggggataagaaatgcttttccataaagagaaatgataaaattgctgccccattgctgggagcgattaataacaaagcccgtgagcattctctgctcacgggctttgtcttcggaagagaagtcgctttaccacttcttggtagagccgcccttttgttgcttcacttgcagcttacgcatctgttccaccttttcgcgagttttttcctcgtcttgttcgtaggctttcagaatcttctcggcactctcccgactcatttcattctgtcggtcctgtttgttctgttgcgtattgtcctgcttggcaggctgtggctgctgctgaccctgattattgtttgggttgttctgctgctgatttttgtcttggttgctgttttggttctgctcttgattgtcatcgcctccaccgccttgttgttgctggttgcgcagtagcttcatggccagtgcaagattgtagcgcgtttcgtcgtcggtcggattcagtcgcagcgaatgtttgtaagcctccacactctgtcggtagtctttctttttcatcagtgcattgccgagattgtgcatgagttcggctcggcgcttgggcgagagggtaggatcttgcatgagtgccgtatattcttggagagcttcgtcggtacgtccttgtgcatactgtgcacccgccagtccgaaacgggcttcggtgaaggtgctgtcttgtgccaaagcttttctgtaaaccacttcggcattggcatactgatgattgcgatacaccttgcgggcgcggcgcacatcctcgcgaatgttctgcgatgccaactgtgctacagataataggaggagcaggactcccactatgagatgtcgtatatgtgtcatcggtcaaacagtttgagcttactgaagaagcgactcttgcgctcctgaatggcgaattccaacaacaggcagaccagagcagccaagccgaaccatccatatacctcgcggtaaccggaagaggccgaagatgtgagaacagctttggggagtttgtccagctgactctccacagcccgcacgagagccgatgcactctgtccggagaagaacgtgccgtcgccggctgtcgcgatctctttgcacatctgttcgtcgaacttggtaactaccggattgcctccttcgtctttgagatagcctccttcataagggatgggcgcaccttccgatgtgccaagccctacgacgtttacccttatgccggcttctctggcccggcctacggcttcgagcacatcgccttcgtggttttctccatcggtgagaacgatgatggtcttgcctatttctttattgtcagagaatgacttcgaggctaaatccacggcagcaccgatggccgttccctgagccgtgaccatgctcggactgatgtccgagaggaattgcttcgcagccgacaagtcggtcgtaatggggatttgggtgtaagcatttcctgcaaagacgaccaaccccactttgtcgttccgcatgacgtcgaagaggcggccgagtacttgcttggcgaagctgagcctattgggcttgacatcctcgcaaagcatagagttagatatgtccaggcagatcatcgcttcgatgcctttctcttccttgggtacatcttgtcgggcgctgacttgcggacgggcaagcattccgatcgtgaaaacgagagccagaagcagaaagccattccgccagatgcgacgcttcgtactggattcaggcttgagagttttgagcaggggaagttcggcgaagcgtctctcttgcgctcgtctcttgcggaaagcgtagaagcccacgcccatgagcaaggggatgagcaataggagatatagatattccggcgaatagaatctgtacatggagagcaatctgtgaataggttttacggattggtgcggaggatcgtattacgcaagaggaactctgctaataggaggaagaaagccacaagggcgtaagcgaggtatttctcttcataagccttgaagctcttcgtcatgagtcgcgtcttctccagcttgtcgatttccttgtagatttcattcagtgtcttgttgtcaacggcgcggaagtatttccctcccgacacctcggcgatgccgtccaatgtgggttcgtcaatatcaacgggaacattttggattcgtacgccaaactcggtctgaatggggaacggggcttcgcctcgcgttccgactcctacggtataaacgcggataccgaaggtcttggctatatcagcagccatacggggcgtgatgtcgcccatattgttggagccgtccgttagtaggattacgacacgactcttggccttactgtccttgagccgattgactgccgtggccaatcccatgccgatggccgtgccgtcgtccaacacgcccatctgcaggtcttgcaccatattgagcagaacggtgtggtcagtcgtgagcggacactgagtgaaactctctccggcaaatgtaaccatgccgatattgtcgttcgggcggttattgataaaggtgatggctacatctttggccgcctccaagcgattgggcttgaagtccatcgcctgcatactgcccgatacgtccatcgccaacatgatgtcgatcccctcgatggagtctttctgccagctattggtattctgcgggcgcgccaatgcaatgatcacaaagccgacacagaggattctcagcacggggagcagatgacgtaaatagacgcgaatacccctgcgacctccggcaaagggatggagcgagggaagcgtcattgtcgcctgcttcttgcgtgcactcagtatgtaccaggctgccatcaacggcagcatgagtagcaaccagagcaattcgggataggcaaaggtcatgactcccataagttatgcacctcgtcaaggaaaacgcgagcctgtcgtatggcttcggcatcctctccgggcatgggtttgtatttggcaaacttagccaagtcggccgtctgcaatatgctgcgcaagagcaaacgctctttctccggcagttcgatgcgctgcaatgcttccagtatctcactgctggtcatctcacgggcatcaatctgacgcgtctcggatatatagtctcgcaacagatcggtcagctcagtaaagtactctttgaagagacctgcttccaccagctttttctgtcgcaaggtttccaacgcggcaatggcgcggtcataggccggcagagtcggttcgtcgggctttttctccggtcgaagagcttgtcgttccttgtatttcttatagaaatggtgagcaagtgcaccgaggaagacaaccagaataatccacgtaaggggatggcggagtaggaggttcaatagatccgtaaacgtgtacggcactccccacggctccttgatatcgtatatggagtcggggttggacatatctacctctggcatggtcaccttgaggaacaggctctttgtcatggcctgagactgtccgtcagtgacgatgaaaggagggatctccagcagggtcgaatcgaaggaggtaatgaccatctgagccttgatctccacgatgggagctttcacctccaccgtatcggtcacgccaaaggctaagatttccatctgcatcatcgacgagtcgttcgggacttgcaaatgggtatgatccagatcggctgtgcgaatggtgatgtcgatgactgcctgttcgcctatctgcatctcagcccgatccagtttgctcgtgatggacagttcttgtgctcctgcccaagaaaaggctgcgaggaaaacaagtagcaagatcgggaagcgtatagaaagataagatggtctcatgagcgttttttgaataggatgaggagctgttgtacgaagtcctgtcccgtgcggatctctgtcgaatccacgccgcaacgcttcagaagaaccgaaagggctgcacgatgatggtcgtatgcagtcgaataggtgtgacgaacagcccgatccgaggtgtcgatccaacgcgtctgtcctgtctctgcatcgcggaactgcatcaagcccacattgggcagctcaacctctctgcggtcgaatatattgatggccacgatatcgtgtttgcgagccgacatcatcagcgcgcgctcgtacgtctcaacttccgacaagaagtccgaaatgagaaaagccgtacagcgcttcttcaccaagcgcgtcagataagaaagcggaacagaaaggtccgtagcatgactctgtggatggaactccagcagctcgcggatgatatagaggatgtgtttcttgcctttggcgggcgggatgtacttttctattcgatcggtgaagaaaaggactccgatcttatcgttgttttggatggcagagaatgccagcgtcgcagccacttcggccgttagttctcgcttggtctccacctcggaaccgaaagaaagcgaaccggacatatccaccatgagcatgaccgtcagctctcgctcctcttcgaataccttaacgtaggggcgggcataacgcgccgtgacgttccagtcgatgtctcgcacatcatcccctaccgtgtactcgcgcacttcgctgaaggccataccgcggcctcggaaagcagagtggtactgtccggcaaagatctgtcgcgagagaccgcgggctttgatctcgatccggcgaactttcttgagtaagtcgttcgtctgcacctgtcttttccttagggtacctctactttgttcagtatttcatttatcacagcgtcggccgtcaggttgttggcctcggcttcgtagcttaggccgatgcgatggcgcatgacgtcgtggcatacggcacgcacatcttcgggaattacgtaacctctgtgtttgatgaaagcataggctctcgcggccaaagccagattgatggaagcacggggcgaagcaccgaagctgatcatatccttcagatcgttcaaaccaaactgctcaggatagcgtgtggcaaaaacaatgtcaacgatatagcgttcgatcttctcgtccaaatacacctgtctgaccacgcgtcgagcttccagtatttcagccgtattgatgacgggacggatgtccgacaattcaccgccgatattctgacgaatgatctgcatttcctctttcttctcgggatagtctatcagcaccttcatcatgaaacggtccacctgtgcttcgggcagttggtaggtgccttcctgttcgatgggattctgcgtcgccatgacgaggaatggttcgggcagtttgtatgtggtctcaccgatggtcacctgtctttcctgcatggcttcgagcagagcactttgcaccttggccggtgcacggttgatttcatcggcgaggatgaagttggcaaatatcggtccctgcttcacttggaactcttcgcgcttctggctgtacatcatcgttcccaccacgtcggccggcaataggtcaggggtgaactggatacgattgtacttggcatcaatcagtcctgccagcgtttttatggccagcgtcttggccagtccgggaacaccttcgagcaatatgtgaccatcggccaggagaccgatcagcaaggattcgactaagtggttctgccctacgatattctgcgccatgccgcgcgagatgagattcacgaatgagcttttctgctctatcagctcggtgagagctttgatgtcaatggtttcactcattgggttgtctatgatctgttcattaattctttgttccgtttgtctgaatggcgacatgcaccactatgatattttggacacacggattcttctatggtttaagcccttatccgatggccatcattcgttcgatggagaagagagccttttcgcggatgtctgcaggtaccttcacctcataacgattgaggcgcaatgcttccaatacctcccacagaccgctctgcttcatgtggaagcagcggttctccggttggatggggatgaatgtcttgcccgtattctctttgtggaggaagtggagaatctctggttcagttgcgatgacaaattgcttcttgtctgactcacgagcatgcttgaggatacccgccgttgagtacataaagcatcgttcgttagtcaatacctcttgcgaatgtgcgcctgcgctttcgggatgaatgaggatgtcggcatccggatacagctccaaagtctccaaaatggcttccgtgctgatgcgctcatgcacgaagcaggcagcatcccatagctccatgtcacgtcctgtcttctctcggatataagcaccgagattcctgtccggcccgaagagaatcttcttgtctttcggcaggctctccaccactttgagtgcattgctgctggtacagcagtagtccgtccatgcctttacctcggccgtcgtattcacgtagctcacgaccaaaccgtcggggttcttttccttccacttttgcagccctttggccgaagctccttccgccaatgaacatcctgcgtattcggtaggagtcaggatcgtcttgtcgggagaaatgatcgaagcagtctcagccatgaagtgcaccccacagaagaggatcacatcggcttgggtctctgccgcctgacgggatagccccagcgaatcgcctatgtagtctgcaatatcctgcacctccggccgtgcatagtagtgcgccaagataatggcattcttctctttcttgaggcgctctatctcacgaatgatttctttagtctgcatggtcgtttgcttattgtgctacaagaaagttcatactgatgtccatggctgtcacactatgggtcagagcgcctacgctgatgtagtccacccctgtctctgccacgctacggatgcgttcgaggttcatattgccactggcttccgtcttggcacgaccggcgatcagctccacagcacgtttcatggtgtcgttgtccatattgtccagcatgatgatgtcggcaccacattgcacggcttcttctacatgagagagtgtggacgtttccacttccagcttgatcgacaatggcagatcccgtctggccgattcgatcgccttagttatgcctccggctatcttcacatgattgtccttgagcatgatcatgtcataaagccccatccgatgattgtgcccgccgccgtgacgaacagccatcttgtctgtaatgcgcatcccgggagctgtctttctggtgtccagcagtcgcacctgcgtgccggctatggcttcggcatagcgtgctgtcatcgtggcgatgccgctcatgcgctgtaggaagttgagagccagacgttcggcctgtagcaaagcccgatagctgccttctatctgcagaatggtctgtccgcgctttaccgtgtcgccgtcagccacatatggagtccaagtaacggtgtcgaatcgctcgaagacccgacgcgccacttccatgccggagataacgccatcggctttcattgtcatggtagccacagccttttccgactggggaatgatcgcattggaggaaatatcgccatcggctatgtcttcggcgatggccagatcgatcagtcgttccaagagcatttcttcatgagtcataacttcgtaataggatgtattggggtctttactatgattagttctttctcctttttttctcaaccaagcgagtaggacgaatgcttgcggtaggcatctctggtctcggggtaatcctcccgataatgtccgcctctgctttcgtgacggtccagagcgccttgcacgatcagttgtgcgacgatgaggagttgctccgcgaaggaagcatagaggtcgttgactccgcagagcgaccgcctgagctcttcgatccggctccgaaccgatagcaatccgtcttcgtttcggatgatgcccacatgatgggtcatcagtttggagagttgctcgcggatggtatgatagatcgtcacgtccttcggctctgtgcctgcaacctgcttcggcaggttgtcgaggtggacggaagacgctctgcttactgtatcctccacgacacgatggccgaagacaaggcattcgatcaacgagttggaggccaacctattggcgcccattattccggtcgatgccacttcgccaacggcatagagatggggcacagccgtacagccgttcagatccgtactcacacctcccactgtataatgtgcagcaggagccacgggaattcgatccgtcatgtcaagccctaactccgcgcagcgggcgcagatcgtggggaaacgtttatgaatcatatccggatccaaatgcctcaggtcgagataaacgtactcgtcgcccaatcgtcgcatctccatgaagatctgacgggcaacggtgtcgcgcggggctaattcggcaagttcgtgaacgccttgcatgaaacgctcgcccttactattatataagtgggctccctcgcctcggaccgcttcgctgattaggaaagcttcgccacccgggttgtatagtgctgtcggatggaactgcacgaactccatgtctctcacttcgcagccagcttgataacagagggcgatgccgtcgccgagcgttgtctgcggattggtggaacgtcggtagatggcagccgatccgccggtagccatcaccgtgtgtttgccatagaagacaacctcctgactttgatcccagtcccatgtgcgtactccccgacagccattgctgtcgatgaggagttccaccgcctgatgattgacaaaaatctctatttcaggtgtggcgagaacgctatcgatcatgaagctggtgatcatcctaccggtcgaatccccgccggcgtgtaagatgcgcttgtgatggtgccctccttcgagagcaagagccagatgcccgtctgcttccgtgtcgaagcgcattccccattcgatcagctcagagatgcgggcaggcgcttcttccgtaagcacccttacagcttcgtcttcgcagagtccgcgaccggcttccaccgtatcgctatagtgatcaacgggcgcatcgtcggctgccgtgacggcagcaatccccccttgtgcaaagtaagaattgctttcatggatatcagccttggtaataagagcgacccgcccaagcctcgatgctttgaaagccgtatagagacctgccagccctcctcctacgacgatataatcataccgattcattccggataatttcatacgacggcaaagataagccaaataaagacttatctgcagacagagccgaatgaactaagagcattgaagagtataaggctcaaaaagaagaagctctccgaaaaacttcgaagagcctgttcttaatgttttcacaacggaataaaatccttgttgggaaaagcttcagatttagtactgcaaatatacttcaagttattgaaataacaaaatgatttgtttatttttgtgcgaacagctgtattaacgctgtctttacttctcagtccttggtagttgagatgtatttgatactaaacaattttaaaacgatgaaaaaaatacttggtttagacctcggaacgacttctattggaggagcctatgtcttagaaggagagaggcccgaagaacaaactaaaatagtttatctgagtacgcgaacagtattgtcttcggctgatgcggaaaatttcaacaaaggattgtcgtgttctccaacaactgaccggacaacaaaacgctctatgcgtcgcagactccaacgctacaaacagcgccgatcaagcttgttgcagcatctacaaaagacagggattattgaagatagagagaagatccttcagaagccaatctcagacacgcacgaactccttagaatacgctcaaaagctgcttccgaaaaggtttctttagaagaatttgccagagttcttctgacaatcaataaacgtaggggctacaagagcaatcgaaaaacaggcaagagtgcagaagaagacggcaaattggttgatgccatggctgtaacaaaggagttaatcagaaacaagaagactccggggcaatatatgttcgaccgatatgttcaggggaaatatgctgagatagatttctacatttttgacctcacgaatgaactcaagcaaatttgggatatccaagcacagacaaatcctaacattttcacgcaagatttgcttgactcattgctaaatctaaagactggaaagttcgaaaagcacatattctcgaagacaaatcttgctccagcagagctgcccaaagattatctcaatggaaagaaactccgtaaaagcattctcaacaaatacttttcttacgaatgtcgaagcttagcagctgcaggcgttatctctattccaatggcgatagctgccatcatatcagtctgcaaacaaatcaacggcagcagtagttatttgggagccataggggatcgtagtcgcattttgtttgccaacgatcaaacaatcggagaatacttataccaaaggttgcagaaaaatcctcatgacagggttaggggcgaagtcttctatcgacaagactatctcgacgaatttgatcgtatttgggcgcagcaggagaaattctatccggaagtcttaacgaaagaagctaagcttcccatccgaaaccgtattattttctatcaacgccctcttaaatcgaagaaatccgaactggcattctgtgaattcgagtcccatgagattgagcgaaatggacgcaaatacaccgaaggtctacgtgttgctccaaagtcctctcctatttttcagcactttagattatggcaacgattagggcagatcgaagtctcacggcttagaaaatgggataaacaggaggcgcaattgtttcagcaggacgaaaagacagatcaaggaggatttctctgccttgaggcaaaagaaaaattatttggctatctcaacctccttgattcccttagtgagaatgagatactgaatattctcggatacaactcggatgtttggaagcttaattttagagaagtgcttggaaatcggactaacaataggatgatgagagcattctttaccatgaaggagatggcggatggagaacagatcgaatgggaaaagaatctaactaaaatcaccaatggacaacctgccctttctcccgagcaagtgatagatgtcattcgccaattctttaataatgagggcataaattccgagttattgcattttgatccttttgctgatgatctaaggaaacaacctcactatagtttgtggcatcttctctattcttcagaggatgataattcgcctacggggataacatccttatgcaaagctttgtccaagcgatacggtatttctcctgaattgtgtccacctttagcgtcattgagttttgaacaagagtatgcctctctaagtacgaaggcaatgcgcaaaatactcccgtttttaccagaacatcaatatgaccaagcttgtaaattggccggttatcgtcatagttcttggacgacaaaagaggaaaataaccaacgtaagctgattgacaaattacctttgctccgcaagggaacattgcgcaatcctgttgtggaaaaaatcctcaaccagatggttcatgtaatcaatgcccatatagccgaatatggaaatccggatgaaattcgccttgagatggctcgtgatatgcaatccaatagcaaacagcgtaaggcaatgacagcgtctatcgcagaggcagccaaacgcaatgtgctctaccttgaggagataaaaattaaatgtggaattaataatccctctaagaatgatctcgtcaagtatcgactatggaaagagcttgcgccactgggatataaaaccttgtattcgaatacgcatatccctcttgaggagttattcactcctaagtttgatatagagcatatcattccgaaggcgctgttctatgacgatagtttctcgaacaaaacgttggagttgaatgctgtgaacaagaacaaggggaacaagactgcattggactatatggggactcttggattccaacaagccaacgaatatgtacttcgagtagaggaactcaaaaagagtagaatgatcagccctgccaaatacaaaaagctcctcttgctcgagaaggatctaagcgatgagtttaccaatagagatcttgccaatacgcgttacatcatccggctggctgccgatatgcttttgcaagtaacaccttctatagtacataccaacggtagtataacagccattctgcggcgtgactgggggctgcttgatacgatgaaagaacttaatatgcctatttatgaatcgatagacagtcgcatttccaatggcgaggagaagcttgttaaaacgatcgaacgaaaggatggtcaatcaatcaaggttatcaaggactggagcaagcgtaatgaccatagacaccatgccatggatgcccttgtcacagctttgaccaccagaaagcatgtgcagtatcttaatggtgatagtggatcggatgtgacggataaacgccaaaagctagaattattaaagaagcttcgctctcaactcatgggatcagacgggcgttttgccctgcccatgcctaatatcagagcacaagcaagagaggctctttctcgggtgatcatatcgaccaaagtcaaaagcagagtaacgactcctaataccaatgtcattgcaggccgagataaaatgaccggtcgcaaaacggctatccgacaaacgactttgacacctcgtggagcattgcatttagaaaccaagtatggcaagaatcgttactatcaggaaaaagagattgctatcggagcaaaattgactatggaggagattcaatatgtcagctcccccctccttcgttcgatcttgacagaacgattgcaagagttcaacggcgatcctaagttggcctttacaggaaagaattcgatggagaagaatccgcttagggataaaaatatgaacgttgtatacacagataagaaagtcaagcaaacgattttggacgatagattcgtatttcggaagccgattgacaaagacctcaagcttgataaggttatagacgtaggaatcagacggatattagaaaagagacttaataagcataatggacaacaagagaaagcattctcagatttagagaataatcccatttggttgaatgaagaaaaaggtattgccatcaagtcggtccgtatcagaggcaagaataacgccatgccaatccacgaggctggtcgccctattgactatgtggctaatgataataatcatcatttagcggtatatgcactaccagatggcagcattgaggacgacatcgttagtttctttgacgcggtagagaggtcaaaccagaatctcccagtcattgataaggttaaaaatcaatcattgggatggaagttcctttttagtattaaacagaatgagtacttcctattacctcggcaagaggacacggtggacatagatactggaaagatccagagacgaacgacatttgttccccaagacctcagtccggagtacattatgaaccccgataattacgcagagcttgccccacacatttttagagttcaagcaatctccaaaactcgccaaaaggttggatatgtaagaatctatatgttcaaacagcaatatgtctctggtagtcaaaaagaatcctcttttctgaggggtgtaactcaagttcaaattagttctgcaaaagatttggctcagcttgtcaaaattagagtcaatcatcttggtcgaatcgttgcagtaggtgaatactaagcattgttgcgtcaatgattaagcgaactttatactttggctctcctgcatatcttggactaaagatggggcaattggaggtgaggctgccggaggtagagctaacagacactctgccggagcatctgaaaaagagcagtcggcaatccttccctattgaggacttgggtatagtcgtgttggataataagcaaatcacgatcacacaagccttgctgtctgctctgatcggtcaaggttgtgctattattagttgtgatgagacgcaccatccaacggggatgttactctcttatctcgggcactccgaactgagcgaacgcatacacgatcaattagaggcctctcttccgctcaagaagcagttgtggcagcaaaccatccgtgccaaaataacaaatcaggctgcggcactcgctcaaacaacgggagagcctcaccctaatatgcatgcgtggatagagttggtaaagtccggagatgctgacaatattgaggcaagggctgctgcatactattggtccaatatctttccctctttcccttctttcaagagagatagagaaggcgactggactaacaagctactcaattatggatatgccatagttcgagcgatggcagctcgggcgatagccacagctggtttattgccatcagtgggtattttccatcacaataagtacaatcacttctgtttggctgatgacttgatggagccttatcgtccctacgttgatctgcttgtctatcgtatgacccaaaacgctgttaacgatcttccttcatcgcttactacagagcataaaaagcagctcctaagcttgcccgtaattgataccattattgatggcaagactcatcctatgagcattgccattcatcatagtgccacatcactatatcggtgctttgcgggaaaagagcgaagattggtctatcctcgactgtaaatgagcgaatacagatcacgatattcagcctatcgaagtatgtgggtaatggtgtttttcgatttaccaaccgatacagcagcagaccggaaacgtgctgcttcttttaggaaaaccttgctgcaggatggcttcgaaatgttccaattttccatttacatcagacactgtgccagtcgggagaatgctgacacgcattgtcggcgtgtccggtctgccattccagagaaaggtaagattggtttgatgactatcacagataagcagttttcatccatggaaatcatctgcggccaagggcgggagttttatcagccacctcttcaactcgaactgttttaacggtataaatcttctcctcccaaaggcatcagcccatattgtagaaaactaaaaagccgagaaaactctcggcttttaggttgcatacagtctttttttgagagctgatatgcttcgtacattgctgtgccatagatacttactggggatctgctgtacgataacaacaaagatactaaatctgaaagctattcccagtcgctcgaagctgtagaaaaaatggcaaatggctgtacgataacaacaaagatactaaatctgaaagctattcccagtgttgccgatcttaatcttttgcataatgttgctgtacgataacaacaaagatactaaatctgaaagctattcccagtccgccttggcatccgtatcgtctgcgagatgctgtacgataacaacaaagatactaaatctgaaagctattcccagtgcagaggctctccgtatctccctgcgcaaggctgtacgataacaacaaagatactaaatctgaaagctattcccagtctttcgaatctcttctgcgcatccagtattgctgtacgataacaacaaagatactaaatctgaaagctattcccagttacctggtgagatgcttgccatgcgcatgagctgtacgataacaacaaagatactaaatctgaaagctattcccagtgaggaacgagataaaatagaatctccgtctgctgtacgataacaacaaagatactaaatctgaaagctattcccagtaggattgtcgaataaggactcttgcatagagctgtacgataacaacaaagatactaaatctgaaagctattcccagtccgattcggttttcgatattttttcctcttgctgtacgataacaacaaagatactaaatctgaaagctattcccagtacgagcagcgatctcgcccagcggagtctggctgtacgataacaacaaagatactaaatctgaaagctattcccagtgctcgtatgagcgggtggagtacttaaactgctgtacgataacaacaaagatactaaatctgaaagctattcccagttccacgacggtgcgctccggacgctctacagctgtacgataacaacaaagatactaaatctgaaagctattcccagtaaaagaggaacaattatgagagagttgacagctgtacgataacaacaaagatactaaatctgaaagctattcccagtgctctttaactcccatacaatcaaccaattgctgtacgataacaacaaagatactaaatctgaaagctattcccagtagtgaatagtgtctcataaataggcctgttgctgtacgataacaacaaagatactaaatctgaaagctattcccagtcttattgcacacacgtagaaaaaacagaacagctgtacgataacaacaaagatactaaatctgaaagctattcccagttctgtgtcaaactcatagggaaagttgacagctgtacgataacaacaaagatactaaatctgaaagctattcccagtctactggaacgttaaacaaccgccccgcccgctgtacgataacaacaaagatactaaatctgaaagctattcccagtgctcgtatgagcgggtggagtacttaaactgctgtacgataacaacaaagatactaaatctgaaagctattcccagtannnnnnnnnnnnnnnnnnnnnnnnnnnnnnnnnnnnnnnnnnnnnnnnnnnnnnnnnnnnnnnnnnnnnnnnnnnnnnnnnnnnnnnnnnnnnnnnnatctgaaagctattcccagtgctcgtatgagcgggtggagtacttaaactgctgtacgataacaacaaagatactaaatctgaaagctattcccagtacagagtataatgatatataaacgacctcagctgtacgataacaacaaagatactaaatctgaaagctattcccagtaaaccgccacagcgaacgaaacacatattcgctgtacgataacaacaaagatactaaatctgaaagctattcccagtcacttccttgtcttttagatcgtctattatgctgtacgataacaacaaagatactaaatctgaaagctattcccagtgcaaacaggttgagctgataaagctacgccgctgtacgataacaacaaagatactaaatctgaaagctattcccagtggtgggggtatgtgcgcggatgggtttgcggctgtacgataacaacaaagatactaaatctgaaagctattcccagtagtgcgttaagacttgcgtgttccgtttttgctgtacgataacaacaaagatactaaatctgaaagctattcccagttgcaagtaggtcgttccgcttgctgtttgcgctgtacgataacaacaaagatactaaatctgaaagctattcccagtttggcgggttgaaaattatcccttatgtttggctgtacgataacaacaaagatactaaatctgaaagctattcccagtaggtgcgctattcattgaatagcggaaactgctgtacgataacaacaaagatactaaatctgaaagctattcccagtcatcgatgccgttaccaattccgacctgacgctgtacgataacaacaaagatactaaatctgaaagctattcccagtatctattgcgtactcaattttcagatattggctgtacgataacaacaaagatactaaatctgaaagctattcccagtctctgcatacgctcgacacaaagaacaccggctgtacgataacaacaaagatactaaatctgaaagctattcccagtggagacagattgaagtcgagagttgatgcggctgtacgataacaacaaagatactaaatctgaaagctattcccagtaggcgagcaatgatcggccattttgtaaaagctgtacgataacaacaaagatactaaatctgaaagctattcccagtgcttctcaaacaaaatgttcgtcaagccagagctgtacgataacaacaaagatactaaatctgaaagctattcccagttatgtcaatcgtgtcacagatgaatgtgtgctgtacgataacaacaaagatactaaatctggaagctattcccggtagtcgtctgtcgttgataggatagaactcacggcattggacttgcgtacgaatgcgcaaggataaaaacagttattttcaagttcacgcacatgtatcagagtcagaaaacggagttttcatgtccgtgtacatgtccgcaagagcaaaacagcattttctatgtcgtcgcacgtatgcgacttgcccaataacggtttggcaaggcgtcgaagttgtacaaagagtcccattagcattttcccagtcttcattcgttgacaatcagcacaataacatttcgagaaggtatcaacgctcaacaaagagctgagaaatcgttttttgaggcgttgtttacgaacaatgagcctaatcacactgcttttggatacatgacaggctgtaatgcatagtaaatcatttgcttttgagtacatgacagagtataatgcatggtgaatcatttgcttttatatgcatgatagtctgtaatggccataaaagcatttgctttagtagtcattataccatgaaactccctttatgtacagtatttttaggcctgttacaggctgtaatgcaccgaaaacaagtcgattctgagtattcgactggtgtggataggcagattatccgttgttgagatgaaatctcctgattgtagatcgaattctcggtttttaggagtgttgctcgttgacaaaagcgcaaatgagcgtttcccgatgtcttattggtcagtattcttgcagaaaaacacttttcacgagttttgtttgtcgtttttgggcagagggatgtgtttttggctcttcgtgtgagagcgacgctgatttttgctctttttcgaggattgaaaaaaaagatgataaatagtgtctatcttcgcgagctgctcaagcgagaatatatgcgtctttcgctcctacggttgtgcacccctctacaactgcgtcgtgtgtcaggaacagaatcattattgaaaaacgaattggaatgaaattttctgcgaatctgtctcagttgtttgtcgctattctggttgtcatttttgccgtttggtttttatagaccttatcaaggcttttttctggggttgctgattctgtccgttctttaccgatgagatcgcctctgtcctctgggatgggggcctttttgtgggctccatgacggaggcatgagtgcaaagcccaaaacgatgttgtcagtcaaggtttcacggagggtgtgagcgtcttttcggggcatatatcgtgggagagcggagtgaaagacgaataaaagtggtagctttgtcttgatttcaacattagatcaagaaaaacaatgctaaagaaaatcttttctgtactactcgtctgcgtagcagcggtagccatctcttcttgctccggcaagttgcgtccggtgactgcggaccttgtgaaggctgagcctcaaccgcttgaggtgacaggtaataaggtgccggtgactgtgagtatctctttccctgccaagtggttcaacaaacgtgccgagctcacagtgaagcccgtgctgcgctatgccacaggcgaaacgtgggggccttctttccgttttcagggcgaaaaagtactcggtaacgaacgtaccatcagctatgccaacggtggcaatgagcagctttcgtttgcattcccctataagcccgccatggacaagagcgagctcttcctgactttcgaggctaacatcaagggtaagcaggtgaagctccccgatctcaaggtggctgatggtgtgatcagcacggaggcgctggcttcggctctgaatgcttcggccgccattgctcccgatgctttccaacgtatcatcaagcaggcttacgatgccaatatcatgttcctcatccagcaggcccagatccgcgcccaagaaatcaataagggagaggtaaaagattggaaagacttggtggccaatgccaaggaggctcctaaccagaacgtgtcggtagaggtgcaagcttatgcgtcacccgatggaggcatcgaactgaatgaaaaactgtcggaacagcgtgagaagaatacgacaacagccctgaaacaacagtttaagaaaagtaagatcgaagacgtggagatcaatgcccactacacggctcaggactgggaaggcttcaagcagctcgttgagaagagcgacatccaagacaaggatctggtgctgcgcgtcctctccatgtatcccgatcccgagcaacgcgaacaggagatcaagaatatctctacggtcttcagacagttggccgatgacatcctgcctcagctgcgtcgttcacgcctcgtggccaatgtggagaccatcggtaagagcgatgacgagatcaagcgtctcgccggacagaaccccggccgtctgacggtggaggaattgctctatagcgccacacttttcgacaccccctctcagcaggaagatgtctacaaggtggctacgcagctcttccccgatgattatcgtgcctataacaacatcggtatgatgcgctatcgtagtggcgatctcgatggtgcccgctcatggttccagaaggctgccggcgtgaagcccaatgccgagacggatatgaatatgggtctcctggctctgaacgagggtaatgcggagcaggctcagcaatacttcggctctgctgccaatgtgcccgaactgggcgaggctttggggctcctctatctgcaacaaggcaaatatgcacaggccgttaccgccttcggtaagacgcagagcaacaatgccgccgtggcacacatcctcaaccgcgactacaaccgtgcgcaagaggtgctgaacggcgtcaagaatgccgatgccactacttactatctgatggctgtggtagctgcccgcacgaacaatctggatggcgtggtaaacagtctgcgcgaatccatcagcttggatcacaacatgatgagaaaggctgctacggatctcgagttcgccaagtacgccaacgatgctggtttcaaaagcctgatccgcctctaaggttccggcaaatttagaccgctaacgaatcaaaaaagagagctgcctcgatctcgaggcagctctcttttttgatttgttatgcaagcctctttttccatgcgagaacacgtgagtattcagattgcaagaacaaagaggccgcggagctatttatcgtctatgtgagcgttgatgaagttgccttgcgcatcgaagtagagatcgtactttattttgttgtgacggatttcgacttcgtaagtcccgttagactctctttcgatactgaggatcgttgcattcggataatgggcattgacatagctgataatcagtgccttgatattctcaggaatgtcgttttcgtaggcatcatcgtcgtagtcgaagtcatcttcaccatcatcgatatatgtattgatccactcacccttgtaggagaagatcagaacacggtgtgccgtgccgtcgaggatatccacttcgatgtaaccatcttccagctcatactccaagacgatagcattgggatagttggcgtcaagataggttttgatattggccagagcggtagccgatatgagtggactcacgtactgcgctgtagagttgtgatgtggttccgtaatggttttgatcagtacaccggccggagtatagtataattccacgtctagttcgcctctttccgcttcgatcacgtagaaggtggtggtgccgtcacgctctaccatatcgatatcttcgaccacccactgagcataagaacttgcctcgaacgcagtgcgaacgggttgaggtaaagcactatagggaatatctatttcggtgtatcgccactttgtggcaaggaaccatgcctctgacggggagccattattgatgaattcagctacaagatattcgtcttctttctcccaccttacgttttgggcattggggtacatagtcgccagtatgcgagcctcttctgcttcgggactgagctggctgttatcttctttgttacatgcagtgaaaatacctgcacagagtaccagaggtacagaccatttgaacagtttcatttctttaagttttttgattcttactttattattaatcgtggaagcctttgaatactcctttgagggagaagatcagctccaaaccattatttaattctatctcataatctctgttgtcgcgatcgatctgaacaatgtaggtgccgggatgttgggcctctacatggtgtcggataggagtcggtacgagttgtatgggtactcgggagtacttgcagtcgatctctttccactcgcctcgtcggtcgaactcgatcttattgccgtcattgaacactacgtcataggacttgctgaaccagtcgttgtccatcttcacgtacgacactttggctccctcaaagtgcttggctatgatagtctgtgctttctgtgggatgcgggtgagtgctaccactttgtcattgctggcccatgcacttgagagtgtcagcatgagcatgagcagaaaaattttcgatttgtttgtcatcgttatgtgctatttatgattgtttgcgtacaacaaataactgcaccgatgctgaaataaaactgaaattctgattttttttcggaatgtgagaaaaaaagaagaatactacagctctctacccttgcttcctgatggaaaagagatgcaaaccttcatcgaatgtataagaaagatcgagggagtaggtttggcaaatggatcgagcaatggatagcccgagaccggaagaatgctcttgtgagaaatcatggtagaagcgttcgaatataaccccttcatccaaaggtgtatccttgcccgtgttggctatagcgcagacctcagcagagagcgatatgctgattcgcccctcatgcgcaatgttgtgtacataggcatttttcagcagattgctcagcaacactttggccaacgtgggattcatctccagcgtcatggggcctttttcctgccataccacggtgacagcacgatcggcaaagaccgtgtcgtattcttctacgagcgtatgcaatagatcgcttatgctgatggattctatctccgtaaactggcggttctcgatcttactgaagagaagcagcgttttgttgagttgtacgatgtggttgatggactgaatggccttgtagacgagctcgagttgctgttcactgaggtgaggatcttgcagcaagagctcgagtttgttgcggctgatggtcaatggcgtttgtagttcatgagaagcgtgggagatgaattcccgttgacgctcgaagacttccacgttatggcgggcggtgtgctgcatgacttcattgagcctgcggaattcgactatgtccgttttgccgagcgtgagttcgttcaagggtttatctacgcggaagtggcttaaccagtccaatagtttatatagcgagcggaaactgcgtgatacgatccaagtggtcacaccgatagtgacggccagcagtagcatgaagagatagacgacagattgcaggagagtcccttgcaaatcggttttttcgaatgtaggaatggatactttgagttcgtaaaaactgccattgccatcgctgaacacggtgcgcatt

SEQ ID NO: 3393 - DNA, 14086 bp, synthetic construct
  source 1..14086: mol_type = other DNA
  misc_feature 1..14086: note = Synthetic
gggggcagcgcctcctggggcgtgctcgacccgtgccctccctcaccgcgcccgtcttatagcacgcgaccgcacgtccgacgcaagcgccggtccagcgtcgaccgatggcatcgcgagggtagcgtcacgccacctggcgatcgccgccttgggacgtcgtgtcgcaggtggaaccctccggccaccccggccaagcctcgccagcgccttgcctcatccctcgaggatgcgggctgcgggcaggtgggaaaggcgagcgaggatggcggcgcgatcgggctggccactgcgcgcacccacggccgtgcaagcgagcgccccggccaccgccgcctcggcgagtgccgcttcccatgacgtcccacggtcgagcgcggccgcgaagacaccggcaaaggcgtcgccggcacccgtcgtgtcgacgacgtcgacggcgagcgctggctggtgcaacagccgcccgcgcgcggcgagaagagcaccctcggccccgagagtcaccaccaccgcgcagccgtactggcggtgaagggccatggctcgctcggccgcttcgccggagcgatcgccggcaacggtgtggagttcggcggcgttgacgaggagggcgtcgatctcggcgagcagctccgaacggagctgagtggcgggcgcgagattccaaaggcagcgcgctccgcgcgcccgggcccgggcgagcagggccgtgctctcgcgaagcggcacctcgttctgacacaggacggtggtctcgcgaccgagcaggccatcgggaacctgcgccgctgtcgcctcgccattggcgccagccgccaccacgatggcattctcgccgctcgctgccaccatcaccaccgccgtgccgctcggctgatcgctctctcgcaacaggctggtgtcgacccctgcctcgacgagcccggcgcgcagaacggcaccccaaggatcgcgaccgatgcagcccgcaaacagcaccttcgctccggctcgcgccgccgccgtcgcctggttggcgcccttaccaccatgccggaacaggaaacgcggacagagcacggtctcgccagcggcgggcagatgctccaccgggaaaacgagatcggcgttgatcgaaccgaagacgacaagcatggccgccttccccgacgccgggcaccgggtccgcacggcccggtcccgccccagcccgtcgcaggcgcggcgaaacccagctgtggcgaatccgggcgggctgcggccggcccgcccaccgcagcgacccgccttcagcgcttgctgaactggaagctccgccgcgctttccgccggccgtatttcttccgctcgaccacccgcgcgtcacgggtcaaaaagccgccggccttgaggaccgggcggagcgccggatcgaaattcacgagcgcccggctgatcccgtggcgcaccgcacccgcctggccggaaaggccgccacctttgaccgtgcagtacacgtcgaactcgccgaggcgattgatcgccacgaacggctggttgacgatcatctgcaataccggccgggcgaaatacttcgtcatctcccggccattgacgatgaacttgccggtcccgagcttcacccagacccgcgccaccgcgttcttccgaccacccgtggcataggcccgtccgaggggatcgagcttcgccttcggctcctcgatctccggctcgggacggatcgccggccgcagcttggccaaggtctcgaggccggccgtctgcacctcagccatgcgaggcctccactgcccggttcttgcgattgagcgcaccgaggtcgatgggctccggcttctgcgccgcgtgggggtggtgcggacccttgtacacgtgaagcttgcgcagcacctgctggcgcaacggccccttgctgatcatgcgctcgaccgccttctggatcacccgttcggggaaccggcccttgaggatcttctcggcccgctcttccttgaggccgcccgggtaacccgtgtgccggtagtagaccttctgctccaacttgcggccggtgagcaccaccttctcggcattgacgatcacgatatgatcgccgcagtcgagatgtggcgtccagatgggcttgtgcttgccgcgcagacggtcggcgacaaaggccgcgaggcggccgagcaccagaccgtcggcgtcgatcacgtaccagccgcgctcgatctcgcgaggcttggccgaataggtcttcatgccgcgtctttccgcatgcgtgcgcggagcctgcgagcggccccctgccgcaccgccggcacgcgcttcggatggaagggacggagccagagcccgtcgatgccgcgcccatgtagtgagcccgatggcgcctgtcaacgccacgggcgaggaagcgagatgacgccggctttcggcgggcgggcgctcgcgctaggaggaaacggtgaacgagacgaccggcggaggaggcatgcagaccatcgagctcactatggcccaggcgctcgtccgctttctcatggcccaacggacgcgcatcgacggccgcgaggtgccgctgtttcccggcgtgttcgcgatcttcggccacggcaatgtcacctgtctgtccgaggcgctggaagcggtcaaagacgagcttcccacctggcgcggacagaacgaacagggcatggcgctcgctgccatcgccttcgccaaggcgaagaagcgccgccagatcatggtggcgaccagttcgatcgggccaggagccaccaacatggtgacggcggcggcagtcgcccacaccaaccgcctcccggtgctgctcctctccggtgactatttcgccagccgggcgccggatccggtgctccagcaggtcgagcatttcggcgatccgacgatgtcggtcaacgacgccttccgcgccgtcacccgcttttgggatcggatcacccgccccgaacagattctccaatcgctgccgcaggcggtcgccaccatgctcgatccggccgactgcggacccgccttcatcgctctctgccaggacgcccaggccgaggtcttcgcctacccggcgcgtttcttcgagcccgtggtgcacgatccgcgtcgaccgcgtcccgatctcggcgagctcaggcaggcggccgaactccttcgcatggccgcacggccgctcgtgatcgcgggtggcggcgtgcgctattcggaagccgaggcggagctctccgccttcgccagccgacacaacatcccggtcgccgaaaccatcgccgggcgggcggtcctcgcccacgaccatccgctcaatgtcggccccatcggcatcctcggcgcggtctccgccaatcgcctcgccgccgaagcggacgtggtggtggcggtggggacccggctgcaggatttcaccaccgcctcctggacgctgttcgcgccggattcccgcttcatcgccatcaacgccgcccgtttcgacgcctgcaagcacagagcccagccggtggtgggcgatgccctcgtcagtctgcgcgaactctccgcagccctcggcgcctggcgggcgcccgacggctggcgggagcgagccgctcgcgaatacgcggcctggaacgccttcgtcgaggagcgcacgcggccgaccaatgccgagcttccgacctatgcccaggtggtgggagctgtcaaccgactggtgtcggagcgcgacctcgtcctcaccgccgcaggcgggctcccgggcgaattgtgcatgaactggcgagccaaggcccccgacagcttcgactgcgagttcggctattcctgcatgggctacgagatctccggcgcctggggagcgaagatggccgatccctcgcgggaggtggtggcgatggtcggcgacggcagctacctcatgatgaactcggacatctacagctcggtgctctccggccacaaactcatcgtcgtcgtctgcgacaacggcggctttgccgtgatcgaccggctgcagcgggcgaaaggcattcccggtttcaacaaccagctggaagactgccggatccgggagctcgtgcgcgtcgatttcgccaaacacgccgaagccatgggggcgatcggcattcgcgcccgcggcatcggcgagttcgaggatgcctttcgccgagcccttgccgccgaccgcacgaccgtgatccacatcgagacccatccccgcgactggaccgagggcaacggcgcctggtgggagaccgggacgccgatgcgctcgccgcgggaaagcgtgcagcgcgccttcgccgagcacctcaccggcaaacagcgccagcgtttgggcgtctaggatgcggggcccgcggcgcgcggctccgcgggccctttgcgtacgagcggtcaggcagcctcgcgggctccggcgaggaccgaccacacgagctcgggcgtggccggcatgtcgatgtgccggataccgtagtcccgcagcgcgtcgaccagggcattcatcaccgcggcacaggcgccgaccgaacctgcctcgccgcagcccttcaccccgagcggattgttgcggcagggcacttcgaccgtggagaaatcgaagaacggcacattgtccgcccgcggcaagccataatccgaatacgaaccggtcaggagctgaccacctcggtcgtagaccgtgcgctcgaggagcgcctggccaatgccttgcaccacaccgccgtgcacctggccggcgaccagaagcgggttcagcaccacgccgaagtcgtcgaccacggtatagcgcaccacctcgaccgcgccggtggccggatccacctcgacctcggcgatgtggcagccgttggggaaggtccaagcggagagccgaatctccgtctccgtgtcgagcccgccctcgagtccgggcggcggattgggcaggttgcgggcgaaccgtgcgaggtcgagaatgccgatggcccgatccgtaccggccacccgaaatgtgccgtcggcgaactgaatgtcggccaccgccgcctcgaagtgcaaggcggcaaaggcccgccccttctcgatcactttgtccgaggcatcgaggatcgccaccccttcggcggtgagggagcgcgagccgccggtgccaccgcccgacggcaaggcgtcggtatcgccctggacgatgcggatgcgttcgaagggaactccgagccgttcgtgcaacacctgggcgaaggccgtctcgtgcccctgaccgttggactgggtgccgacgtagacggcgaccctgtcatcctcctcgaacacgatcttcgcccgctcgctcggatcccccatggtcgactcgatgtaatagcagaggccgatcccccggagccggccgcgcttcgccgcttcctcgcgtcgcgcccgaaatcccttccagtcggcgcgctcgagcgccctgtccatgacccgctcgaactcgcccgaatcgtaggtctcgccgaccgcagtggtgaacggcatgcgctgcggcgggatgaaattgcgccgccgcaattccacccggtcgatgccgagctcgcccgcagcgacatccatcatccgctcgatgcagtagatgctctcgggtcgtccggcaccgcgataggcatcgactggcaccgtattggtgaacactccggttacccggtagtggacgcgctcgacgtcgtagacgccgggcagcactttgatggccgcgagggtggggatatagggcgcgtaggtatagagataggcacccatgttggcggtgacgtggactcggtagccgaggatgcggccctccccgtcgaacgccatctcggccactgtgacatggtcgcggccctgggtgtcggagacgaagctctcgctgcgttcggctgtccatttgaccggccgacccagcttcagcgcggcgaaggcgcagaagacgtactccgggtacacgaaggccttcatgccgaagccgccgcctacatcgggcgtgagaacccgcaccttctccgccggcaagccgagggtctcggcgatcacgtcgcggtgcatccaaccgccctgggtgggacagtgcaccacgagacggtccccgtcgagggcagccacacaggcgcgcggctccatggcattgaccaccacccgattgttgacgagctcgagccgcaccacctttttcgctcgggcgaaggcctgctcgatcgccgaaccatcgccatattcccaatcgaaggcgatgttccccggcgctccctcgtgcagggccgggctgctgcctgcggcggtcgcggtatcgaccaccgcctcgagttcctcgtaatcgacctcgacgagttccgcggcctcgcgggccagcgctcgcgtctccgccaccacgaaagcgaccggctcgccgacatagcgcaccttgccgcgcgccagcatcggatggggtgcctcggcccggctgctcccgtcgcgattgcggagcgggatgaggcaagggatcctggcccgcccggcgggatcgaactcggcggcggtggccaccatcaggacaccttccgcctgctgcgccgctcgcgtgtcgatgcggcggatccgagcgtgggcatggggcgagcgcaccaccacgagaaaggcctggcccggatacgcgatgtcgtcggtatagcggccgcggccgcgcacgaaccgctggtcctcgacccgtctgaccggctgcccgatgccgaatttggccacgatgctcctcccccggtgagcccggatgccgaagtccgcgcgcactctagtccgggcgacgcccgccgcaaggcccggcgtcagggagcgacgagcccgaacgcggcgagccagagcgccgcgaaggccatggacgcgagcgtgatgggaacccccagtcgggcgtgagcgagaaaaccgatcgcgactccttcctgggctgcccgctccaccgcgatgatgttggcgaggctgccggtgagcaggaggttgcccgcgagggtcgtgagcagggccaaggccaacagcacatcggccgagagtccccccgcgaggtccaaaaggagcacgacgagcggcacattgccgatcgtgttggagccgaggagggagagcggcacgagcaaccgcaggcgatcgaacaggaggccggcctcgaacagcgtggccagcagacggctggcaagcccggtggcggcaaaggcgtcggtgacggtgaacagcgcggcaaacagcaggagcaggtgccagtcgaccatgccaagcatgcggcgggtggcgagcctgcggctcaccaatagcccaccggccaccgccagcaccccttccacctgcggcagcgggctcgcgaagagcgccagcagcaaaagggtggcgaccgcggccttcaccagcccggagcggtcgaccgcggggagctcggatggcggcggcgcgataaccgcccgccccaggctccgccgttcgagccaggcgatgacgaggtagacggcgaccagcgccatcgccgccggcggaccgcagatcgcgaggaaatggaagaaatcgaggtttccggactgggcgatcaggatgttctggggattgccgatggcggtcgcggcggaaccggcattggcggcagcggcgagcgcgatcacgaacggccgcgggtcgaggccgcgggcgagcagaccgcggcagagcatcggcgtcatggcgaacaccacgacgtcgttggcgaggaccgccgagaggatgcccgaggtcgccaccgtgagggcgaggagcgccctcggcgacagccgcgcggcggcgatgcgcgccgaacaccaggcgtagaaatcgcaggcggcatactgggcggaaagaatcatgagaccgaacagcacgacgagcgtcgggaagtcgatcgccgccagcacccgcgggccgtccaccacacccgcgaggtgcagcacgatggccccgagcagagcgatgccggtgcgatcgatggccaggccgggcacgcggccgagcgccatgccgagatagacggcggcgaacacgaggagggccgtggtctggccgtcgctcatggacgggcgctccgcggctgcacggcgagccgccggaggttcctacatgttggcgtagttcggaccgccaccgccttccggcgccacccagtcgatgttctgggtcggatccttgatgtcgcaggtcttgcagtgcacgcaattctggaaattgatctgtagccgcttccccccttttccgtcgtcgacgaactcgtacaccgccgccggacagtaacgctgttcgggcccgtcgtatttcgccaagttgatgcggacgggcacttcgggatcgcgcagctgcagatggcagggctgatcttcctcgtgattgacgttcgccagatagaccgagctcaatcggtcgaaggtgatccggccgtccggcttgggataatcgatcttcggcgccttggcggcctccacgagacactcgtggtcggcatggtggcggaacgtccacggcgcccgaccgcgcagcacataggtatcgatgccggaatagaggagaccgccccagaggccgaagcggaaggaggggcgaacgttgcgagcgcggtagagctcgtcccacagccaactctggcgcaaccgctcgggatagctctccaggaggggccgatcggcaccggccgcgagcgcctcgaaggcgcattccgccgccaccatggccgacttcatcgccgtgtgggtgcccttgatcttcggcacattgaggaagccagcgcagtcgccgatgagcgccccgcccggaaagacgagcttggggatcgcctggaaccctccctcgaccagggcccgggcgccatagccgatgcgccggccaccctcgaacagggggcggatggccggatgccgcttgaaccgctgcatctcctcgaagggcgagagatggggattgcggtagtcgagcccgatcacgaagccataggcgagaaagttgtcgccccagtgatagaggaacgagccgccataggtccgccagtcgaggggccagcccaccgtgtggacgatcttgcccggctcgtgcttggccgggtcgatctcccacagctccttgatgccgatcgcataggtctgcggcccgatcccgtcgcgcaagcggaagcgttccgtcaagcgcttcgtcagatggccgcggcagccctcggcgaacagcgtgagccgcgcccggagctccataccgggctggaagttcggacccggcgtgccgtcgcgccgcacccccatgtccttggtcaccaccccgcacacccgtccgtcctcgtcatagagcacatcggcggcgggaaagccggggaacacatcgatgcccatcgccgtcgcctgctcgccgagccagcggcagaggttggacaggctcacgatataattgccctcgttgcgcatctgcggcggcgtcggcaggcgaaaggcccgcttttcggtgagcaaaaggaagcgatcctcccgcgccggcgtggcgagcggagcaccgcgctcgcgccagtcgggaaagagctcgcccagcgcgcgcggctcgagcaccgcaccggaaaggatatgggcgcccacttccgagcccttctcgaggaccacgatcgccagctcgcgaccggcggcatcggcgagctgcttgaggcgaatggcagcggtgagaccggcaggaccggccccgacgatgacgacatcgacctctaggctctcgcgcgcgatggcggccatgaccccgacccagtggctggcggccggtcgctctccggccctctttccgaagccgccgctagcacgagcgcaggccgcggaaaagcgacgaagcgccatcgcctcgcgcagcgacgaccacccacgagccccttcgatcgaccgggaaaaaacagaacgcccgcgaggagatcccccctcccctccagcgaagccgaaggggagggggtaaccctacggatagttgcctatccttgccgtggaaccgccacggccttccctgtgctaagcggcgctgttataggatcgggctgcccctttggcaaggcattttcggaggtgccgtcatggctcgcgtgctcggactcgacatcggcattggctcctgcggctgggcggtcgtggaactgcccgagatcgaccccgaaaccggcgagatcgcgggggagttcgccatcctcggctgcggagtgcgggggttccaggtacccgaggaacccgacacccgcgagctcaagaacaagcaacgccgccagaagcgcggccagaggcgggtgatcgcccgccgccgtctgcgcatgcggcagatccgccggctcctgagggagcaggggctccccgccgatcccgggcccctgcctcccggctcgccgcacgacctcgtctggcggctgcgggtggagggcctcagccgtctcctcgcaccggcggagtgggcacgggtgctcatccacatcgcccgccaccgcggcttccgcgcgaccagcaagcgcgaccgcaacaggggggccgagagccgcctcgccgcgacgccggcgtcggagccggacgagtccctcacctacgcccagcgggtgatgcgaatagcggcggcggaaggctgctaccgcaatcgcgtcggacggtccgagccgaccccgccgtcgcgcgacgaggtggagcggcaaagccgcgcgcgagcttttggcgtcgatcgcacgccgttgcgcgacgaggtggagcgggaagcccaaagactgttcgaggtccagcgccgcttcggcaatcccgcgacttcgcccgacttcgagcgccagtatcgacataccgccttcagccagcggccgctgcaggggatcgcggagctcgtcggccgctgccgctttctgccggaagagaagcgcgcccccaaacaggcgccctccttcgagctcttccgcttcctgcaaagccttgctcacttgcggctggtggaaagcggctcccgcgagcggccgctcggcgcggaggaacggcgccaggcggaaagcctgttcgccacccgcaagcacgtcacctacgcccaattgcgcaagcgactgggtctggcgcaggatgtccggttcgccggcctcgtctcctcgcgcaagaatcctgcgcgcaagagtccggaaaatcccgaagacaagaccttcgcgagctgcgagggttcccatctgctggccgaggccctcggcagccaacgcttcttccaactcctcgaccaggcgcccgagcagctggaccgggcggccgagatcctcatccgcgaagaggacatcgccaccatccgccagcgcctggcggaggccggctttcgccccgaggaggtgtccgccctcacccgtgacgaggtgctcgacaccgtgagcggcttcaagggggtcggccatatctcgaccgccgcctgccgccgcctgatcccgcatctgcgagagggcctatcctataccgaagcctgcgcgcgcgagggctgggatgcgaccgccgagggcgacctccgcctggaagacgtgcgcaatccggtggtacagaaaatcctgcgcgagagcctcaagcagatcgacgtggtcgttcgcgagttcggcgaaccggatcgcgtgcacctcgagatggcgcgcgacatcggcaagagccccttcgaccgccgcgccatcgccagggccatccaggagcggaccaaggaacggaacgacagagccaaagaattcgagaacttgttgaaccgccaaccgaacgacgaagaattgctgcgcttcgaactgtggaaggaacagggtgggcgctgcccctatacctttcccgacgagtccgcctacatcccggtcgaagccctgatcgccagcgacaatcgggtacaggtggaccacatctacccctattcgcgctcgggggacgacagtttccgcaacaaggtcctgtgttggacctcggccaatcagcaaaagcgccggcgcacgcctttcgagtggttctcccaggaccggcccgatttgtgggaggcgttcgagaagcgggtgcaacacgactttccccacatgcacaaggagaagaagcgcaagctcctcgcccgcagcttcgccgagcgcgagaccgaataccggcggcgtcatctcaacgacacccgctatgccatgcgggtgctcgccagcgcgctgcgccagcgctttccgactgtcggcacacggcgcgtgttcgcgcggcccggacagatcaccgccatcgtgcgccgcgcctggggtctcgattcgctcaagcggaacaacgagctcggcgaccgcgaccatgccctcgatgccatcgtcgtggcctgcaccagcgagagcctgctcaaccgcctcacccgtttgcaccaaaggctcgaggagctcggccgcggtcgcctcgtgccggagatcgaaacgcccctcggcagcagcagcgaggcgcgcgagcgctttcgcacgctggtgaaacgaacggtcgaggcggtgctggtctcgcgcagcgagacgcgacgcggacgcggtccgctgcacggcgatacgctctatgctttcacccgccttcccgacaactccgagatccagtacgaacgcaaatacgtatgggagctgacccgagcggacctcgaccgcctcaaggatcacgacacccggggccggagggtgcgggaagcgctcgaggaatggttcgagcgggcagaacgcgccgagaaagatctcggcaagacgtcccgcgccgagaaactccagcacttctggcgccagagcccgccccggatcggccagggtccggcgatccgacgggtgcggctgaaacggcgcaccaccgccgggatcaagttgcggcggggagagggggtcgcgcacgccgaccaggagacgatggtgcggatcgacgtgttcgaacatgacggcaaatattccatcgtccccatctacgcctggcagctcgcccttctcgacagcccgcccaaccgcgcggtcaggagcggtaagggggaagacgaatgggaggagatcgggccagagcatcgtttcctctggtccctctatcccgggtccttcatcaaggcggagaccagagacggcaaaactttcaagggttactatcggtctttcgatcgcaatacggtgcgaattagcatcactccccctcacctctgggatagccgcgccatcgagcgcttcggcagccggacgctcgcgcgcttcgagaaatggcatgtggaccggctcggccggctgagccgcatcgcgcaggaggtgcgaacatggcgtggcgagccgtgctcctgaccggtcgcgcgcggctgcggctcaaccagcaatgctgcctcgtcgagcgcgacgagggggagatccgcctcgcctttgaggacctcgccggggtcgtcctcgacacccccgaggtctccctctcctcggcccttctcgcgcgctttgcgcgcgagaaggtgctcctcgtcacctgcgacgagcgccatctgcccaacggcgccctgctgccgctccagggtcatttccgccagctcgccacccttcgccggcagctcgcccttcccctcaagaccaagaaacggctgtggcagcggctcattgccggcaaggtggcgaaccagggccgggtgctcgcccgcttcggccacaaggaggcctcggctcttttcgccatggccgagcgggtcgccccgggcgatcccgacaacatcgaggcgcgggcagctcgcgactatttcgctcgcctcttccccgacttccgccgtcgaccgcgggagggcgacctatgcaacgccatgctcaactacgcctatgccctgctgcgggccgggctcgcacgagccctcgtggctcagggtttccatccagccctgggcatctggcacgacagcgtcgacaaccccttcaaccttgccgacgacctcgtcgagccctggcgcccactcgccgatctccacgtggcccaccacttgggcgcgcgccaatccgcgcccgatgagctcaccaccgaggatcgccgtgagctcgcgcggcttttggtgagcgaactgcgcctcgacggccagatcaccaccttgtcctgggcgctcgagcgcttcgtcgacagttttcttttggccatcgagcagcagcgcgccgaggctctgctgcttcctgaaccggtgtgagaccatg

SEQ ID NO: 3394 - DNA, 23423 bp, synthetic construct
  misc_feature 1..23423: note = Synthetic
  source 1..23423: mol_type = other DNA
ggcgcagtatccttattatcggattcaatcacaatatcagaacctacggaaccgtcagatcccgcgacctcatttgttttcacggtaactactgttccgctctttgcaacaacagaaggagaaatttcattttcctcataagagtacgtctcatcatatccaaaaatacactgagtacccttaataaacaatcctcctgcaaaaataatcgagccgacagtatcggtgccggtttcctcgtcatgctgcttttgggtaacaatttttgaggttgggtctactattacagcacccttaaccgtcaaattagccttaacggtaactgtgatattcgctgcaatactccatgcctcatttgcgttgataacagtatccttgtcaattacaagattttcagaaacaatttgagttattttaattgtcttcggatcagtaccgctttcgccggttgcaaaagaaaaaggcataacggaaaatacaataatcaccgaaatgattatcgcaactatccgactgaaaatctttttggctgaacacttcatcatttatcatcctttcctttgtttttatttatattttttgttgctctgtaattcagaccatcaaaaatgctgtgtaacgaaaagccccataaggctgcaaacattccggcaatttgcaaaactgttttattgactgattcaatcgggattgaaacaatgaccataatcaatccaactgcaaacaagcaaaacgcaacaatggattctttgtttttaaaaaacgtaattataccgggaagctttccttcaacttttattttttctttttttcgtgtttttgacgctaatataaccgatgcgattccaagagccagtccgccccaaaacatggcaacaattatgtagctcacaaatttctttccgtcagtaacatcaaagttttccgacagaggggtcaacaaaaccgctccggaaaataatgtaaaagcaacaattgaaagaaaatttaactttttaagcttttccaatttaatctcatccctttcaataaataatttcctgagtgtttataagtttgatctcttgcaacaaggaaatatcgaccgtgataatgtcaatatcagataacttcgcaccgtccgccgaagaatccgaatctaatacagttgtttgatcctgaccgttcagaaccgtcgtctcaccggcacccggatttagcagcgatgtttcatttgcttcacttcccataacggaagcttccgatgtatagccattatcttgagaaagtaaagttgtttcagaattttcttcctgtccgttttcaagtaatgttgtttcttcatagcctgaatataatttctgtgaagcaattttttctgttccgacgcttcctccgatagctgttgctctgttctcaagaattctgccggatggtgatattctgtcggtcagttttccgcgttttgagttaaccacacttggcttataagccttattccctgttttttgattttgcgatctgatattctctatttctcttttcgctgtgtgtcccgttaagtctcctataacctttactatgtctaaaacaaagaacaaaacaacactgagcacaaagaacaatccggatataataaagcatatcaatgccactatctcaaatgtactcataaattcacctcttgacgatatgattaccttttatttgcatactcaaactgttttcttgctttttttacagattgcaaaacatccttagaatcttccgagtttataccctcaagatattttatcatctcatcataagcttttattaccttgtcatagctgtatgaactaccgagacttttctgcatttcttgattgttactgtataatatatagcttccgtatttgcaaacagtaattttaaatcgctcgtctattgaatcgtcctttaaatcatcaacaaaatcaccgctgagatatttccagcttttcttgtaatccttacctgcatttatatccgcaatgcttgatccggcggactcctgtgaattgttattgttcaaaagatcttcgctgaaatctcccaaatttaatagaatgtttattacttcatcggaatagtttatatcgttcaagaattctttgttggatttttgcgcatactcttttgtgttactgaaccatgttcttgctcttgttgatccgactacagaatctgcatatttgccgtcatcactgtaatagctgaaaattgtaagccctatgttatagcagatctctgctttttgttcattgctctttatatctttttttataagaggttcaagtgcatttattgtctgcatttcattgggagaaataattctatctttagcataaatcattctcaattcatcaaatgcatcaaacgaatcggagtattctgttttaatcgcatttatcaggttttcctctctgacatcatcgtgatacgaggtattctggccattttcaagataagaaaaatattcgtttttcttttgtttactttccaatgataagcacccgaacgctccgatcaaggctgcaagcataaccgaaaacgatgaaataaacagattcagttttttcttctgcttttttcggtatctgtcatcaatttcttcataatgctcaagtgcgtacatcaactcggaacacgactgatatctatcttccggatttcgctgagtacattttataattattctctcaagtccgcttgaaagttgtggattgattgatctgataggcaatatctcatacggcggctcacacggattgcaacccgtaacaagatgataaagcgttgctccgagacaataaatatctgttcttgcatcggtctgtcccattccgccaaactgctcaggtgccgcatatccgaccgtgccgagacatgttgtatcggcaagatttttttctttaaactctcttgccgtgccaaagtcgatcaaagtaatatttccatccggcttaagcataatatttgcaggcttcatatcacgataaataatcgctggattccttgtatgaagataatccaacacatcgcaaagctgttttgcccattcgatgacaaattcctgcggttgcgctccatattcttcaagagcctgacttaacggattaccttcgatataatccataacaataaggaacgtatcttcattctcaattacatcaacgatgctcggcaaattcggatgatccaatcttttaagcatttcggtttcaacaataagtccttgtcgaacaacttcaaagtcttttactccgtctttacgcacctctttgattgcccatgttttatttgctttttcgtttatggccatgtatacgacgctcattccgccgtgaccgatttcactcagcaccctatatttaccgtcaaccaatgagcctattttaagcatcattatccctccagatatgaacgaatcaaagcaactgtaatattatctctctccatccttgctttgtttgtttcaataagatatgttgaattggaatacatggtctcctcgtcacatagtacagcaggggaaaatgcatttagtatttcttcagcagttatttcgtgtctaaaaccgtccgtacaaagaacaaacacttcgtccggatacacgtccccaaaaaagaactccggatatactttttcggatgctccgacacattgtagcagtatacttcttcgcgggtcattttcggcctgttcctcggttagcttgccttcttccacttctttagccaccaaagtttgatcttttgttagcaaatacaagctatcggtaacagcataagctcttgtatctccgacattgactatcaaataatttttctgcgaaataattatggctgtaattgtagtacccaaagaaactccgtttttgcgtccgaaaagccttattttttcgtttaatgaaaaaataagatcgttccactgagatctcacaaaatcattgttgattccgccattattatcaaatgcaaacgaaatattttcttttgcccatttttcaaaagcggttattaccgaggcgcttgcaacctctcctttttccaatccgcccattccatcgcaaagtacggaaaaaacagcttctccgaacgaagtttgaaacttacacatgaacaagctgtcttgatttgttgttttttttataccgatatctgtaacaccggaaattgcaaaatccaattttatccctcaattaccgttattttttgacaataacctattttgaaggtattttatcatgtatcattgcaagttaccataaactacaacaatagttgagccttattttacaaaaatgtcaatcattgttgcttaaagtaattctatggcgtaatatagtttttgatattattattataaagttgataaaagtgtaactgattctcaatagtataaatctgtaccttttacacggttcaagatttaaccgcgtcgttcatagtgctatataacaactaaaggatccgtctcttgtttaaaaaacatataatcaagagttttctgtcgaataaatacagtgttatctataacaaaagccacctgttctccaaataagaacaagcggcatcatttttgtatcatatgtattggtttttatatagtgattatacaatacaattacgctctgttaagcttccaatctgaacaaagaactgcaatttccaacaataaattgtgaattgcagttctttgctgtttattactcaaccgtataggtcaacgttgttgcatatttccagccgtcggtcggggttttgatatagaccttgaagctgttttcgccgatgtggcgaggttttacggaaaggttgtaggtatatgtcatgttcgtttcgttgagcactgccattgacgaattgacggtggttgtcattccgtcctcgtactcaatgcgaaccttgtttacacccgagccggtaacgattttgcagtcaacggcactttgcttgccgctcgtttcggcaagctccgcagatttcagtgtcgtgtccgaataaagcgtcgatatgctgaaatcgtacgtttgatcttcccaaacgttgtcgtactttgcatgaattttcaagctgctgttcggtgtgagtcttgtcttgaccgtccaaacctcatatgcgagatcagccgaggtgtcgtgaacctcattgccctgctcgtcataagcctttatagcaacattgcttgcgtgtcttgaaaacgttcttgtcgctcccgttgcttctataacctggagctttaagggcctgccgtcaaccgaaaagctgtagtcatttacactgctccatgacggagtatatgtcactcccataaccgagctttcggaatccagcggaatgaacgtgaagccgttttcgtttgcatacgtttccgccgccgttcctctgtagccgtagactgtgaagccgtcaatcgtcttagaatcggaaatatatccgaaagccttttctcctatcgaggttactgaagcgggaattataacaaacttaaaattattatcataaaaggctttcgcgccgattgaagaaagcccgctgcggagagttactgctgccatctggtagcttccaaagaaagcttcttcaccgatagatttaacagacgcaggaatatcaagcctctttatgttacaatttctgaatgccgcatacggaattgatgttgtatttcctttaaaattcactgtttccaggctgttgcaatcatcaaacattttaggcacaacatcgcagtatatgtcagccgttttaagcctcaggcaggaggtaaaaataccttctgcattgtctttgaattttacatttgcaggcaaagtcaagctttcaattcccgtaaaattaaaaacctgtgagccaaaaacaacatctcccgaaccgataaaatcaattgttcttatataaccgggagcgccgtttgcccctgcgaaaccgtaatcgttaattgtaatcggagcaactcctcttgcgtcaaatgtcagtttgttgatccaataatgatcctccgaccactcctcatacagctctgcatattgacgttcttccactactgctcctgaatgtaccgtaacatcatatacaggcgaggtagacgttgtatcttcaaatcgttcaaattcaatcaaatccagcggaacaaatgtaaatccgttttcgtttgcatatgtttccgctgccgttcctctgtagccgtagattgtgaagttttcggcttttttgccactatcagaataaccaaaggctttttctccgatttcggttactgaagcaggtattttgacagattgattggcaaatttgcatataaaagcttgtttgccgacacgttcaagaccgtcgtttaactctatcaagtaaggtttatatgaattgaagcactcttcgccgatagatttaactgtcgaaggtaatgtaattttttcaaaacttccccaagtattaaaagccaaattgccaatagtttcaagtccctcgttgaactttatttccgaaacagtggacaaatcaaaggctgaatcgccgattttcttaacagaggaaggaatttcaatttttttcaaacctactgtaagttcaaaagcagctttcggaatttcgttaatatcattatctgctgtaaaggttacgttttcaagataattacatccataaaacatgctctcacacatagagcaaccgattgtaacatttttcactttactttcagaaaaaacatcacaagccccatcttcgaacttaatatttgagggaagattcaaatcggttatattggtaatagcaaacgcccttgagccgagtattatgtcacctgttccgttaaatacaatttcattcacggtacaaggagcaatgcaccctgaaaaaccggagtttttaactataatcggctcagaaccaaatgcattaaaggtaaccttgtttacatctttaaagttcgggtcataattggggtgaaattcttcactacgaccggtataatactgttcctcttcaacaatatctccgctgttgaggacaacatcaattttctccaaagtttcagcataaacatttacacttaataacatactgataataataatgctcgccattgtttttaaccaaaattttttcatgctcagtctccccttaatttacaatcctttttactcaaccgtataggtcaacgttgttgcatatttccagccgtcggtcgaggttttgatatagaccttgaagctgttttcgccgatgtggcgcggttttacggaaaggttgtaggtatatgtcatgttcgtttcgttgagcactgccattgacgaattgacggtggttgtcattccgtcctcgtactcaatgcgaaccttgtttacacccgagccggtaacgattttgcagtcaacggcactttgcttgccgctcgtttcggcaagctccgcagatttcagtgtcgtgtccgaataaagcgtcgatatgctgaaatcgtacgtttgatcttcccaaacgttgtcgtactttgcatgaattttcaagctgctgttcggtgtgagtcttgtcttgaccgtccaaacctcatatgcgagatcagccgaggtgtcgtgaacctcattgccctgctcgtcataagcctttatagcaacattgcttgcgtgtcttgaaaacgttcttgtcgctcccgttgcttctataacctggagctttaagggcctgccgtcaaccgaaaagctgtagtcatttacactgctccatgacggagtatatgtcactcccataaccgagctttcggaatccagcggaatgaacgtgaagccgttttcgtttgcatatgtctccgccgccgttcctctgtagccgtagattgtgaagccgtcatatttcttatactcgtttttttctgtagtataatacccaaacgctttttccccgatagaagttacagaagcaggtattgtaacggatttaagcgaacggcaaccaagaaaagcattttcaccaatagtctccaagccatcgtttaattctaacttcaccaaacttgaattatcatagaagcttttttcgcctatactttttaaagtcgaagggaatttcaattcttttatagaattactgttttcaaagcttctgttaccaatgctttccaagccttcattcaaattcactctttcaagataaaaagttgagtgaaaggctccgtcctcaatctcggtaaccgaagacggaatagtaatactgagaagaccgcaggtatcaaaacagtcaacgggtatttttttaatgttttggtttaaaaaattaacgtaaattaaagaccaacactcctgaaacattgccggacacaaatcgcttcgaattgtcgcccttctcaaaaagcttgctccgaatacacactctgcaccgttttcaaaaactacattggatgggatatcaatatcggtaatgcctgtgtagcaaaacgcaaaagaactgagaatgattttacctgttccgtttattacaaggcgctcaacctgtctcgtaacactgccggaaaaagcggatctttttattacaatcggttcttctcccaatgcgtttatagttaccgtttttacgcacttaaattccggatcatattctccgttaaatctttcctcagaatactgattcgcctcaacgacatcgccgctgttgagtgttacgtcatatgtcggataatcggaagcatagacgttggttgttatcattgccaaaatcacaatgataaccaatataattctcactctttttttcatattgaatcccatccttaactgtttatttagcaataatgaactaattcatcagtccactactgttccgttatgaatctttatattatcaggcacattaaaagatgtatagcaatcataactacctgatataaaaagatttgcaccaccattatttatgaagtagaaagctttatccggcacatcattgttgccaataggttcttctataccgtaataggctttacaattgtgaaaacggtatgtagatttttttccatcatttccttgtacaaaatatatacgttttttactgaaaatccttctgaaattactgaattcacaattatcaaaaagaaaattccatgagaacatacaacttttattaagcgaaacgtcataagtttttattccgttattttcccaaatctcttttgtagtattaaaatttctttctgtaatatcaataaacattgcttttcttccttttaaaatatatttttaaaagtcgttaaaaataaccgcatattgatatttattgccaacggcattttgcgccgttaggattagctccgacaataaaaatcggaatcgttgataaagtcaaaaacagacttcaacagtcattgttaacgacttaccatagcatcattttttcggaaatgaacgttcaaagttcccggatcagcttccctttttgctaatctgtaatttcattatatttgaacatttgttctttgtcaatggtttttgttaattttgttcacaatgttattgattttgttcacgattataattttatttcggattttttgtttaatatgtatagcgctttttgcatacttgtaccgacaaaaccgcattgtatatatgattctccttttctccgctttttcacgcttttattacatttattgtagttttaatctgaaccttttgctcacaaaggctctctaaaaattaaacatcacagtacccataaaggtccttataaatttgactatttttcctaaatataatataatgaattgaaaaataaaaaagacagccaaatggctgtctcagttgcagattagtgtaggttactgcaataccctacggcgttgtcttttgcaagactcaatgccttatctcagagctgttgatggatattgataaatttgtactatcaaatagtttactgatggatattgataaacttgcacatcaatttctgagttcttttttattatatcacactttaaggatttgtcaagcggaggagattttgttatgaaatatgtaatcggtatggatatcggaataggttcaatcggctggtcggtaataaggagcgatgctgattgtaagcgaattgaagatttcggtgtcagaatttttgaccccggtgaaaatgcaagcgacagaaaaagcaatagccaaatacgccgtgagtaccgttccgtcagacgtgttcttcgcagaagaaaacacaggaaagagcttctcaaagcacacttggagaacatcggtctcacaacaattgatagaataaatgagtattttaaacacgcagacggcgatatcatatcgcttcgagttaaagggcttgacaaaaagcttgcccctgaagaaattgcggcttgcttaataaacattgcaaacaggcgcggctacagacctttttatgaaaatgaggaattgagccaatatgaaaagacatcactcaacaagacccggcagtttatgctttcgggagaatatcgcacgtctgcggaaatgatcctgaaaaacgagcaatttgattccgaagaatcggaatacagatcatacagaaatcgttcgggaaacgaagaaaccgttttaattgagcgcaaatggctcagggatgaggtcgaaaaaattcttaaaaagcaaagcgaattttacccttgcctgaacgacagaaacactaacgcaataaaaaggattatttttgaccagcgcgattttgaggacggacccggggataaaaacgacccgtttagacgctacacgggatttttggagtcaatgggtcaatgccgcttctaccccgatgaaaaacgaggataccgagcaaccttgacagccgatacatattctcttgtgaatgaactttctcagtacagttacgttgatgaaaacggatgttttgttttcgactccgcactggctcatgatttaatcgcatcggcccttaaaaatgcaaaatttaccaaaagcgattttaataaaatatgcaaggcacacggcatagttccgatatacggcggtaaaggtaaagacacggatataagcagatgctttaagtttctcaaagcaattaaaccaattcttgaagccgacggttttgactgggaaaccgtatgcaacattgatactgcaagcgacccggacagtattttaaaccgtatcggaataattgtatccgaaaatataacacctgcaaggcgcaaaaaagccctcaagaatcttaacattcttaatgacgattcgattacggcgctttgtaattacaaattcggagggacttcaagcgtatcatataaatatatgtcgggtgcaatagaggcgtttcttaacggggatatctacggaaagcatcaggcaagccacatagaagaaaccgcgaccgaaagcgttaaacataccaaactgcccgtatttgataaagattttgagttctttaaaaatcccgttgtgttcagagcgatcaacgaaagtagaaaggttataaacgcaatcatcgaaaaatacggttctccctctgcgataaacattgaagtcggttccgaagtaagccggagctttgccaacagaactgcagataaaaacgaacagaccaagcgcatgaaagaaaaggatgcggcgaaaaaagccattgccgagcttctcggagttgatattgcaagcgttacatcaaaaatgattgataggtactttttaggcgaattgcaaggctggaaatgtatgtattcaggcaaagaaataaacaaggaagaatgtctcagaggcagtaagacatacgaaatcgatcacattgttccattctcgctgattttggataacacgctcaacaacaaggctcttgtcttgacaagcgagaaccaattgaagaaacagcaaactccgctaatgtatttaagcggcgagcgaagaaaaaatttcatcggaacggtaaatgagctgttccgtgcgaaaaagataaagaaaaagaaatatgcttatcttttacagcctgatctgaacgacgaaaagatgtcagaatggaaaagccgcaacctgaatgacatgcggtatatttcacgattcatggtcggatatcttaaagaaaatctcaaatttgacaactcctcaaaatcggagggtcgttggcagaatgtctatgccgttaagggctcactgacatcaatgttcagaaagctttggcttaacgaaacaacatggggcagagcggataaagcatcgatcaaagccgaaacctaccttgaccatgctgttgacgccgtcgttatcggcaactgtctgcccgtgtatgttgagattgcacaggtcaatctgcgtctgcgcgacatatataaatcaaacggcagacaatttgttgccgaatattgggattgcttcaacaagggcgttgaaatgatcagccgttactataacattgataaggataccgttcgcgcttttctgaagaaaagtgatcgtattccgtcgctgattcccgaccttcgcgaagaggttgaccgcagatttgttgaccatgcaatatacagcaagtatcaaaaagagatagcagaccatgagggtaaaaagttcaaagagccaacatatgaggaagccgaacaggcttaccgaacctcaatggaaaatctttatccgacagatcttcagtttgcacacagtctctctatgccgcttatttcctgcaagcccgaaaggaagttcagcggaaagataacagccgataatcccgtaaagcttcgtgaaattgacggcaagctttatacattaagtaaaaaacgaatttatagcgcagctgataaggacaaaatcaagcgaacagatatcgaaaaaatttacacctcggatgccaacctaattgcttatctcatcgagctgtttgacggggcaaaagacacagcaactcttcgcgatattatgaaagaaaatggcatctcggaaatacgaaccaagaacggcaacgccattcgcaaactcactttgagaaatatatgcgacaaggatttcttaaaaaaagaaattgacgagaacaatcacacctaccttgacacagctaaatactactgcgttgaattgtataaagacatcaaggataaactgcgggttcaaggaataaaacgagccgatataattccgcaaaatggcaagctctgtcttgctccgtggtataagcagcccgataactattttaagcatgtcatgtaccttcaaaagaatgattatttgaaagtctataaaaacggtaagctttcattctgcggatattaccgttcggcagcaggacttacaaattccaaggttcattttataattgataatcagcctgaagataaagagaagtatattaccttaaaattggaagtaaaaaaatatcctgttgatattcttggaaaaatcggaaagaaggaaattaaatgtggagaaccgttatcgtcagcaaaggtgaaaaaataaccgtaaaaaacggttggatgatcgtgtatggtgacaatattgaaagtcacgttccaatcgaggatatttattccgttgttattgacaaccgtgccgcctatatcagtgtccaaacagttacgactttagcgcgggcaggagcggcagtatatttctgcgatgaaaagcatattccgactgccgttaatcttccgcttaataatcattgcaaaccgtttggtgtctttaaaaaacagcttgatatgtcagatgatttcaaaaaggctgtttggcagaaaattgtcacagcaaaaataaacaatcaatgcaaatgtctgtcacttgcaggtataaaaaaggaaagtatagatcccatcaaaaatcttgcgaaacaggttactctcggcgacagcactgggaaagaggctgctgcggcgaaattgtattttcccacccttttcggacctggatttttcagatatttggacgaggtaacaaatgccgccttgaactacggctatgcaattatgcgttcaagtgttgccaaaactcttgttgcatacggttataattgcagtctgggaattcatcacagaaatgaaaccaacccattcaatcttgcggatgattttatggagccgcttcgtcctgttgtcgattattgggttgattccaattgcgacgatcttttgatttccttgacaaacacaaatcgtaaagagcttgtcaatcttatcaatacaccgattgattttgacggtaaaaagatgcggatacgctatgcagttgaccgatatattcaatctttcaccacggctgttacagagaacgatccaagcaagttgatagttcccaaactgataaaaccaatatttgattttgaggatgaattggatggttaacagatttatgagaataattgtgttttttgatcttcccgtaaatacaaaatcaagaagaaaagcgtattcgacttttcgcaaatatctgattcaaaacggctttgtcatggttcaatattctgtatattcaagaacagtacgaaattatgacgatgctgcaaaatacaaagaccgattgtctaagaacctccctcccgaaggctctgtcagagtaatgacggtaactgaaaagcaatacgattcgatgtcaattcttgtcggcgagaagacaaaagaagaaaattatcttgacagccgagatatcattgaattataatgaatatggtttttaaaagtcgaaaccgcaataaagcacaatatattgcggtttcggttctctgatggatattgataaatttgtactgaaatggcttaataatcaagtaactcgcagtttcggttctctgatggatattgataaatttgtactcaacagttgtggagtcatattgaacaacagtttcggttctctgatggatattgataaatttgtaccgagccgtttcgatagcattaaacgtgctagtttcggttctctgatggatattgataaatttgtacaattggtattgtataaggagatagtataatgtttcggttctctgatggatattgataaatttgtacccatgaaaaagtttctaatatcttcttctggtttcggttctctgatggatattgataaatttgtacttagacaaaagtatatttcttttgtatcatgtttcggttctctgatggatattgataaatttgtacatacctgctgcgtttaccctcgttcgggatgtttcggttctctgatggatattgataaatttgtacagattgcttttgatttaccgagagcaaaccgtttcggttctctgatggatattgataaatttgtactatcgggttgctcatttgtattctccttaagtttcggttctctgatggatattgataaatttgtacaaaaggagcttgaagctataaaagatgaaagtttcggttctctgatggataaaattaaacaagatttgtactacacgttaaaggctgccatactcggcggcctttttcacgcttttattacaactaattgtgaaaattaacagtttttgacccgcaccggttagtttattctaactgagaaaagttgcaaaaatgattatattatagtataatttgtttgaatggttaaaataccattatcaggatttagtcattgctttcaactttgtttaaatccaagaaaacaaaaagaaagtcaggcgatttttatgaaaactgtttatgcagacaatgctgcaacaacagctctctgccctgaagctcttgacgcaatggtagattgtttaaaaaacaactacggtaacgcttcaagtctgcaccacatgggtcaggaggctgccgccgcagttttgcaggcaagacgtgacattgccgacgctatcggcgccgatgtgaacgagatttacttcacctcgggcggaaccgaagcggacaactgggcaatcaccaatgccgcacatctcggcgagaaaaaaggaaaaaagcacattatttcaacaacgtttgagcatcatgccgttcttcacacgctgatgaagcttgaaaaagaaggctttgaggtaacctaccttgatgttcatgaggacggctacgttcgtcttgacgagtttaaaaaagctctcagagacgacacctgccttgttacaataatgtatgcaaacaacgaagtcggaacggttcagcctattcccgaaatcggcgcaatttgcaaagaaaagggcgtttatttccacaccgacgctgttcaggcagtcggtcatcttccgatcaacgttaaggaacagaacattgatatgctctcgttctcatctcataaattccatggccccaagggaatcggtgcactttattgccgcaagggtgttcccctcatgggcttcatgcagggcggtgctcaggaaagaaacaagcgccccggcacaactaacactcccgccattgttgcaacggcggcggcgctcaaaaaatgctgtgaggacatggacaagaacattgcctatgtcagcaagttaagggacaagcttattgacaatatccttgaaatcattccccgttcaagagtaaacggaggacgttcgccccgtctgcccggcaacgttagcttctgctttgagggcatcgagggtgagtcgcttctgcttcaccttgacctcaaaggaatctgcggttcctcgggttctgcctgtacctcaggctcactcgacccgagccacgttctgcttgcactcggtttgcctcacgagattgctcacggttcgctccgtctttctctctgcgaatacaacaccgaggaagaaattgattatatcattgaggagcttccgaaaatcgtttcgatgctccgtgacatgtcccccgtttgggagcgaataatgaaaggagaggactactatgctgtacagtgaaaaggtaatggaccacttccagcatccgagaaacctcggcaaaatggatgacgcggacggcgtcggcgaggtcggcaatgcaaagtgtggagatataatgaaaatgtacctcaaaatcaaggacggtaaaatcgaggacgttaagttcaacacgttcggctgcgcttcggcgattgccacaagctcgattgcaaccgagatgatcaagggtcagaagattgaggacgcactcaagctcagcaacaaggctgttgttgaagctcttgacgggcttccgccggcaaagattcactgttccgtgcttgccgagcaggctgttaaggcggctctcaaggattattacaccaagaacggtcttgagcttgatccgaacgtattcggcagtgaatgcggaagcaactgcgaaagctgcgagggctgcagccgagagggttgagccatgaaaaaggctatgattgccatgagcggcggagttgacagctccgtcgctgcttatctgataactcagcagggctatgaagcgatcggcgttacgatgaagctttacaacaacgaggatatcggtataaaaaaagaaaagacctgctgctcactcgacgacgttgaggacgcaaggagcgttgcaaacaggctcggcataccttattatgtttttaattataccgacaattttaaattgcaggttatcgaacgcttcgttgaagcatatcgcaacggcagaacgccgaacccgtgcatcgactgcaacagatatatcaagtttgatcagctaatgcacagagcaaaggaattgcagtttgattatgttgtaacgggtcactacgctattaacgagtacgatgaaaaaaaaggccgctggatactgcgcaaggcgaccgacgacacaaaggatcaaagctacgttttgtattcactcacgcaggatcagctcagcagaatcctttttccgctcggcagaatgaccaagcatgaggcgagggaaatcgccgaagcgcagggctttgtcaacgcagataagcacgacagccaggatatttgcttcgttcccgacggcgactatgcccacttcattgagaattggtgcggattcaggttcaccgagggtgattttgttgaccatgacggcaattttattgccaaacacaagggcataatcaactacacgatcggtcagcgcaagggcttgggcattgcggcgaaagcgccatactatgttgtcagcaagaatcttgcgaaaaatcaggtcgttctcgggtcaaatgacgatttgttctctaatcaccttgaagcaacggatttgaacttcatttcgattgaaaagctcaccgagccgatgaaggtcaaggcaaaggtcagatacaggcaaaaggagaccgacgccgtgattactccgctcgaaaacggaaacgtcagcgttgattttgaaacacctcagcgtgcgattgctcccggtcaggcggttgttttctatgacggagacatagttgtcggcggcggaacgattatataaattaaacaattatatatttatattatatattataaatgtataggattcactctccctgtttttgtacgggagggtgaatttttatcggctgatttacttgcatccatttaggaacgccgaaattgcgcatataattattaggtagcggtttttcgatagaccgttacctttttgttttttaatcgtgcctgacgaacggtataaacagttcctgttgattttccgtcccagaaagctaaaatttcatcagcataatcaacaatttgaatatttcttttgagcggtgcaatacgaccgtacagctgataattcggcaaaaattctgttagcttaatgccgttttccaacgcataattccgtgcacaggtgtcaataccccttgcaccgcctgaaacaatttccgtaacgccggtcggaatgtattttgataaattacttatatacagacttcttgaaccgataattgcaagtttcataacatcacccataaaaactgttcgtcattttagcgtcattataacaccatttttgatatgacgcaataattgcgtcataataatgttataaattcatgaggtgattattatggaagataaacttttgagatatacgctccgtgttgacaggttattgtttaagaaattcagatatattgcggagtccgagggtcgttccgcaaacaaggaaattgagcaatatctgaaaaagcgtgttgcaaaatatgaagcggaaaacggtaagatagatgttgattaaggacgttatagttctgcggtttaaaaacatctgtgcagaaagaaacataaaatacaatgagcttgccgttcgttcgggcgttactccgtcaacggtttacagtatgatggacaacagacgccgtgacctttcggtcattaccctcaaaaagctctgtgacggacccgacatgacaattaccgaattttttgatgacgatattttcagaagccttgagcaggaaatattctgacagaaacctccccttgattcgttcaaagggaggtttctgatatcccccatttgtaaatacaccctaacaaaactatttcattttctttacaaataacggttgttttttgtcacggtctgagttataattataaaggttaaattcgcttataatgcaatgctgcgatttgcccgtttaaaatataaatgaatattcatttctctgtgcttacaaattatcgagcctctcaacggcataattcccagtttattgcggttttccacacgaatatttgtattatattgaatgaatatattttgtattattcttgacatattctgtatatttatgtataattataccctattaacagattcagaggtttaaggcatgaaaaaggtttttattgacggcaaggccggaacaacaggtctcagaatttatgaaagactatccgaacgatcggatattgagcttatgctactgccggatgagaaacgcaaggacgttgaggctcgacgcgaagctcttaactcctgtgatatcgcttttctttgtctgcccgatgcggcggctattgaatccgtcggattgattgagaacgaaaacgtcagagttctcgacacctcaacggctcacagaacaaatcccgactgggcatacggtttccccgagctttctccggcacacagagaaaaaataaaaaattccaaccgaattgccgttcccggctgccatgcaagcggcttcatctcacttgtctatccccttgtcgaagccggtgcgatctctcccgacacgcttctgacctgccattcgctgacaggctacagcggcggcggcaagaaaatgattgccgaatacgaggatgccgagcccgatgttgcactcgaatcgccgaggcagtacggcttgacgcagaatcataagcaccttaaagaaatgaaagcaattacgggaatcaatgctttcccggctttctgcccgatcgttgccgattattacagcggcatgcttgtcaccgttcctcttttcaaggaacagctcaacggcgttacaattgaggacattaagaaaatttatgcagacaaatatcattcggatattgtgaaatataaagaaggaatcggcgagaacggtttcatttgctccaataagctctcgttcaacgactcaatggaaatctttgttgaaggcaacgaggacagaatccttttgatgtcaagatatgacaatctcggcaagggcgcttcaggagcggctatacaaaacatgaatattcttctcggaacagacgaaaaaacaggactcgaggtataaaaataatgaaaacaattgaaggcggcatctgcgccgcaaagggcttcaaagccaacggaattcactgcgggatcagaaagaacaagtcaaaacgtgacctttcgctcattgtcagcgacgtaaaggcaactgcggcggctgtttatacaacaaatctcgtcaagggtgctccgatttttgtcaatcagaagcaccttgccgacggacatgcccaggctatcatctgcaacagcggcattgcgaacacttgcaacgccgacggaatcgaaaaggcggaagccatgggtcggctcgttgaggacgcactcggcataaacaaggacgatgttattgtaggttcaacaggcgttatcggtatgccgctcaacctcactcctattgcaaacggtatggcggagctggttgcaggtcttgactacgacaacagcggtcttgccgcagaaggcatcatgacgaccgacacgaagaaaaaggaagtcgcagtcagcttcgacattgacggcgttgagtgcagaatcggcggaattgccaagggcagcggaatgattcacccgaatatggcaacaatgcttgttttcgtcacctcggacgttgcaatcacaagtgaaatgcttcaaaaggctgtcagcgaggacgttaagacttcatttaatatgataagcgttgacggcgacacttcaaccaacgatacgtttgctgttctcgccaacggaatggcaggcaacaagctcatcgacagcgagggcgaggcttacgataaattctgcgaagctctccacaaggtcagcgtttatctttcaagaaaaattgcaggcgacggtgagggtgcaaccaagctgcttgaatgcaaggtaacaggcggtaaaaccgatgaaatcgcaaaaaaagttgcaaagtcggttatttgctcatcgcttacaaaggcggcaatgttcggtgcagatgccaactggggtcgtgtactttgcgcaatcggctacagcggagcagacgttgacatcaataagatcgacgtcagcttcaagtccgtcaaaggcacaatcgccgtttgccacaacggtgccggcgttgacttctcggaggaaaaggcaaaggaaatccttcttgaaaaggagatcgaaattcttgttgacctcaacgacggagatttcgacgcaacggcatggggctgcgacctcacatatgaatatgtaaaaatcaacggtgactacagaacctgaggtgaatacaaatgaatatttcaatggaagagaaagccggaattcttacccgtgctctcccctatattcaaaaatataacggaaaaatccttgttgtaaagtatggcggcaatgccatggtcagcgaagagctgaaggaatccgtaatgagcgatattattttgctttccacaatcggaatcaaggttgtactcgttcacggcggaggtcccgagattaccggtatgctgaataaaatcggcaaaaagagcgagttcgtcaacggactgcgtgttacggacaaagaaacagcggatgtcgttcagatggttctcgcaggcaagataaacaaaagccttgtcaacctgctctgtgcaagaggagggaaagcaatcggtctgagcggttcggacggcggaatgattaaggcgaagcccaaagccgctgagctcggctacgtcggcgagattaccgatatcaacgttcagccgattctcgacgttattgaaatgggctatattcctgttatttcgaccgtaggttttgacgatgacggcaacacatacaatataaatgccgacacggttgcggcggggattgcaggcagactcaaagcggaaagtctcatttccatgactgatattgcaggaatcctcagagataaggacgacccgacaactctcatttcaaagatttttgttgaggatgctaccaagctcatggacgacggaataatctccggcggcatgattcccaaggtgcaatgctgtgttgacgccatcaatctcggcgttcgaaaagtttttgttatcgacggacgaattccgcattcaattataatagaagttctcaccgacgagggcatcggaacgatgtttgtcaaggatgataaataagaaaggtctgaaaaaaatgagcataacatcaaacgataagcagttcgttgccaacacctatgcaagattccccattgagcttgtcagcggcaagggagcgattctcaaggacagcaacggtaaagaatatatcgacctcggcagcggaattgccgtaaacattttcggcgttgccgatgacgaatggcagaaggctgttacccatcagctttccgttctcccccacacctcaaacctctactattccgagccctgctcaactcttgccgagcttctctgcgagagaacgggaatgaaaaaggttttcttctcaaacagcggtgcagaggcaaatgagtgcgcaatcaaggttgcaagaaaatacgcttttgacaaatacggcgacgagagtcactcaacaataatcacgctcaagaacagcttccacggcagaacaatcgcaacgctcaaggcaacgggtcaggatgttttccatacggatttcggaccgttccccgagggctttgtttatgccgaagccaataattttgacgacgtaaagaaattcgccgataccgacaagtgcatcgcagttatgatggagcttgttcagggcgagggcggtgtatgcaagctcgatgaggctttcgttaagtcggttgcagagcttgttaaagagaaagatatgcttctcatcatcgacgaggttcagacgggtaacggcagaacgggcgaactttacgccta

SEQ ID NO: 3395 - DNA, 9043 bp, synthetic construct
  misc_feature 1..9043: note = Synthetic
  source 1..9043: mol_type = other DNA
actgccctattcaacggcgaataccgatttttcacgccattgcagatatttactgtggccctgggcggcgccgcttttttcgatgccggttatgcctgggccgctaatcagcccatgcgacttaaagattttaaaaaagatatcggcttaggattgcgtttgggcctgactaaatcctccaccgcccgcgttgtcaggattgatctggcgaggggcctcgaccgaaaagtaacctatttgtcaatggggacaagcaatgtcttcgacctcgatacattcaaataattattcgcgcaagctctgcttttttttgatagccatcaccttgatcaggatgattatggccgttgttttgggaccagccccgcaggaggcatattattggaattatgcgcagcatctcgacctttcatattttgaccatccgccgatgaccgcttacctcatacatttttttacgaacgtattcggcgacaactcttttggaatccatttcgccgctatttttatttcggttattttatctttggtgatgtttaatttccttggcggtttgttcggtcaaagggtggcattttggacagttattgcctgctcgacttcactcatattcgctttgggctcaataataattacgcccgatggaccgttgttgttattctggctattgtttatgatggcttttttccgggccgtttccgaaaataagtcccaatggtggtttttaagcggcctatttctgggtgcggccatgacctccaaatatacggctgtctttgccggtttgggcgccgccgcttatctaacgatggccaaaaaacatcgtcgacttctcttaaaacccggtccctacctggctctcattgccgctttaattgtatttgtgccggtcatagcttggaattatcaacatgactgggccagctttaaattccagagcggccagcgggcagccgaggccgtatcgttccgcctcaattatctcggcacttatttcggtctgcaaacagtgatgctgggaattttcctcatgccggtttttatctggggactggttaaggcgtttataaagaggcagatcgactcaagaatggaatatttcttttggtttgcctttcccatgttggtattctttaccattatttcgccattcgcctatgtcaagatgaactggctggcgcctgtttttttgtcaggagcgccattggctgtctattgttattttgaatccgacaataaattatggaaaaattacggcaaatttgcccttttattttcaattattttaactctggcggttcatctggccgccattttgccccgcatcgggttggggcgcgccgataccatccacggctggtccgaattggctgccgaagttgaatcgattaagcaagaaatgtctttatcaggaaaaccatttatctgcggttatgaatacaaaacggcctcggaattaaagttccatctgccgggacatccagaaaccgtttccaacaacattgtcggcgaaaacggcctggcctatgattactggagcaatcccgacacgctgattgggaaagactgcatttttatttatgattccagaaaccgctatcatggccgactgatcgattattttgccagggtcgatgaaccggaaatctttaccgctcaaagagccggccgaaaaatcgctgactattatatctatcgatgctataattaccgggggataagatgagtcttctaaatacaaaccttccggggatacctttttacaggcgcggcaaagtccgcgatatttatactctcgatgatcaattgttgatcgtcgccactgaccgcatttcggcattcgattgggtattaccctcggccatacccgacaagggcaaaattctcaccagcatgtcggtcttctggtttgattttactaaggaaatcgtgcccaaccatctgataactgccgattttgcccgattcccggaaaaactgaaaccctttagtgagcagcttgagggccggtcgatgctggtcaaaaaggccagtagaattgacattgaatgcgtggccagaggctatctggtcgggtcaggttataaagattatttaggccatcaaccccttgacggtctggtgaatcttcacgggaataaattgcctgccggcctgaaactggccgagaaactttctttgccaatctttacccccgccaccaaagaggaaagcggccatgatatcaatatcgataacgagcgaatggccgctctggtcgggaaagaattgaccgaaaaattaagggacttaactctggccatatatgccagggcggctgattatgccttaactaagggaataatcatcgccgataccaaattcgaattcggcatactgaacgatcgaataattcttatagatgaaattttatcgcctgattcttcgcggttctggccaaaaacagtctacaaagttggccgcagccccgaaagtttcgacaagcaatttatccgcgattggctggactcgtgcggctgggataaaaactcgccgccaccacaactgcctcaagaaattatcgaccaaaccattttaaaatataaggaggcccaccgtctgctggtgggaaaggacattgattaagagggctttgatttcggtatacgataaaaccggcctggggaaattggccgagtacctggatcaaaacaaagtggaaatcgtttcctccggcggaacctgcgggttccttgcggaaatgggtattgcggcgaaaaaggtcagcgagataaccggctctgatgaaatcctcggcggtcgcgtgaaaacgcttcacccggccattcatgccggcattctggcgcgggatgaccaattggctgagcttgccggacatggcctggctgctttcgatttggttgtcgtcaatctttatcctttcgaaaaagtcgccggtggcggcgcctcgcctgacgaggttctcgagaacatcgatatcggcgggcctgccatgctgcgggccgccgctaaaaatttcccgcgggtcattgccatctgttcgccggaggattatgacggccttatcgatgaactaaaaagcaacgctggcgaaacaacgctcgaatatcgccgccgaatggcccggaaagtctttgccaggattggcgcctacgataatgccattgcggcctatctggatatcaaagaccgcctgttcaaagaaaatattgtcctgagattggaaaaaatgggtcgcctgcgctacggcgaaaaccctcatcagcaggcggcgctttatcttgatccgacctatcagtatacctctcttgccaaagcccaggtattatccggcaaggaactttcttttaataatctctgggacctcgaggcggctttgcagatggcgctcgattttgaccggccgtttgcggcggttataaaacacaccaatccctgcggcgcggcaattggcgggaccttggccgaggcttacggcaaagccttagcctgcgatcctcagtccgcttttggttcgattatttccctcaataagactgtcgatatggacacggccaggctgattcacgaaaccgaattcatcgaatgtgttctggctcccgattacgagcccgaggcgctcgaactcatgaaaaagaaaaagactcgccgccttctggctgtcggccaattgcagccgccctcagaggatgacctcgaatatcggatgatttccggcggagcgctggcgcagacccgcgaccgcaaaatcgtgcaggccggggatttgagtatcgtgaccaaagccaaacccacgcaggcgcaaatcgaggatatgctgtttgctttccaggtggtcaaacatgtcaaatctaatgcggcgctgatatgcaaagacggcgccgcagtcggaatcgggccggggcagaccagccgcgtggatgcctcgcttatcgccgtgcgcaaagcgggtcatcgggccaaggatgccgtggccgcctccgatgccttttttcccatgcccgatggccttgaggttttggccgaggcgggcgtgcgagcggttatccagcccggcggaagcaaggccgacccggagattatcgcggccgccgacaggcttggcgtggcgatggtgttcaccggaatacggcatttcaggcattaggattttgtggggcaggcggcctgccgcccaaaaatcacgcacgtaaatttgcttgctaatatagcaaatagcgtttataataagttcaaatagtagtttttgtaaataaaaagcccgtgctaacgatttaatcgtttggacgggcaattagaagctttgcttccacgagacgattgtctcttactaaagttagcagacaaccgccagttgagtacattatgaagataaattagggcaatcaaataaagttgtcaaggaaataattatggaaaagggcaaagaggttattctgggaattgatctcggaacaaattccgtgggttgggcggcattaagttgcgcacccgataaagaaaatgattcggagcttttagacgcaggtgtaagaatatacgaatccgcattatctggattggaaaaagatggggtcggtgaatcgaaatgcgcaaacagaagagtgaaacgggggcaacggcggataattgaacgcaaagcgagaagacttgcaaagctcgcgggacttctccaaaaggcgggactattgccttctgaatataatattcatgatccgcaaataagaaacgcacttttcgaaatgctcgacaaagaacaaaaagtatctccatacaaattaagggcacgagccttagatgaaaaattaatgccttttgagcttggccgggctctatatcacttggggcaacggcgtggcttttggagcaatagacgagaaggtatagaagaaaccgaaaaaagcgataacgtctcgacaaaaaataaagagcggaaattcgatgatgataaaaaggacaaagacgacgagaggaaaaaggttaaggcaggcattaatagcttagctaaggaaatgggcgatagcacccttggcgaatatttcgcaagcatagaaggaaaaaagcgaatacgcgaaagatatacatcaagggaaatgtatcaacgcgaattttccgctatatgtaacaagcaaaaggaattttatcctgatttattaactgaggggttttacaaaagcatttataaggccatattttttcagcgcccccttaaaactccgaaaagatttgtaggtttctgtgaattggaaaaaggcgaaaggcggtatccctgggcatatcttgaggcacagcgctttcgctatcttcaaaaagttaacgatttgacaattattgatcccaatacattcacgcaaaatcccctcaatgacaaacaacgtactgatcttattgaagcgctcgagaaaaaggaatggctggagtttaaagatataagaaagaaattaagcctacctgaagacactatattcaatcttgagcgaggcggagaaaaacggatacctggcaataaaacggctgccaaattaaggcgcatctttggcgatgaccgatgggattcaatggcggataaagaaaaaaataaggtcgttgaggattggcgcagtatcgttaaagataaaacactcatgagaaggggaattaatcattggaaacttgatgccgaaagtgcaagaagattcgggcggtttagcctcgaatccgggtattgccggttttccaagatggctttagataaattattgcctgaacttaataacaaggttcaattacaaacggcgataaacaaacaatatgaaaagcaaatatcaagtgcggccgatttgttgccacctgtccttgaaacgtttccgtctctcactaatcccgcagtcataagaatgctgacccaattaaggctggtagttaatgcctatataaaaaaatatggcaagcccgatacgattaggattgagcttgcgcgcgcggctaagcgcacagccaaagaacgtttggaatatagtcaaatgacccggaaaagacaaaaagaacgcgagggagcgcgaatattacttagggaacaaagaaatatttacgagccttcaaatgacgacttaacaaaagccttgctttataaggaatgttttccggattgtccgtacactggaagacctattaattttaattcactgtttgatactaattcggaattccatgtagaacatataattccctatgatcgaagtctagacgattctttcactaataaaacactatgctataatgaaaccaacgctattaagggcaataggacaccttatgaagcattccatgatagccctgaatggaataatattatagatagagtaaagaaatttaggggtgataagtcaattgtaaaggcaaagctaagaaggtttttggcgactcccgaagaagttcaaaaaatgctcgataatttcgttaaccgccagctaaacgacactgcttacgccgctaaattgtccaaaaaatacttgggaaagctctatggcggcgttgatgataaaggatatgatgagcccaagaagcttcgcgttcaagccacaaacggtgaggcgaccgcaaaattgtgctatgcctggggtttgaataatattctcggcgaagataataggaaaaatagaggtgaccatcgccagcatgcagttgatgccatagctattgcccttacaacgccaaattttattaaaatgctatccgataatgcccgctcggcgcaaaatatcaatcgcttattgtcggccagattccgccagccctggaatggatttcatgcccaagttagacaacaaatcgataaaatgatagtgtcgcatatggcctctcaccgggttagaggagccttgcatgatgaaactttttacagcgtaaagcttaatgaaaatggcaagaaagaggtctacaccaggaaatcgatcaaagggcttaccgaaccagaaaaaaaacgcataaccgatataaatgtattgaatataattgggggcaatgatcagggagccaaacgggttaaaataatacccaaaaataaaaacgttattaaaataggcaaaccacctcatgaacgatttgtattacccggttccgtccatcatatggaaatatttgaagaacacaaaaagaatagaataatttggaccgcaaacccaccggttactctatttgaggcaaacagacgcaaaaataaaggggaaccaatcattaataaagcaggggagaacaatggaaaatatcttttctctctttcttgcggagacactatcgaactggataatgtaaaaaccggcaaaccggaattttatgtagtaaaatcaactcctcagagcaagcaaatagaaatatttcctattaatgtggcgatgaagaaaaaagaatatcataaaataaacactaaaggtggacttgcccctaaattaaatggcccaaaaggattaaaagatcgtcattgccgcaaagtaataattaccccacttggcgaggtccgttatgctaacgattagcctcaaatatggctaatgccccaatatattctgcccgataatcatatcggggatgcaagaacgaataatcgacctatcagaaacgccggccgctttaagcgttcgttatgaccaattggtcatcaagcgggaagagggggaatttcccactccattggctgaattggcagtattgattgttgccaatcgggcggtcaattatacccattcagtgttggttgggatatgcgaaaacggcggagcgcttttaatctgcaatgaaaagaaaatgcccgccggaatgataatcccatatgccgggcatttcatgcaaacgcccagattcgccgcccaaatcaaagccgggcgagccacccaaaaacgactctggcaacaaataattaaggcgaaaatcatctcccaggccaatcttcttaaagaaataagaggaaacgattggggtttgaaacgaatggcaaatcaagtaaattcaggcgattcatttaatatggaggcaaacgcctcacggaaatactggtcggctttatttgaaggggattttcggcgaattccgggggcagaagattctataaattcacttttaaattacggttatgctgttttacgaagtttagtggcgcgggcaatttgcgcctccggcatgcatccatcaattggcatccatcatcataaccaatataaccaattttgtctggccgatgatctaatggaaccgttccgcccggtggttgatcgagcggtcatcaacactctggctttttatggtcggcagacctcgcttgataggggcagcaaatcgcttcttcttgaggaaatttttaaaagccgttttaatattaaaaacgaatcgcgggatatttttgacgctattcgtcagatgacttcatcggtggcggacatattcacaaatgaaaaaaggaaaatcatcctcccggaaacgtaagaaagcgacttccccgataagcctttcggagtataagggtatgtggctgtttgctctttttgatttgccggtagtcagcaaaaaagaccggaaaaattacgccgtatttagaaaggcattgttaaaacgcggctttagtatgcttcaattctcagtttacgcccgctattgcgccagcgaagaaaacggtcgcgttttgatgaatggcattgaacagcaattgccgccctatggccagatacgattattgttagttactgaccatcaatttggcaaaatgcaggtgttcaacaacgcgaaaataggcgaaaccgagaaagcgccaaagcaattaatgcttttttaagccctattaaatgttggaaccccctgcacttcaatcaaatacagggggctccaatgtactcaaccgacggctctctgtcaactccagcttattataatcctctttcccgtcttgcccaaatgtactcaaccgacggctctctgtcaactccagccaagcggcgatgaacgccaatctcaaaatgaatgtactcaaccgacggctctctgtcaactccagccagatttattgaatatcttg

SEQ ID NO: 3396 - DNA, 24770 bp, synthetic construct
  misc_feature 1..24770: note = Synthetic
  source 1..24770: mol_type = other DNA
ttccgtctttgtagtcgcctgcgtaaacaaaattgtcggcataaatgccgtttccttgcaaatcaatgtgaaaatattggttgtctgcattgcgaacggtgcaaatattttcttgaaaatttcctgtccacgaaaacgaagtttgataaaccttttcgcctttttcgttgatgtgaaaccaacgattgtcgtcaattacagaagcacgattacaataaaaaccaaatgtccgtgaatagcgatttttgtaaagttcgtttccgtttacgtcaatgtgataagctcccgaattgtctaaaacaggggcaagtgctggcgaatgaaattttaaaacttcaataaatgtttttccgaaaattggtttaccgtcaaacaaaaaatgcgtgttgtctgccgatactttaatttcttgccagttcattgtttctaaatgtaagccctgttaaatagtttatccaattatcttttgtgtaaactttcttgtttatgctgaaatgataaaatgcaatcaacatatcgtgagtgatgaaaattgtcattccgttttgtgttgagttttcgtttatgaaattcgtaattctaaaatttaactcgttaatgttcggaatgcctggaattttttcaccttgcataaatcgtttatacatttcgtcaaaaccgtgttgaagaaaaaaatcgccagccagtttttcgtctgaaatatgaagtccgggcgcacccaaagaagttgtttcaattatttctattaaacttccataacctttggtaatgtattcagccgtttgaacacaacgcccaactggacttgtaaaaattctattgacttttctttctgctaatttttcaccaaaattttgtgcgttttgttttcctttttcgttcaataaaatttcatttccgaaagaaccttgcggaatgtcatctctgtcagcgtggcgaagtaaaagcgatattttttcgtttatattcatttagttcggtttacgcatattacaagttttacacaaatcaattttcttgtaattttttacaagagtttgataagtattgctttgcaacacttcttcaatgcttgtgttttcaatgtttccaaagtgtccaagcgtttttcgcatttcgtctggtgcacaacaaggcgaaatattacctgttgctgaaacccaaagttccttttctaaaaaaggacattcgtagctttcggggatttctttgttttcgtttttctgtaatggaataatattttccaaaatcactttttcaccatttggtttgcgaaatttcgcctgtgcttcattcgcttgatttacatattcattccattgcaaaatactttcaggcgttgctttcattgacaaatgtttgatttcatcaaaatgcgcccaaagctgatgtccctttactctgtccacaccaagttgtgaagccaattttacgatgtctgccaattcgtgcatattgttttgcataaacgtaagttgaaacgttacacggcagtaataacctgtttttgcaaagtgttcatcacgaatacggataaactctttcacgtttgcaacggtttgttcaaagtcaattcctttcattactttttgcgaagtttcggcagttgcaccgttccaacttatttttacgtccgttgtaattggaacaattagtttcgcccattctgtaacggttttctcggttgttctcggaaatgttccgttagttgtcaaattcatcttgatgttgtatttgtaacacaactcaataaagtgggcaaaatgcttgtagattagtggttcgcccattgtggacggtatcatttccgtaacaccgatttttttcgcttgctcaaaaattggttctaaccattctttcggcattctgcgatgtttaccgtttagtttttctttgatgtaagttgaaaacgggctgtgttcttcgcacattgtgcaactcaaattacaatcttcgggatttgtgtcaagtgtaacacgccaaagtttgtaaatgaatttgctgtaaaggttttctaattctttgcaatggtcttgaatatttggaacgcttccgtctgcggaatacaaataacctttttcacctaaagttttcattttgtcaggatttgaaacagcaaatttcatttgttctgccagtgaatttgcgttgcgatgttcaaacaaaagtccgtttacattgtgctgaacatattctttcattccaccaaaatcggcggtgattacaggaactttacacgattgcgcttcgtgaattacaagaggcgaattttcgccccaaatacttggaactacaatacaatccacatttgaaaaaacatcattagccaaattgtgattgatgtactcgcctgcaaattcaattctgtttttagaagtttcggctaatgctttcatagcatttgtgctttgtccgtttgctctgccaaaaattttaagcgttgcaggctcttcaatttgcttaaatgcttcaatcagaatgtttactccttttgctgggatgtgagttccgatgtaaccaaaagtgtaattcgttttctcttttgatttttcggtttgtgttaaatattcagtaggaaacccataatctaagtaaatgattttgttttcgggcacaccaaagttattgataaatctatcacgcaaatagtttgaaggtgctatcaataaatcaacttttttgatgattgcttttgtttcaatcattcgttgatgtatccaactgctccaattttcaatgtctgcgttttcattttcttctcgtccgctgaaataaactttgtagcaatcagtcgcacattttttgtcgtcttgtttttcgcataactgaaagttgttttcgtttcctatgcttcgtgtcaaaaattgtccacgtggacacattagccaaaagtcgtgtagcgtgtaaacaataggaattttgagtttgtttagttcatcaatcaaacctgttgaaaggtgattaacgtgcccgatgtgtgcaatgtcgggatttatttcggatattagttttacaaaaatttcatcaagtttttgatgcctatacccatcttttccttgtgggttattaacaaaataaaaatcaaggtttgaatgttcgtttttatgtcttacttgaaaatcaggcaaataagggttttcctcccgtgtaaaaacggaaactttgtgatgttttgaaagttcgttacaaatggattggctgtaaacttctgaacctgcattatagtttggcggatagccgtgtattatttttagaatgtgtatttctaatcgattaagctgttttccacgattaccctgatttttgtcaaaggtcgtgttgcttccattagttcccttgcttgggttcttaatgtctacctgatgattaaatgatttgtttttcataaatcataacagtttagaagttacgcctactcttaatttgcttttcggcttccgcacctttcgttttgaatggacgttagaataaccatttgttaaagatactaaatttaaagtcctattttgtcgtgctgccattgcacctaacggaaaaggcttggcgaagtcggggaaatcttagcacaaaagcctaaataaattaatttagcccatttatattccaaagttcaataaagcacttttgccccgctttcgccaagcctatgggcttgttgcacaacttgcttttcaaaaatacaaaactaatttcattctgcaaaaaaatgccaaagataatttttatcgcaaattagcacaagtacttgatttacagtttatttatagagaaactgctcattattacggaacagaaggtcaggaatctattgaccctgttgtatttgttttttcagcaaaacaacaatttaatgccctcaagagcgcaatattaagccctcgaaatttttttgaaattcttggtttttgaatttttgtcgtagttgtgcaacggttacctatgttatgtgcagccctgttctagtctaatttcacagattctccagaaaagctgccattgttttttaatataagcactcgttttgtaccattattggaaaatgaaaagctataactacgagataaaacaaaaccttcattttctgatgaaaaatacaatggttcgggttcaccatcactgctgttttgaatgaataattgctcacctacttttgttatcgatgttataaactcgcctttttttgtaggtaatttgtatgttccaatataatctttccataaatctttattgggcacagtcgcaactttgtacttgtaacttacatagttttcccacttaaaagtacaagctatactatttattagctcggtaataattcctgcataggatgtgtttactatcataacagcaccgtccttaccgtcaaaactgccaatatatatcgaagtataaccatcaatgctaccagtatgtgtaaagtattgtcttccacctttttcaaataacataactcctaaaccatttttataaggaacatctaaatttccatcataagttatttctcccaattgtggggtgaacatcttttcaattgtttctttttttaaaaaactattttctttgccattataggcattttgaatagcgattaccatttttgctacatcagaaacagtggaaaccaaaccgccttcagattgacaaggaaaaacataaggaggtaccgcttcataattaaaaatataaccttctgcaagtttcttttgtttcccgctatccagctttaattcaaaactactattggtcatttgcaaaggaataaaaacactgtcagtcaatagcctattgtaatcggtattaaaattatctgccaatattttctgtgtaatgcaaatagcttggtttgaatattcataggcttcatttggttttctgatacaatatgcaccttttcctaaagcaggtttttcacctttaactatttgtgtaatatttggtaaaggcttgttatgtgtatagtcccccgaggggccatcatctctgatgataccagcagtatgacttaataaattggcgatagtaattttttgtccttttgaatatttattttctttaaagcttccgtctgtaaaatattctctaaaatctttagttaaagagaggcttccttgttctactaatttcagaacacataatgcatttgcagttttactaattgaagcaaaatgaaatagtgttgtgctatccgccggaattttactttcaaaatttgcaaatccaaattgcttagataatagaatgttgccattttttattactgcaactgcaacggctggcactttacgcaatttcattctgtcataaatgttatagagtttcggaatactgtctttcagttgagaataggtagttaatccattctcgaatttgtataaaaggtctgctgtactttgcgaataagcatttttacttactgttagtagttgtattagaaagaagattgggaataaataagtctttatcatttgtcttttgttctgaatattttagatgatggctcttatgttgcccataacggaaaaatgtttgcgaagggcggaatttaatagcacttcccttgccctacgcacaaagtttatagaaagcacaaacgcctaaattatgcagattagccagccgctttcgccaagcctatgtgcttgttgcacaacttgcttttcaaaaatacaaaactaatttcattctgcaaaaaaatgccaaagataatttttatcgcaaattagcacaagtacttgatttacagtttatttatagagaaactgctcattatacggaacagaaggtcaagaatctattgaccctgttgtatttgttttttcagcaaaacaacaatctaatgccctcaagagcgcaatattaagccctcgaaatttttttgaaattcttggtttttgaatttttgtcgtagttgtgcaacggttacttttgttgagtgttggtgaaatagtgtagctgctcattctttttttctgccttttagtttggtttccagttgttttagttcttccgcttcctgctcgtcggctttttgggcttcgtcggcttttcttttggtgtcaaactgttggtaaacggcttccaccattttttccatttgggcgtggcttattttgcctgcggttttcagtacggttttgtcgttgagtttaatgattttgtcaatgttttgtcgccaaaaatcggtagtaaggtcttgcctgtttttggctcttaattcggctgtttctaagaataccgttacaaatcggttgaggctgtcgagttcgtcttctgtcaaatagtttttggcggtatatatgtcttgttttcttacaatattacctttccaactggttaggttcatattgggtgcttgagcattagctctttttacaattatttcggctgcggttttgcccgtaatggcatagagtattttattttgagtttctgcaaaaaacatttgtgtagccttatcggtggcatcgtagtcgctgctcaaagcgaacaggtcttttactttttggtaaaatcttttttcagaggcacgaatgtctcgtattcgcgctaaaagttcatcaaaataatcaggtcttccgtcggggtttttcaggcgttcgtcgtccatcacaaaaccctttacaatgtattctttcaagttttggtttgcccactgccgaaattgcgttccgcgcttgctgcgcaccctaaacccaatcgctaaaatcatttctaagctataaaaagttacttggtagttcttgccatcggaggcagttgttaagtaatccttaataactgaattggcatctaactccgcctctttcaaaatattagatatgtgcatactaatatttgggacagaggtatcaaaaagttccgctatttggttttggttcatccacaccgaaccgtctttggcgtacaaggatacagccgccttgccgtctgccgtattgtagataatgatttgggtgtctttcattactatttttcggtcttgttaatgtgagcaataaacttggataactctttgcttatttcaatcaactcgttgttgttggtgcttctgcctgtagcatcatagccaatatcttcggctattaccataaaaatggggtaatcgtccaatacagtttgttttgccaaaaagtatttttcggtcaattcttctttcagcaaattcactttgtctgtaaaagaagtctgaactgtgatttttaggatttttatgatttcgttgatttcggtttttgatgccttcgggtttttggcttttgcgtctgcttccaatttctttatggcttctgctttttccttttcccatttctcaacggtagccatatagttgttgtcggtttttacctgttctttcagttttgctttttgattgcttattttttcggtttgcttggttttgtgtttacgcaaaaacaaaacagaacttttcacacctgcacctgtggcactaaaagctgtttgaggcatagaaacaacggcaacaatgcgatacatttcttcaatgttgtctcgcacatattgcaaactgctgttggttagaatgccgtctggaattactaatgccaaataaccgtgttcagtcaaaaacttgtggcattgttctaaaaacaaaacttcggtgctttggctatcacgcaaagtggctttgccacttgcggttgtattcagccaatccacttctttaattgccaaattgtattggtgcatatatgccttttcggtttgcttaatgctgcttccgaaaggtggattggtaataatgaagtcaaacgaattgtatttaaactctttgttgcccgatttggcttgcatttcggtatcgcttaaaagtccgtctgatgcaattaccttggtgtgtccgtcatcgtgaataatcatattcatcttggcggttcgggcaatttggtcgtttatctcaatgccaaagaggtttttctctgcgaagtcgtgccaatatttgtaatggtctttctcgtctttgatggggtcgtaaaattcgttggcttgttctctcactttgtccaaagcgtaaagcaaaaagccaccacttccgcaactggtgtcaagcactcttgatttgtgcgtaattggcaaactgtccacaatgaattttacaatgggtcttggtgtaaaatattgtccgaaatcgcccctgaaataactgcccataaacgtctcaaaggctttgcctttgctgtcaaggtcagttttattgaggttgatacgctgaaagtattttacaatggtcagcgtttcttgtgcggtaagggtgatgccgtctttgaaaacttcgggggcttctttttcgccaactgcataaattttcttgatgcgttttagcaaatcttccgggtcttcatcacggaaaatttgaaagtcgtaaggttcgcctgtttttcttggatgtttctcgtcccaaattttgcagaaaatgagtttatccaattcgtcaaaggctacgcttggattacgctgtccaccgccccaaagtgcttgatgcgattgaatgaaaatctttgtcagttcgctttcgcttacaacttgtaattcaaaaaacttctgctttacattcgggtcgggttcagaaactatgtttatgtcgtctgtgtcggtttgcgaaatgccacctttcacatatttgtaaggtgcaagtttgttgataccaaattgcggaatgtcgggaatttcaattctgcttttcggcttcttgtcgggaacttcgtaatactgatttttgatgcgtgaagtcgtccaaacatattttgcaccttctgcaactgcataactatatgcttggtcaaccgcaatgttaaattgctggtcggttaaatcttcttttttgcactcaactaaaatatatgtttcatgacagtcatcatcagcatatacaataatgtcagcttcttttgtatctgcacccatttgtactgaaacaaattgcttaattcttctttcaggatagccgtaaatcaaaaccaaagtcaagaaagtttcggcttgcactttctcttcgggattgttgtgattccgttttttattttggtgaatgtatgttataaagtttcggtcttcgtcaaaccgaataagtcctttttctattcccgtgtctattaaattcattcgtcttttctcttatttatttaggtcgcaaagataatttttaaaatcagttattgtcaataatgcccgtcaaattgtcattttacccaaagtcgggtaattggtaggcttggggtgcggtagggcaaaataaaatgtggtgcaagcgttggtttgtgtgttgggttgcagctctttttattttgcgaagcgttgacattttgtctgtcgttttattgttcatttgatgtcggttgtgtcgtcttttagggttgcacctaacggaaaaggcttggcgaagtcggggaaatcttagcacaaaagcctaaatttagcacttttgccccgctttcgccaagcctatgtgcttgttgcacaacttgcttttcaaaaatacaaaactaatttcattctgcaaaaaaatgccaaagataatttttatcgcaaattagcacaagtacttgatttacagtttatttatagagaaactgctcattattacggaacagaaggtcaggaatctattgaccctgttatatttgttttttcagcaaaacaacaatttaatgccctcaatagcgcaatattaagccctcgaaattttttaaaattcttggtttttgaatttttgtcgtagttgtgcaacggttaccattgttgtggctctaaaatacggcttagaatactgagattagtattggctttatttaaaaaaagtttttaaatttgaagcgaagcaaaaagtgtcgttgtggtcaaaccttaaaaaacaatgaagcgtagcccgaatgagatacgctccagagagaaaacactaaacggaataatccttagtgtgaattgatttcaaaagagatttgatgcaaaagtagttaatattttggaataaacaataaaaagcatgacaaattttaaaaaaattttaggattagacctcggcaccgcctctattggctatgcgatggtggaacgcagcgacgatggcgagtttggcggcttcgtcaaaaacccaaagggccacgaagccataggagtccgtgtgattcctaccactgacgatgtactgaacgcttacaataaaggccagtctgttagtgcgtgtagagagcgtactagcaaacgcggttcacgccgactcttgcagcgctacaaagcacgccgcgagcgcctcataaccacgctcaagcatttgggctggcttaatatcaacttcccgagcctagaaagccgccaggcccaccagtaccgaagagtcaatcctttttttatgcaggactcactgcgccaaatagcccaggtaaacggctggccagaagcgcaaagcaaaaatgcgagttttgtgcgggctgtccttaccaaaacacaagtagaaaaacgccaaaagcagtttatccaagaatttgcagagaagttaggcagcaaagaggacttttggaacgaagaactactggtttattacctgaggcatctgggagttacagaacgccttgagctagaagaaatcgcccttgtcctctaccacctcaaccagcgcagaggctttaaaagttcacgaaaaaccaacaacgaagacgacaaagataaaaatcaggggagtgccaagcaacaggaagcagaggaggataactctgattacaaagactacgaagttctgcgcattgagggaaaaaaacatacgctcaaagacccagacacagaggaagaatttgtggtgaacgtcagccaagagcaccaaccattgtttaaagaaaaaacagttttcctctctattgaaaagtcgggcaaaacttctaaataccatctgcctaaagcccataagactgttacgttggcgcgtgcagaagttaagtttatcaaatacgctgaggagacagaaataaaaggcaaaaagttcaaggtttatcgtctaaggcttgtggtggaagataagaccatggacggtgatatgtattttactttagaaaataacggggcagcaaaaaaccttctggaagaaggcaaagcctgcttcctagaaataaccgaaagcaccgatgccaaaggcgaaaccaccagaacctttaaacgcgctaagctcaacgaatgggccaagaacaaggaaaaggttaaagaagagctggaaaaaaacctagacccacgcacccaaaagcccatagaagttgcgagcctacaccttcaaaaaatgcttgatggcatagaacaacaaagcgcttttgcgggcactatctactccacacgcgaccagataatcctgcgcaaattctacatccgagagcttcaggccattatgagcaagcaagcagagctacacaaggggctggtgcaagagcaagagattttaggcctactagaccgcctctaccaaaacgatggcgaaggcgataagcaaaccataaaaggcaaggacggccacaaaatagaggtcattaaaaaggggaagacctacaaagatgaggtaaaaaagtacttacataaaacccaaagccctgatgataccctgcgccacctcctcgaaaagcacatcatttattaccagcgcccgctcaaatcccagacgaacagcatcagcacctgccggtttgaaacccaaacaggaaaggacggcaagccagtgccggtgcgcgtagcccccatcagcgccccctacgcacaagagtacagaatttggaatcagattaacagcctcatgtacgcggaggaagacgaaaccaaaaaagaaagacccctaagccctaccgacaaagcaaaactcttcgagatgctctgcaacagcaaagaggtgggagtgggaagtcttgctaaaaaattatggggcaagaaccccgcaaaagtagagtttaacaagaagaatgacataaaactcaagggacacgacacccgttgcgacctgaaaaatgtgctcaaaaaagctcaatctgaccaagaccgaatgcgtctagaagaaatactggccaacgcacagcagtttgagctactttggcacttgctttattccatagaggcggacttggaagccgagcctatccgtaaccccatcgtcaagacgctccaaaaacgctttggtttcagcgaagcaggcgctgttttgctctctaaagtgcagttcaagaacgattacagcgcactctctaagcgggctatcctgaaaatactgccgctgatgcggagcggatgctattttgatgcccaaaagctgcccaacaaagcccatgacctactgcaaagcatcaaaaatggcctagaaatgcctgatattgaccctaaaacctacaaaacactccatagcgcaaacctagagggtggctggctctaccacatggcagcctccctgctgtatggctcacactcgcgtgaagagaaccttacgcactttagcgagcctgccgaaataaaagcaatgcgccaacacagcctccgcaaccccgtggtagaaaaggtagtgaacgaagtgttgctgctcgttaaggagctatgggaaaactttggcagacccgacgagattcgcatagaactagcccgcgaaatgcgtatgaacgcccaagaacgtgagcaaatgaccaggtacatcggcgcacgtgaaaaggccaataaacaagcagctgcaaatactggtctaacaaacccctctaaaaacgacgttctgcgctatcagctctgggacaaagcaggagaaaaatgcgtttatagcggaaaaaaaataagaaaggaagatgtttttaatcataacatcacacaggtagaccacatcattccgcgagcgcgcttttttgatgactctgccgccaacaaagtgcttgtttttacggaagaaaacaaagccaaaagcgacaagacggcttatgattacatgaagagcaaggggccagaagcactagaaagctataaaaaggacattgcttgcttcaaagaccaaaaacaaaagtacaaacacttgctcatgcgggctgaggatattcctgatgacttcattaaccgccagctcaaagaaacccagtacattaccaaaaaagccaaagagttgctgcgcgccgtagtgccagagggtggccaagtttgggttacgagcggaggcgttacggattatctgcgccacatctgggggctagataccctcatgcaagagctgctgcgcccgcgctacgaggccatgcaggaaaagagcaaagaggcgctcaagggtcaaaagcttatttttgataaggaaactctggacaaggaaactggcgaaatacagactcaggaggtttttctgaactttagcaaacgcctagaccaccgccaccacgccctagacgcactcgtgatagcttgcaccacccaagggcacgtacaactgctcaacaacaagaacaaggtgtatggtcagaaccctcaaatgcacgctggcgaactcacgaaggtagaactgctcagcccagaagccctagaaaaaatgaccgctgcgggtattccagaaggcggcgaacgcaacctaacccacaaactcattctgcaatgggctgaaaaacagcgcgaagcagaaaaaatgagcgctgaggcaggccgaaaacacaagaaaggcggccccacgcgctttgccgaacccttcaaaaacaccagaaagctcgcacagaatgcccttgaaaacattgtggtatccgtgaagtctaaaaaagaaatgcgggggaagctgcatgacgaactgccacttggcgaggtttgggtgaatgaaaaggtaaaaatcgctgaactctttaaactcatagtgaagcctgatgcgtaccaaaaaattcctacgccgctcgcgtggctagaggctaaactacgagagcgcctagccgagtgtcagaataacctcaaaaaagcgcaaaagtccttgcaagaaaaacctatccgaaaagccaatgggcaagaaattgaggaagttacgctgctcaaagcctatttggtaaaacgcaggaaaatagaaagcctcagcgaaaaacaaattgaggatattttggatgagaagcttaaaactgccataaaagaggaactcttgggcggcattattcctaatccaaagcagctcaaagagatgctaagcgagcaaaatattaccgccttcaatgagctacgtaaagctgaaggactgccacccgcaacgcacgtgcggacaaaagcctctccactaaacgctgatactcaagaaaccaacaagaaactcgccaacaaaaagtatgctaccaaaggcaataatttttgctttgttgtaggagtcaatctggacaaaaacggtaataaaaagcgtgtttttggcgctgtgcctctagcagatgctttagagagtggtttagaaccagaggcggcttttctgacagagaaccaggccactttggctttcaaacttgttcagaacgacgtggtttatgtgccgtacgaaggccagaatatgcgcgaagttgatttcagaaatgcctcttctaggctattcaggataaaaaaatttaccggccctcagatttttcttgaaccacttaatatgtctagcgcattaaaatttgatgtcaatgatgaaattagcacaaatggtattgaaatagttgataaaggcagtaaggctgccaagaactatttttacaagctcaaaacgaaccgtttggggcatattgagggctactggaacgatgagggcgttttcgtgaaggtttagggcgtggtggaatccgcaccgcggcaaggactgtggtgcggatactaaaaaaaatatttaggcaaacacttgcataatagtttgatagttagtagcttgcataactggctaggtttttctgtctttctcactcagctccctcactaggctatgattaaacgcaccttgcattttggctctcctgcctacctctctaaacgcgacgagcaactgctggtgcgcctcgaagacggcacagaaaaacaaatgcctatcatggacataggcgtactcatgctggaacacccccagattacgtttacgcacggcctcatgcagagcctcatggagcataacgtggccttcgttacctgcgatgccaagcaccaccccaccggccttatgctgaacctctgcggccatacgctgcagtcggtgcgcttccgcgagcagattcaggccaaagagccgctcaaaaagcaactctgggcgcagaccgtacaggccaagctccagaaccaagccctgcacctagagaagcgcggcatagaagccgaccagctttgggcctggagcagggctgttgtgtcgggcgacaagagcaatctggagggagcaggagcggcttattattggaagcgcctctttgaacctttgggtttggggcagttcaggcgcgacccagacggtgcggcccccaataacctgctgaactatggctacgccattctgcgcgccattgtggcgcggggcttggtggcgagcggcttgctgcccacgctcggtattttccaccgcaaccagtacaacgcttactgcctggccgacgacgtaatagagccctttcgtccctttgtggacaagctcgtgtttgaactcatagaaagccaaggcctgaacgaagacctcaacaaaagccaaaaagccaagctgctgagcatagccaccgaagaaattaacatcagaggccgccgcagtccgctcatggtggggctgcaacaaaccactgcttcgctctaccgctgctttgcgggcgaaagcaggacgctgctctacccccagctctatgccaccaagcgccgcaagctagacagcaaaagcgcccagacctaccccgaagaatttgatgactttgacgatgagtaaacccgacgaccgctttaaccgctaccgaattatgtggatttttgtgatgtttgacctgcccacctacaccaagcgcgagcgcaaggccgccgccgacttccgcaaaaagctgctaaaaaatggctttaagttgctgcaattttcggtgtatatccgccaccaaatgagcaaagagaacgccgaagtgcacatcaactacgtgaaggacaacctgccgccagatggtaaggtagagattttgatggttacagaccgtcagtttgggcttatggagcgcttttacgggcgcaagcctcatcgcggccccgagcaggacgagtctgagcaattgatgcttttttaagcctttggccgagagggcagcctaggggcttggcatcatagcgagggggtttggctaaacatggctacgcctttggggaacggagataacaaatctatgaaaatctgtaaaattaattttatcgatgttctatagctcaagaatgatgcttttgtagccaaagagaaaagcattttttggggttcggtagcctgtatagaaacaaaaaaacagcttataatagacggaagcccgttgttataagccatttttttgaacttcttttagccatattcttttaataaccaacaacttacgcagggtctgttgttgcaaatatagctaaatctctctttgaaaccaattcacaactgggcacaagcattcaaaaaggggcgcgcagttgttgcaaatatagctaaatctctctttgaaaccaattcacaacatactgtacttggtctattgccttcaaaggttgttgcaaatatagctaaatctctctttgaaaccaattcacaacttggtacataatctgatgccaccaacctaagttgttgcaaatatagctaaatctctctttgaaaccaattcacaacttaaacaatgtaaggtgaaccaataacatagttgttgcaaatatagctaaatctctctttgaaaccaattcacaactgctattgcttgtttatttcctaatcttcgttgttgcaaatatagctaaatctctctttgaaaccaattcacaactatgcagaacttaccgattacgataaatcggttgttgcaaatatagctaaatctctctttgaaaccaattcacaacatcgaaaacatttttgaatacggaatgtagttgttgcaaatatagctaaatctctctttgaaaccaattcacaacttcttaaatattttcaaaatttttttgatgttgttgcaaatatagctaaatctctctttgaaaccaattcacaacttattagactaggtgtgccagaggggtgcggttgttgcaaatatagctaaatctctctttgaaaccaattcacaacggtgtgaaattctggcgaaccaaagcgccgttgttgcaaatatagctaaatctctctttgaaaccaattcacaacagcaccgtagagctatatttagatggcacagttgttgcaaatatagctaaatctctctttgaaaccaattcacaacaaattgctacttgcattcactatgctagcagttgttgcaaatatagctaaatctctctttgaaaccaattcacaacaaaaaaagaccgcgaatatgctgtttattgttgttgcaaatatagctaaatctctctttgaaaccaattcacaacgaaaatctgcggaatatttgcagtcaatggttgttgcaaatatagctaaatctctctttgaaaccaattcacaacagcgtgaaccctaattacaataatttgcagttgttgcaaatatagctaaatctctctttgaaaccaattcacaacagaagttccaatgttaatttttcagattggttgttgcaaatatagctaaatctctctttgaaaccaattcacaacgacaaaaccttacttgtttttatgcaagagttgttgcaaatatagctaaatctctctttgaaaccaattcacaacatataatgcgccaaaatatcctttttaagtgttgttgcaaatatagctaaatctctctttgaaaccaattcacaacgtttaagcatatcacatctctttcgttgatgttgttgcaaatatagctaaatctctctttgaaaccaattcacaacagatactctaaataattgcccccaatattgttgttgcaaatatagctaaatctctctttgaaaccaattcacaacacgaattacttactttatttgaggccaatgttgttgcaaatatagctaaatctctctttgaaaccaattcacaactcgcgaactattccgcaaatgatgccaaaagttgttgcaaatatagctaaatctctctttgaaaccaattcacaacttggcacataatctgatgccaccagcctaagttgttgcaaatatagctaaatctctctttgaaaccaattcacaacctctttagtgcccaagctctcgttttccagttgttgcaaatatagctaaatctctctttgaaaccaattcacaactcggctaattcattccagtcatagctaaagttgttgcaaatatagctaaatctctctttgaaaccaattcacaacgatgaacttgaggctgtttgcaaagaaaaagttgttgcaaatatagctaaatctctctttgaaaccaattcacaacttgacaataaagaacttgcattgcattattgttgttgcaaatatagctaaatctctctttgaaaccaattcacaaccgcagccgcagccgctctttcatagcttttgttgttgcaaatatagctaaatctctctttgaaaccaattcacaacccgccatattgtttaggcagcttacctgcggttgttgcaaatatagctaaatctctctttgaaaccaattcacaactttgctaccattacgagtcatagcttcgttgttgttgcaaatatagctaaatctctctttgaaaccaattcacaacctttcgtgcagtgggctaggccttgctgttgttgttgcaaatatagctaaatctctctttgaaaccaattcacaacgcattaaacgccattttggcaactcgcaatgttgttgcaaatatagctaaatctctctttgaaaccaattcacaaccatacagaaacagacggatacatctctacgttgttgcaaatatagctaaatctctctttgaaaccaattcacaactaggtttgatacaaataagttatctgctagttgttgcaaatatagctaaatctctctttgaaaccaattcacaactttgaaaacctgtagatgctgcaagtgaagttgttgcaaatatagctaaatctctctttgaaaccaattcacaacaacaaccccccttgtaagtggccaaacattgttgttgcaaatatagctaaatctctctttgaaaccaattcacaactgctttgcgcaattcataagctgcctcaaagttgttgcaaatatagctaaatctctctttgaaaccaattcacaactcagaaagtgcatttaattcaataagtagagttgttgcaaatatagctaaatctctctttgaaaccaattcacaactgcgcgtaataagcatctgaatacccttcggttgttgcaaatatagctaaatctctctttgaaaccaattcacaacaatactttagttcttggtgctgcttcaaagttgttgcaaatatagctaaatctctctttgaaaccaattcacaacgcgcctttgccgccaaaatacaaggagatagttgttgcaaatatagctaaatctctctttgaaaccaattcacaacaacacttcgtataggttcagagatttgtcgttgttgcaaatatagctaaatctctctttgaaaccaattcacaacaatttaagccaatttttttcaggcagtgttgttgttgcaaatatagctaaatctctctttgaaaccaattcacaacttttgttgcgtttttgttcattttttttaagttgttgcaaatatagctaaatctctctttgaaaccaattcacaacctgcaaaaagcggccttgaaacctatttacgttgttgcaaatatagctaaatctctctttgaaaccaattcacaactttatcaaattcaaagaacaagaacttatgttgttgcaaatatagctaaatctctctttgaaaccaattcacaacccttcagataatccgccacccactgaatagttgttgcaaatatagctaaatctctctttgaaaccaattcacaacaaaaccagtactattaataatatcatatcgttgttgcaaatatagctaaatctctctttgaaaccaattcacaaccttacatctcctgttttttggtaagaatccgttgttgcaaatatagctaaatctctctttgaaaccaattcacaaccataagttcttgttctttgaatttgataagttgttgcaaatatagctaaatctctctttgaaaccaattcacaacgcaataacgtccaaatcgtgcaaacgcatgttgttgcaaatatagctaaatctctctttgaaaccaattcacaacttgcattttttctaaaaaattttgaaaatggttgttgcaaatatagctaaatctctctttgaaaccaattcacaacctcgtgcttattactaagttgtcgtacatgttgttgcaaatatagctaaatctctctttgaaaccaattcacaacacaaaaaagctgaatttatagcaccaaagggttgttgcaaatatagctaaatctctctttgaaaccaattcacaacacacgcacactaccactgattcccgtaatgttgttgcaaatatagctaaatctctctttgaaaccaattcacaactcagttacagttttttctgctaaatgtaatgttgttgcaaatatagctaaatctctctttgaaaccaattcacaaccaaaacttagatatatcttgcacgttttatgttgttgcaaatatagctaaatctctctttgaaaccaattcacaactcgccagcggcagccgtagccaacccttcaagttgttgcaaatatagctaaatctctctttgaaaccaattcacaaccaaatcaaacgatgtatttgttcgcaaaaagttgttgcaaatatagctaaatctctctttgaaaccaattcacaacaaaacttcattttcaaaatcaatgtctttgttgttgcaaatatagctaaatctctctttgaaaccaattcacaacttcatctgccagcaatgcaggtcgcgaaaagttgttgcaaatatagctaaatctctctttgaaaccaattcacaactgcatgaagacacggctaccgtctgctatgttgttgcaaatatagctaaatctctctttgaaaccaattcacaacacttttgccagcaagatatgatagattattgttgttgcaaatatagctaaatctctctttgaaaccaattcacaacccatttgggtcaggttgtccgtcgcaatttgttgttgcaaatatagctaaatctctctttgaaaccaattcacaacgcaaaaaaaggcacaagaaaaggctttaggttgttgcaaatatagctaaatctctctttgaaaccaattcacaactttatgacctctgtgccgttcatagtgaaagttgttgcaaatatagctaaatctctctttgaaaccaattcacaacgtgaaagcgcagaaagtgcgtttgacctttgttgttgcaaatatagctaaatctctctttgaaaccaattcacaacttgtaacagagggcgttacgctcacaccctgttgttgcaaatatagctaaatctctctttgaaaccaattcacaacaaaactcttatttgcctctgcatcaatcttgttgttgcaaatatagctaaatctctctttgaatgtactttttaagggaggctacttgtttttttacgaaaatcttggacgacactaaaatataaacttataggtataggtaaaagttaagcctaaatatacaagtatttttgatgcgaaaaacctaacgaatcatggtttttttttacaaaaataacaaaatattttattagtgcgtttggtctgtctattcatttctcttatttcattaatacccaaaaaatacatacctttggtcattctattgttatttttgcttttacaagccacaaaaaatgaccaaacccttcaagatatatagcgcctcggcaggctctggcaaaacatatactttagcgctttcttatttgcgtgtggcgcttgcttctcccgaccaagacccagatgaaccctacaatccgcgctattttcgttatattttggctgtaaccttcacgaaagcggccgcagccgaaatgaaggagcgcatcattaattatctgtatttggtagccgaaacggatataagccagccctctgctttttttaaccaattgctcaaaaatatcaataccgaatatgccgaaaaaggcattctcctgaacgcaaaggagcttatccacagagcgcagttggccttttcgcatctcttgcaccactacacagacttcaacgtcaaaacgctggactccttcatacagtccttggcgcaggcttttgcgcacgagctagacctccccatgggctttcaggtggagctagagaaagacgaaacttataccgaagccatttacaggctgttgttgaaagtgggggtaaaaggcgacccgcgccttagcatgattttccgagagtttgcgctcggtacgtttgaggacaagttcaataaaaaagtagccaaagacttagttcaatttgctgaaaaaacagacagccccatttttgctgcacgcatcaaacaatggcagcgctattcgcaagcagagcaagaccacatcaaaaaatattacatagaatccttgcgctacgttcgccgagaagcccccaaaaaactgcgtaaattagcccaagatgctatcaatatcatagaaaaagaagggtttagcgaagagaactttaagcaatacagtgcatggagctactttaaaaaaattgcttgtggtgattacaaaaacagcatggatattctggaaaataattatagcaactatgtccagaaactcattaatgaggcagaccccagccttaaagatgggggcaagaacaaaaaaagtaaagacgcgctgtccgcagtaagcgaaaaactcggcttggtgcttcagcaaattgctgtgaaaatagaaatgctgcgcacacagtttcgtcttgaattgaacatcgccgataatatctgcaaagtggtttatccgcttatgctggtcagcgaagtcaaaattatgacagaaagcctacaacacgagcagggaacagcttttctagaccaagtaacccagcgcatcaacggtatcgtgttgagcgaccccatgccctatatttatgagcgcttgggcgaaaaatacaaacatattttcattgatgagtttcaagatacctccgaagtgcagtttacgaatatgctgccacttttgggccatgctctttcgttggagcgcgacagcctcgtggtaggcgacaccaagcaggccatttaccgatggagaggtggcaacactgaattgctcgctgacatacaccaaccttatcaattagagctagtacagcaaaacgaactactccaagagcacgccataccccttgcgctcacagcccaaaaagcctctttagataccaactaccgtagtttggacaatatcattggttttaataacgctatttttggttttttgatgaacttgataagcaacaccgaggcagaccccaaagccgccgaagcattcaaaaatgaccttataggtctgcaaaaatactacacggacgtttttcagaaaagcagccgaggggctggtgggcaagtcgttttggccttccacaagaaacaaaatacctccaaaaccgagttgtataacagtgtatctacaaacgaggagcagaacgaaccaaacgaagacgagcagaatgctaaaagggttctgagcaatgccaaaagcgaatgggcgctggaacaatgcctcctcgccatacaggaagccaaagcagatggctatacagaacgcgaaatggcggttttggtgcgtaccaataaggaagccgtgaacactgcctttgccttggtgaatgctgaaattcccattatttctgctgaagccttgctcctcatcaacgcgcctgtggtagaagctctcatcaatttttttaaattactcaaatatccacatcaggctaacataaaaatggatttgctcctgtttttttatgcacaccagcaggggaaagaccatacagagcgttttccgaaagcggcagactttaatgagtttgcggaagagtcccgcaaggaggatattgtcgcattttttaattatatctttagccgttttggtttgctctttgactaccgcgcttgcctctacctcacgctttacgaagtagccgaagagtttgcgcgttgtttggaacttggcaagcgggcagacttacaaatttattggcaggctattttggacatcgtattggcagagggcagaaagcggcacaataatgtatctgactttattgacttctgggaaaagaaaaaattcaagttggctgtggccgcgcctgaaggcaccaatgccattcaaattgttacgatacacaaagctaaaggcttgcagtaccctattgtcattcttccatttgccacttggcctaccaaaagcacgaacaacccactctggcgcgatgtgccgcacgaagttgatgcacccgaaccgctagaatttatcatttttaaacccaaagaagatgttgaaggcacagcccttgaaccttactatttagaagaaaaagccagtacttttctg

SEQ ID NO: 3397 - DNA, 23096 bp, synthetic construct
  source 1..23096: mol_type = other DNA
  misc_feature 1..23096: note = Synthetic
atgcagacaaggttgtccttactggtgttaaggctgaccacaaggagtattggcgtcactccggctaccttggtggcttgaagatcacttccttcaaggaagagatggagaagcacccagagcgtgttgttgagcacgcagtcaagggcatgcttcctaagaccactcttggtcgcaagcagggtatgaagcttaaggtttacgccggcgctgagcacccacatgctgcacagaatcccgtcaagattgagctggagggctaaacgatggcagataacaccgctgtttacaccggcaccggccgtcgtaaagaggccgtcgctcgtgttcgtcttgttcctggaactggtaaggttaccgttaacggccgcgaggcagtccagtattttggtcgccagcagctcgtagacaacgcaaccgcacctctccgcattactgatactcttggtcgttttgacgtcctcgcaaactgcgatggcggcggcatcaacggccagtccggcgctcttcgcctgggcattgctcgcgctcttcttgaggctggcgagtatcgtgatgaccttaagaaggccggctacctcacccgcgattctcgtgcggtcgagcgtaagaagtacggtctgaagaaggctcgtaagcgtcctcagttctccaagcgctaaggccactggacccaaaaaagtcctcacaaagagacctgttgtatatcgacaggtctcttttttgtatacttttaaatggttgcattttgcatatgtgcacaaccacttcagtccgcacgttcttctcgtcatctggcgagaagccccacctgtcgagtagttcgctggcgcttcgcgcgcaagttgctctccacccgacaacactacattcgcagctaggagacgcttatgaagtactttggaaccgacggctttagaggccgcgcaaacgagggtctgaacgtcgatcacgcatacaaaattggccgcttcattggctggtattacggagctaagcaggctcgtaaggctcgcatcattattggtaaggatacccgcaggtcaagctatatgtttgagtccgcacttgtctcgggcttggttgcttccggcgctgacgcgtacatgctacatgttattcctactcctggcgttagctacgaggtagtagacggtgcctttgactgcggcgttatgattactgcgtctcacaatccctttaccgataacggcatcaaactggttaacaaagacggctataagatggatgaggacgtccttgagcaggtagaggcctatattgacggcaagtttgacgttcctctggcaaccggtgacggcattggccgcacggttgattacatgcagggccgcaaccgctacatctcaagtcttattgctagctgcggctttagtctgcagggtctgaagattggtctggattgcgcaaacggcgcagcttctagtgttgctcgccctgtctttgacgccctgggcgccgagacgcatgttatcaacaacgctccaaacggcctcaacatcaatgttgattgcggttctacccacattgatcagctgcagcgttttgtcgtccagaatggccttgacgtgggctttgcctacgatggtgacgctgaccgctgcctggcagttgacgagcgcggccacgtggttgatggagacctgatcctctacgtctgcggcacctaccttaacaagtatggtcgcctggctaagcagaccgtagttactactgtcatgagtaactttggcttgttcaaggcatttgacgacgctggcctttcttacgagaaaaccagcgtaggcgataagtatgtctacgcttgcatgaacgaaaacgaatacagtctgggcggcgagcagagcggccacatcatctttggcgatcttgctaagaccggcgacggcatcttgaccagcctccgtattatggaggtcttacgagcagagcgcgagaaactctctgagctgactcgtcccgttacactatatccacagcagttggttaacgttcgcgtcactgacaaagaggccgctatgcagtctcctaaggttaacgatgcagttgcagctgccgagaagttccttgagggcaatggtcgcgtgttggtccgcgcttccggaacagagcctctggtgcgcgttcttgcagaagctccaactgatgagctctgccagcaggcaaaccagattgtgctcgacgcacttgaggagtataggctcagcgcttaagcgcagatagatccaggggatacgatggcactggcaggaataggtgtagatatgcttgagattgcccgcatgcagcaggcaattgagaggcgccctcactttattcgccgtatgttcaccgatgccgagcgtgcgtattgtgagcgcactgctcgccctgcggagcactatgctgctcgctttgcggcaagagaagccgtgctcaaagccttaggaacgggtttttcgtctggtattggttttcaggatgtttctgttgagagagaccagctgggcaggccacaggctcgtctggctggcaaggctgcacagattgcggctgagcagggcgtgcaggagattgcgctttctatctcgtacaccagagatattgcggtagccaatgcagtggcggtgaccaatgccgtaaaacccaaggtagatcaaaaggaagatgctgcccaagagctggcacgttcgttcaaagaagctcgttctgtgttggatgagcttgagcgcgtgcaagaacctataattgagacaacctttgacgatgttgttaaatccgaggagtaagttatgcagccggtactaaatgttgaggacatcaagcgcgtagagattgcgctgacacgcgtgggcgtgagcgtttccgagctcatgcaccgtgcaggttacgctgctgctcaagaggcccttggcatgggaggggacatctctaacgttgtcatcctcgtaggtcttggcaataacggtggagatggctgggtggcagcagaagcgctgcgctctagaaactgcaacgttaaggtggtcactccgcttgagcctgatcaaatttccggcgatcttgcacgtcagatggcgcagcgcgccgttcgtgcgggagtctccgtacttgttggtccttctcgccaggagcttattgacttgctggcaacggctgatgtggtgcttgactgcatgctgggcaccggcttccacggcaaggttcgcgctccgtttgatatttggattgagtgcctcaatcagtccggtgctcgcgtgctttccgttgacgttccaagtggcctttctgcgcagaagggccaggtagaaagcgcgtgtgttgttgctgacgtcaccgttaccatgattgcactgaagcccggtctgattgctgatgctggtcgagacgtctgcggttctattgttgtggctcctttggccgagcagacagagcgtttggttgttgaggcagatcctgttgcctggcgtgttgacctggaagattatcttccctgtgttcccgcgcagctcaataactgcgataagtactctcgtggctccgtgttggtggttggcggctctagccgcttccctggagctgttgtctttgctgccaaggctgctgctcgcgcgggtgctggctacgttacgctggctgttcctgaggcaattgtcagctgcgttcagatgatgttgccagaggttcccgttattggcctcccgtgcgacgctgagggcgtgtttaccgaggaagcagctccactggtgctgcaacttgccgccatgcgtacggttacgttggttggccctggcatgcgcgtttctggcggaaccgttaaggttacctctgcactgcttgattctgagttgctcgttattgttgacgccgatgcgctcaactgcattgctcgcctcaccaataacaacctcccagatttccctgagctcacacgtcgtaccgctccactcatcatgactccacatcgtcgagagcttggtcgcctggtcaaccaaggtgacaatccacccgcaagcctggtggctcagctggaggccgctcgcaagattctctgggcagatggtggctctgagctggtcattgttgccaagggtaccgctactggttgcgtaggcgtacagaaagctgtgctgccaaagcctggtcccgttacgctggcaaccgctggctctggcgatgttcttgctggtactattgctggccgcttagctcaggttgctggtcaagttgatgatctgccaaccttctgctcgcttgcctgtgaggttcacgcatatgcaggtcagctagctgccgagaagttcggtgtacgcggagctatggcgggcgacatctgcgatgttattggtcttgcttctgacgcacttgaagagcagattgcatttcctgtggaagactttgaagaagctgcggagtaggtgagcctgatgtcggcatatccccaggatagatgggcttggatagagatcgatctttctgccgtccgccacaacgtaaaggcgtttaaggcccagcttaaccgcggtgtcaagatgatgtgtgtggttaaggccgacgcctatggacacggtgctgctcagtgcgctaaagccatgcaatccgtgggcgccgatcagtttgccgttgcaacggttgacgagggagtggagctgcgttgcgcgggcatcgataaccccatcctggttctttccgagcctccggtcacttctattccagacctcgttcgttttgacattatgccttccgtctacacggttgactttgcgcttgcgtatggcgaggcttccgctgcaactaacaaggttggtcgctatcacctggccattgatactggaatgactcgcattggcgttaggcgagaagatttacttgaggtgcgcggcgctattgattttcacaggggtcttgaatgcgctggtacgtttacgcattttgctacggccgacgtactcgacaactgggactttgacctgcaggttaatcgctttattgaagctgttacaacgctcaaaaacgcaggctatgagctgggcttggttcacgctgataacacccctggcacggttctgcacaaagacattcagtttgatatggttcgcgtgggcattggcctgtacggacttcatccaagcaagctcaccattccccgcattgacctgcagcccgttatgagcgtgcgcggtcgcgtgacacgcgtagtctatccagctgttggcgatggtgttggctatggtatgacgtggcgcgttcctcgcaataacatccaggtagctaccgtgcctattggttacgccgacggacttgcacgcagtctttctaaccgcatggatgttttgacgcgcggagatcgtgtccgccaggtaggcaatatctgcatggaccagttcatgattgctgttgataccgcaggcacccatgccaacaagcctgcgcacgagattcgctatggcgacgtggttacccttattggcaaagacggcgatcaagaaattaccgcagatgagatggctgacctgcgcgagaccatcaattacgaggtagtttgcaactttggtgcgcgcctcgataaggtgtacatctaatggcagctactcctgcttctcctaaaaatgctgtaggaagaaagtgcatgtcaaatgtagaatatgcgaaaatcgcatattctacacaagcaggtaaaacgcttgatgagattcgtgagcagatagctgattgcaagaagtgtccgctttgggaaacacgcaccaatattgtgtttggtggcccaaaccccacagctcgcgttatgattgtgggagaagctcctggtaaaaatgaggatctaagcggtcaacctttcgtaggcttatcgggcaaaaagctcgacgcgctgttagaagaggttggcctttctcgccaggatgtttttatctctaatgtggtcaaatgtcgaccaccttcaaacagaaatcctaaggtagctgaggtagaggagtgctccccgtaccttcgtgaccagattcgtgctattaagccagatgttattgtctgcctgggaaattttgcaacgcagtttgtcatgcacaccgataagggtgtgacggagctgcgcggcaagttttaccagataggcgcctttagcgtgctgcctactatgcatcccgcatcaactatttatcgcaaggagtgggcgcagttcctcaaagatgacctgcgacttcttgctgattggcttaagaaacatcctcggggaggttcttgtgattaatccttctgccagcgctgacattggcacaaataacaccattgcaaacaacctgccagaaaaaactgcagctggtatgtttgtctccactaccactgaacagaccattgctcttggtcaggttctaggtaaactcctgcaggcaggagatgttctagtgctcacaggagacttgggcgcgggaaagacgcaactcactaagggtattgctgcaggcatgggtgttactgatgacgtaaccagcccaacctttactatcgagatggtttatgagggtacaaccatgccgctttatcactttgatttgtatcgtttgagcaatcctgaccagctcgaagataccggcctctatgacgcgcttgagtccgatgggccaactatcattgagtggggagagcaatttgtagagcaaattggcgagagaactcttgatgtgtatgtttccaggttatcagaggaagagttagtttccgatgacactgagcctcgtcgtgagattcgatttatctcgcaaaatgttcgtggagaagaaattatccagtcgctttaatttttaactgcgataaaagattttaattagtaataaagcattcttagaagtagaagttttagatgtcgtttacggtaataatgcgtcagcttccaatcaacaagagagctaatttaagaaatttcctgtaacatatttgataatggatgcttaaattttaagatgaactttcactaatgaactagatgtctacattgatgagctgagtacttacgtataaaacatttacgtgttaagcgtggaatacatagacgccacctgtacaataggtgacgtctattctttttaccgactgctcttgtagagctcaagaaagaagcgtgattaatcatgcagaaggctttgatttcgattgactacacctacgattttgtagcagatgacggaaagctgacagcaggcaagccagctcaggctatttcagatgctatttatgaggttacaaagtgcgcttttgatcgtggcgattatattttctttgctattgatgctcacgatccagaggataacttccatccagagactaagcttttcccacctcacaatattattggaacaagtggtagagatctgtttggccctctaaatgatttctatcagcagcacaaagatgatagccatgtgttctggatggacaagcgtcactactcgtccttctcgggaactgatcttgatattcgtctgagggagcgcggcattaacacggttatcctaaccggcgttcttaccgacatctgcgtgctgcacacggcagtggacgcttacaacctgggttatcacattgaggttgttgagccagcggttgcatcgctgacgccagaaaaccatcagtttgctctttcgcacttcaagtacacacttggtgcgacattggttgacgcagagcttaatgagattgagagcgcataatgacgccagaacaacgagcagttaaatggtttgagaaagtgcccgaggcagatgacctttcatttgaccagagacttgctatttgcaaaaagactggaaataccatggcacttgtctttgttgttctatttttgcttgagttaatacttgcgtatgtgcttaccgatggctcatttgtattcactatgactgatattttgaatagcatgctgtcaagacctggtagaagagttacagctcagggagtggctgtcgcgggtattcttgtggttgcgccactattggttattcctgtagctgccgcgtttcttactcgttccattgtttttaatcaagaaattaagaagtgcttaagtaagtagttaagcaaattagttaaagcatctataagacccaagaataaaacttgggtcttttttgtttgatcttttttgttacctaaggctaacttatctgataagatacgaatgttatatgggcaaagctgttgtgacttaattgaagaattcacgtaaaacagttagattggggaagctctatgtacggtaagcgtgtgtcaagtaggctccgttctcagcttgttgttgtgatggctattgctgcttgcttgtttttctcaccatttgtaacaaaggcttatgcagatggaacgtttgagattactgactggctctcgggctatggttctagtagtttgcaatacatctacagcaacaacaaggctgcaatggatgctgcatccacatggtctttctctggttcaagagtgactattggcgccagtagcggttcttctattcaggacttcactgttcctactaccgtaacaaatattactagtacctatcagagcacctacttgggcaatggtactcgtgttcaggtttacgctggtctgaatcctaagggttctcgcattattttcccaactggctttaacggaaccgtctcaaatatgaagtttgagggcgaggttattgttgaggctggtgcaaacgtaacctttgataatgttacgttctataacggtcttgataacagaggtacttcaactgttaagaactccacggttgttcagattgatcttactaccaccaatggcggtgatttgactatcgagaataccaggttccagaattccaacaataccgctggcgtagtgcttccttctaataagatcgctcctgcaaaggttggcgaggcctacaacgagccaatcaccattccttgggctgcatctactatgggttacgacacctttaccgtagacaatctgcctgctggtcttacgcttagcccaatggagaatgatgcaactgctcgtagaagcactgctactatttctggtactccaactgttgcaagcaatggttatacgcgcatcaccatcaagaacggcactctgtacgactttaccattcctatgaagatgagcgttcagaagggcaccgttgctgttccaaccgcaactaatctcacctataacggtcataatcagcgtggttttgatgctgccgctaatccacaggtagtcattagcggccaggtttcagcaacatatgctggtacatatgacgttgaccttgatcttgctgaccctgtgaactacacctgggaagacggtactgttgacaccaagagtgctgtttggactatcaataaagcacagttggttgtaacgtatgctggcgagactgttcagaagggcattgcgcctcagcttactcttaccgttaccggctttgtaaacggtgagactgctgataccgctcgcaactataccgctcctaccctcagtgcaactgacctgagcgttggcgcgcacgagctgactcctgcaggtggctcagcagacgattacgagttcacctacgtttctggaactcttactgtgagcgatactgcaagtagctcatctaatagcagctccaacaacagcaccaacaacggcacgaacagctcgcagaagaggcacaagtcgcgcaagaagggtgtactgccagatacctcggatgcttctgttgttctatcttctgtcagcatgattactgctgcaggcgctatggctgctggtattcgtcttcgtaagcgttcatagtcgctcaggcgtagcaccctttgtaatcgtttgaattagtaacagcctctcctgaataggaggggctgttttgctttatattttatttaccctagtaaaaaattaccgtttatggaatcgataacataaatctattcttcgatatttgttgcagatataaaattacatcaactcgtttatttttaatcaaggagctgccatgtcaaaatctgatcgtggacttgtttttggagttgatttaggaaaatctggaaatggtcttgcgggtatcgattatgaaaataaaaacattaaatttctttcaagtagatgctttaaggctccagaggatagagctggaaaatcacttgccaaagttagacgagaagcgcggtctattagacgacagcttgataggaagtcaacaagaaaaaagcaaattataaaggtgctaaagcaattcggtgttattggtcaagaatgtgacagcagatggtttgaaacaaaaaagaacggtaacggcggggttgacttaccgattattaccttaagaagtcagggacttgaccgacaactcaccaatagagagtgggctcgtgttctttattggttctgtggtcaacgcggatatattaatcgaggagaagatattttaagtaacgaagaagcttcagttgaggattcttctggatctgatgaagcaggaaaagttctttctgctatttcagataatagaaacgcacttaagaaatcaggttataggacttttggtgagtacctctataaagagagctataccacaacccgtagttatagaaataaaaatggcgaatataagcactgtgtttctcattcaatggttgttgacgagattaatgagttatttaagcaacaaaagaagcttggaaatacatacacttcagagaaatttagagatgcttatttagaacaactcaactggcttaaagatactatagcctttgacaagttgacttatcaaaaggttggttactgtgtttactttgatcaatatagtgacgaacctcaaaaaagagcggcaaacgctgatttaatttctgaagtcgttaaagcttatgaaaagcttggaaatatacgtttgaaatttgaagataaatcagaacaaagtctaactaaggaagttagagatgcggttattaatgagatgtttagcattcatcaaggtagtaggataaaatccgtaacatacaaaactttgcgcaaattaatagataacgaaaatttgattgagtttaaaggaatcaaattagatttagagaagaacccagtctttgttcctaaggcctggaatatctattgtagagtgctttctgtatctgagtctggacttcagctgttaaatagaatgaagaacgactttaaatttgctaatgcgatttcagagtctctgacttatgcgacatctcttgaaagccttgaatcaagaattttaatgtatcaagataaagagaacttagaaatctctgaggaagagctcactttaatagaatctttaccctataattcaaaaatttttaaaggatacggctcaagatctattgaagcgcttgagatgctatacgatcaatttacagagggaggggccttcacgcttgatgaggctgaaaagcaatcggggcttcaaggttttagattaagagataaaggaattaaacaaagacttcttcctccatattctgattatgaccctcagtgtactaatcctgtcgttttaagggctctttctcaggctagaaaaatgataaattctggaattaaacagtttggaatgccggatattattagagttgaattaggtaaggagttaacaaaatctcctaagcaaagagaaaaaattgcgaaggagcaaaacaaaaataggaaagagaatgaaagaattagaaaagaagtttctgatcttcttggaattgattgttcgtgtgtaacaaaaaaacagattctaaagaaaaaattatatgaagagcaaaaaggtctagacgtatatactggtgagagtctaggagcgtctctgcacgctgatgacctgacataccttaaagatgatagctattgtcaaattgaccatatattaccttattcaaggagtgctgatgattctattgcaaataaggtattagttttagccaaatctaatcaagataaaggtaacagaacgccatatgagtggatgacttcaggtcatggacatcatctttcatgggaagaattttctattagagtttctactaacttgttatttccagatagcaaaaaatggagattgctagaagaagactttgataaaaaagaagttcaatttatgaatcgtaatctttcagatactcaatatatgagcaaagctattgttgcgtggctttctgattctttagatttcccatcccgatatggtcaaaaacaacacgtttatgcgacgaatggacgaatgacatcaaaattaagaaaagaatggggtttaaattttggagagaatggtcttaaagatagaaacgataaaagacatcacgctattgatgctgtagcaattgcagcttgtagtgcatctatggttaaagagtttgcaacttcatactctagattacgtgaaacaaagaattcttctctcgctgaaccctgggaaggttttgcagatcaagtacgagaagcaagagaatgggtaattcctacaatgtatcgacccaataaaaagaatggcttgttgtttgaagatagacgctatcgatacgcgaggaagacaaataagcatgtattgattggaaaagaaggaaaagagaaaacatcaggaaatattcgtttctttgatgatgaaaaagatggcaagcatgtaaaaattgttggagatgttgcttatattaggctttggcttgatgcaaatgctcgagaaggcaaaggagaatggttaatcgaaccggtttattttgctgatttacggaccataaaaaatggtacatatgttccaaaatatatcgctacttacaatgcaaccaatgaagaatggaagccagttcctgatgatgtcttgtcaaaaaatattcctctgctagttcatagacaagatgttattaaagttgagtcttcatttttcagagttaattcagtagatatcgctaaaaaaacattagaacttgtgcctgtgttttatgattctaaatatagcaatccagaattgatggtaattagaaaatggaataaaagcacaaagatagaattggtttctgaagacgcacttggaatgatgtggttcaattttttgaagaatcaaaactctagtgaaagctgagctggattataagataacttaccttttttcgatgaattgatcagaatcttcctccctgtgtattgcttttcagtaagctcgagaacagttacacatcctttgggaggaagatttttatttactcttgagaggtggctatttgtattttcagtacctaaagttaccctactatagacactaaactgttccattatccagccggagttaaccaggaacttatgaaattcatggtaggcttttttatcagactgggttttggtcggtagatcaaacataattagtaatctcatgactctcatttttctccttattcaaaagtgattaattcaatgggtaaaagagaaggacatgaaagaacgcaaggattggcttccttcatgcttctaattaaggattcgattgattcgtctattgactgtcttacggaaattttccttccgttttgataaacataaagttctaaaactctagataaagatactttgatttcatgtgataactctgcatttaatttatatgatgcaatatagaaatctacgactggtctaaatggctctacaagatcgtctgctaaattgaaggcgttttctatactattgtggtgaataccttttgaaggcattaagccatgggctatcaatgattgaatgattgcagatctaataattgaataaccatagtctagagaaggagtccaatcactatctcgtcgtgacccatccgtaattaaaattttgaagtaggcttgagcggctacagcttctcggttagtcgcatcatcggactgtatcttatcaattagtttgcgaactgaataaaatgggagattcaaatattctaaacagagtgactgattatagattttggcagatacgattgatttccattgctgcttttgtaaaggcttcttcatattaaattgaaggctaattaactcgttttgccgacaattacctacgaggggaagaataattgcctctggaatatgattggttccacaacacaaaatacttgctttatttttgctaatttctgttatcagtctttctgtaatgacgactgcaggatgatcaatagtaatcatccctatatcctctatagggatagagataattccttcttcatgtttgtcaatttgaagttgagaatgcttacaggacaaatatgccgctgaccgaattgctattgagtattgcacgattcacctcttaataagaagctttctgatataatatgcatatgttttgattcatactttctgggagatcgtacggatctagacaaggccaagcatttttgtgcttgagccgcaaacgaagcccggggtaacccgggctagtttttataaattatatcaactatcgtgaatttttggagaaatttgtatagttttcaaaatactaaacccctgaattccctgttaaacaaggaaaacaagggcttggtattttactacctgggagatcgtacggtaatcaagacaaaaacaaggattggtagacgtgtagtgaaattttactacctgggagatcgtacggtaatcaagactagagctagagaataaggctagtaataaccattttactacctgggagatcgtacggtaatcaagactgctggtggtgcattagctgctattaccgcattttactacctgggagatcgtacggtaatcaagacctcagagcaagaacgcatcacaggcatgacattttactacctgggagatcgtacggtaatcaagacagaggaaggaagacgataatgagcgagtacattttactacctgggagatcgtacggtaatcaagacacgaggttgacgtcgatgttatggacggagattttactacctgggagatcgtacggtaatcaagactatcgtggcttatttgctgattcttttagcattttactacctgggagatcgtacggtaatcaagaccctcggactggcatactctgacctcacaacattttactacctgggagatcgtacggtaatcaagacctaccattcagctacaaccatacattgacgattttactacctgggagatcgtacggtaatcaagacataattctgtgggttggtggtacgctaccgattttactacctgggagatcgtacggtaatcaagacgcttcaatcgtgacacggtaatgcttcctaattttactacctgggagatcgtacggtaatcaagacaccagcagcaggagtagcatttccgagagtattttactacctgggagatcgtacggtaatcaagacttgaattagaagataaagctagtaatttacattttactacctgggagatcgtacggtaatcaagacgtggttgcggtgacagcggtagcaccggcgattttactacctgggagatcgtacggtaatcaagacaatcttgtagcctggcaatttacgtcatcaattttactacctgggagatcgtacggtaatcaagacttaacctcacgtgacgtgcgagaaaatcaaattttactacctgggagatcgtacggtaatcaagacctctttactttcccgcttcttacacacgccattttactacctgggagatcgtacggtaatcaagacctgatggtgcgcttaaagaatctcaatttgattttactacctgggagatcgtacggtaatcaagactgacgctctaccactctgtacagacgttgaattttactacctgggagatcgtacggtaatcaagactcctagcatgactacaggcgctactacagaattttactacctgggagatcgtacggtaatcaagacggaacttttagattcttagcctcgatggttattttactacctgggagatcgtacggtaatcaagacaatcaattcattacttgacagcatagcccgattttactacctgggagatcgtacggtaatcaagacaggtcaaaccgttacgctatcattagaggcattttactacctgggagatcgtacggtaatcaagacattgaccgcagcgggttcgtgcattattagattttactacctgggagatcgtacggtaatcaagactatcgacaagtccacaaagtttgagctatcattttactacctgggagatcgtacggtaatcaagacgtctgtatctgaggttgagggtgaatataaattttactacctgggagatcgtacggtaatcaagacgccaacggctcagggcgttcagcctattcaattttactacctgggagatcgtacggtaatcaagactcaattctgagattcttcttgaggaactagattttactacctgggagatcgtacggtaatcaagaccgcgtcatggaatacgcggacgatacgttcaattttactacctgggagatcgtacggtaatcaagacaggtcggtgataagtggtactacttcaacgattttactacctgggagatcgtacggtaatcaagaccagagcaagtacgcaaggacgctgaagcacattttactacctgggagatcgtacggtaatcaagactaaaacgcgcaagagctgcaaagagagggaattttactacctgggagatcgtacggtaatcaagacagattgcctatgacgcaaagacacgcacgcattttactacctgggagatcgtacggtaatcaagacgtgctcgaccatggaaaagaaataccgctaattttactacctgggagatcgtacggtaatcaagacatgactgccctccttaatgacttaccgtaaattttactacctgggagatcgtacggtaatcaagaccagacgatgcacgccctgctctgcacgaagattttactacctgggagatcgtacggtaatcaagacatatgtctagtagttttatcaatcaacttgattttactacctgggagatcgtacggtaatcaagacattgctggcggtgctttaggaataaatggtattttactacctgggagatcgtacggtaatcaagacagttcccgttgagccagttgcatatcattcattttactacctgggagatcgtacggtaatcaagacgctcgcaacattaaggaaggacttggatacattttactacctgggagatcgtacggtaatcaagacttgctggaataagcacccttattaattccaattttactacctgggagatcgtacggtaatcaagacgcttcaaaataatggagcaatcacatcattattttactacctgggagatcgtacggtaatcaagaccggtatggatattaccgtcaacgacactgaattttactacctgggagatcgtacggtaatcaagacgcctaagcgacgagagcaaggtaacgattaattttactacctgggagatcgtacggtaatcaagacttcatatgcgtacccccccctttcgtcttcgattttactacctgggagatcgtacggtaatcaagacaccgtcagggtgatggccatgtggatgtatattttactacctgggagatcgtacggtaatcaagacagggttatacgtacacaggacgcttcgaggattttactacctgggagatcgtacggtaatcaagacccataccagcaaccgcagcaattcccgcctattttactacctgggagatcgtacggtaatcaagacacatgagcggagccgagcagttagttgtagattttactacctgggagatcgtacggtaatcaagaccacatattacatctgatggcaaagtcaaaaattttactacctgggagatcgtacggtaatcaagatacaaacacggtgcttgcagttcgtgatttgattttactacctgggagatcatatggtaatcaaagtagaatactaaatttatttgaattttaaaaaacaatctgattaaaaatatcagtgtcatttttaaagcgctgatcgtatttacagttgaatgaagtattaataaagaaatttatcttacgattatttcgaatttaaaattaaagatgatacaagttttaataacactgttgagattcaaggttactatagacgcagtatattattttagtaagaaaggcatccattatggctactagtgaagcacagaaaagagccagcgctaaatatcggaagaataacgtaaaagcaattatgtttaatttatatccaagtgatagcgatttaatagagttcttggaaggtaaagagaaccgttcaagctatatcaaagagcttattcgcaaggatatgaataattcaaaaaattagtttgtttagcgcctatacttggcgttctcgaatgcaatcttgaagtcttcgaggagttctcgtgggaccttctcctgatctccgtggtgaagttcttgcatatacacattgcttatggctccaataagcaggtgaggagcaattttatctgcgagaggtacaaattctagagcgaatcttttattgtcgatagtgagccaggttcctctccagccaccgatagttccctcaatatctgaagcatgagccgaagcaaagacattttgattgttatcaaagaggtacacgacaccatctgcgttaacaccaacaaaaccgtctgtagcgcattgctcaaaaccagaaacaatatgcgcaccactggtccagaacacccagttcttctcgccagccatagacagacctttctaaaacatcaaaagttacttgcttaaatggtagagggagagtgattttagggcaagtaaatttcggtcaaaaagcatagtttacctgctaactcaacctgctgttgattagtcggaaaccgttgcgatacctaactcaactgatgcgttcttgttgaacgtattgttacgactcatagtgaaatcagcggcccgcaagctatttcagtaataatgagttgagaaaaaggagcaactatgactacttcacctgagacccttggtcgtcgtattgcacgtcttcgtttggctagaactgcaacgcaggagcgtctggcaaaagagctgaacgtgagcccgcaggcggtgagcaaatgggagaatgacattaactatccagatatctcgctgttgccagatcttgcgcgctttcttggtgtgtctgttgacgagcttttgagtggcgcaagtgcttccgctcaggagagtgttgctgcccaagagagtactgtcgagaagagcgctgctgaggttgtttctgttgcaggcgacgagcccgcagagatcgtagaagagcccatagagcaggataaccaggctatttccgctcagtcttcgggtttcagctttggtaagctttttggtaagagcatgatcaaagtcgagaagaacgatgaggctgacggtagcaagaagaagggcgtccgccttggaaacgactctgcaaaacacggcttgcacttgtatatagtctccgatgacggcgacgttgtagatatgtgcgtacctctgggactggcaaaatttgttttaaattcgggaatccaggtaagcggaagctatcttaatcaggaaacgcaggagcagctctctaacattaatcttgatgcgcttatggacgctgcaaagacaggcgagagtggcacacttgtggatattacatccgcagacggcgacgttgtaaagatctggtttgattaagcgctaacgattacatagcctgacaaaaaacgagatacgcccgtccagctaagtggaaggaaacggtctcgtttttgttggcgcggatttacttaaggttcactattccatgttacttctcatttgatgtaaaataatgccactaaattgcgtactggatagtacgggctcaagagagccaattatcttttttggcatcttcatattgcatggagatgccattttttaaaggagaatgtaatggagcaaattgctctgttgttcgaatcttctgcagagaaccctaatgttgttgattctgtttggtataacgagtggtcggcagcaaaagagttttcacagtttgatgttcatctctttaattacgaggcatatcttaatggcgaagaacttatttgtgataaagctccaaaacatgacatgccaacgtttcttcgctgtcatccaacctctaaagaaaattacaaacgcctagagcatgatcttttgtctttggggtatagtcttttgactgattcttggcgtgtaatcggtcctgagaaatggggattaggaatttcttcagcacgggattacgaaattgagaatatcaatgtcggcgcatgttttggttcaagtggtcatggctcctattctcctaccgtctatgtcataagagacgctgacggtcctcttagtgatttgaaagagagcctagctataggatatttttcaggagatgagggcgaagaacttgctaaaaaatttgagaaagcaaaaggtactcactttactggtagggcttttttcgagaaacatgtaacaaaacttacatgtagtgatgttcctgtgatttggagagttttttattttgagagtaaggctttttttaaaagtccaatagagccagaagccttaacaatttgtcccaatttacccaaaccacctaaaaagcttattaggatgtttcagaatgttgcctggaacctgttttatgcttgcgatttcatcttattaaaagagggcatttggaaatgtaataggttttttgacgggcagatgtctcaggttccgattggtgaagacaccaaaaaattctatacaacacttgctagatgtattaaaatggcacctcaaattccagaatgggtatggtgccttactgcggaagttagagatgaaaataagattggtgaggataaacgcatagttcacggaacgcgtcatttttctccgggtacaaaagtttttcttcacccaccaaattgggacgaacgtgtccctgcaataggcatccctcgttatatagataaatacatacgcgttgttatggatgtcagaaaacttgaacattttgcattagagaaagtaagtgattcggaaattgtaactgcacttcaaaatcctggtaatatttgggcgtttacccacatggcgccaacttcagttggacgcggctactgggatcagagtgaggaatcaaaacaacgtattcaagaggatatagattggctttctcatttagatccagatggaaagcgctggtcataatttattcttattgacattatattgaaggaatatagaattacattaacaacgcgtagcatagtaagcagcgcccttgttggagataactcaggtgcaattcttggccgttgttattagccgctttagagcggctttttgtttagtgtagatttcgacgtaatgttgcaacagcacgttcttctcggccggtagtggagattcttacatgaagtctttgattgtgtactattcatattccggcatcacaagaaggcttgcggaggatattgcgctgattaccaatggtgagctgctggagcttaagcctcaagattcctattctctctcgtataacacggcggtaaaagaggttaggactcaaatagaaaagggcgtttgtcctactttgatgcaatacgatacagatgttgctgactttgatactgtttttataggatcgcctaactggcttaaaacatttgctcctccggtgctttcgttcttaagggcaacggatttaagtggtaagaaggtcatttcgttctgcacgcatggcggcggaggatttggcaacatgattgaagagtaccagagggagtgcggtgcttctcgtgtaatgcctggactggcagtaaaaggcacgtatacttttagcgaagtgcaaaaatggctggaatcgatagggttgagtgatgcgagtacttctagctgaagatgagaagagaatggccgcggctattgtggctctcttaaagcaagaaaaatatgacgtcgatcatatgactgacggcacgtccgcccttctcgccctagaaagtaacatatacgatatggcaatccttgatgtcatgatgcctaaaatgagcggttttgaggtttctcgaagggctcgcagcaaaggaattaccattcctattttgatgctgacggcaaaaagccagttagacgataaggtcgagggtctggataacggtgctgacgactatctaaccaagcctttccagacggcagaactcttagctcgtttgcgtgcgctaggaagaagaagttctagctttcaagagaatgtcctgcgttttggtgacctctcgcttgattccacaaccgcaacgttgacctgtgagacttctggccagagtgtgcgcctaagcgagaaagagttacgcattcttgagtatatgattggcaatcacggtcgcattatgacgcgtgatcagcttgccattaagatttggggatttgaaagcgacgccgagtacaacaacgttgaggtgtacatgtcgtttacccgtaaaaagttagcatttattggttctacggtagagattaaagcagttcgcggcttgggatatgaattgagggactaaactgtttaggcaatccagaagaaaaattatcctctctattatggtgtcgcttgttctgctgtttacggtgacgctgtcggtcatcatgtttgttagcactcaggagatcagacagaagaacatggacgtgctcaatcgctacgccagtcagtattcgcttgagaaggaaaaaagtagctctgagggacagaacggctccgagggacagggtagttccgagggacagacaagctccgaaggtcagagtctgcagcagccactggtcaaacctgacgctcagctgtcaaacaaatctgacaatcaaccgccaggccagagatctgcttacgagctctcaacgttttactcagtatcgttttctacagatggctctgtactctcagtttttaatggcgagaaaaccgtcagctccgatgaaaacctcactgagtttgctcgtcagattttgaacgaaggaaattcttctggtagaacaggtaatctttcctacgtggttatg

SEQ ID NO: 3398 - DNA, 22268 bp, synthetic construct
  misc_feature 1..22268: note = Synthetic
  source 1..22268: mol_type = other DNA
gtccttactggtgttaaggctgaccacaaggagtattggcgtcactccggctaccttggtggcttgaagatcacttccttcaaggaagagatggagaagcatccagagcgtgttgttgagcacgcagtcaagggcatgcttcctaagaccactcttggtcgcaagcagggtatgaagcttaaggtttacgccggcgctgagcacctacatgctgcacagaatcccgtcaagattgagctggagggctaaacgatggcagataacaccgctgtttacaccggcaccggccgtcgtaaagaggccgtcgctcgtgttcgtcttgttcctggaactggtaaggttaccgttaacggccgcgaggcagtccagtattttggtcgccagcagctcgtagacaacgcaaccgcacctctccgcattactgatactcttggtcgtttcgacgtcctcgcaaactgcgatggtggcggcatcaacggccagtccggcgctcttcgcctgggcattgctcgcgctcttctcgaggctggcgagtatcgtgatgaccttaagaaggccggctacctcacccgcgattctcgtgcggtcgagcgtaagaagtacggtctgaagaaggctcgtaagcgtcctcagttctccaagcgctaaggccgctggacccaaaaaagtcctcacaaagagacctgttgtatatcggcaggtctcttttttgtatacttttaaatggttgcattttgcatatttgcgcaactgctttagtccgcacgttcttcttgccatctggcgagaagccccacctgtcgagtagttcgctggcgcttcgcgcgcacgttgctctccacccgacaacattacattcgcagctaggagacgcttatgaagtactttggaaccgacggctttagaggccgcgcaaacgagggtttgaacgtcgatcacgcgtacaaaattggccgtttcattggctggtattatggagctaagcagtcccgcaaggctcgcatcattattggtaaagatacccgcaggtcaagctatatgtttgagtccgcacttgtctcgggcctggttgcttccggtgctgacgcgtatatgctgcacgtcattcctactcctggcgttagctacgaggtagtagacggtggttttgactgcggcgtcatgattaccgcgtctcataatccgtttaccgataacggcatcaagctggtcaacaaagacggctacaagatggacgaggacgtccttgagcaggtagaggcctacattgacggagagtttgacgtacctctggcaacgggcgacgccatcggttgcacggtcgactacatgcaaggccgcaaccgatacatctccagccttattgcaagctgcggctttagcctgcagggcctaaagattggcctggactgtgcaaacggtgcagcttctagcgttgctcgccctgtttttgatgctctgggcgccgagacccacgttatcaacaacgctccaaacggcctcaacatcaacgttgattgcggctccactcacattgaccagctgcagcgctttgtggtccagaacggccttgacgtgggctttgcttacgacggagatgctgaccgctgcctggcagttgacgagcgtggccatgtggttgacggagacctgattctctacgtctgcggtacctatctcaacaagtatggtcgcctggcaaagcagaccgtggtcactaccgtcatgagcaacttcggcctgttcaaagcatttgacgacgccggcctctcttacgagaagaccaacgtgggcgataagtacgtctatgcttgcatgaacgaaaacgagtacagcctgggcggcgagcagagtggccacatcatctttggcgatcttgcaaagaccggtgacggcatcttgaccagcctccgtattatggaggtcttacgagcagagcgcgagaaactctctgagctgactcgtcccgttacactatatccacagcagttggttaacgtccgcgttaccgacaaagaggccgctatgcagtctcctaaggtcaacgacgcagttgcagctgccgagaagttccttgagggcaatggccgcgtgttggtccgcgcttccggaacagagcctctggtacgcgttcttgcagaagctccaactgatgagctctgccagcaggcaaaccagattgtgctcgacgcacttgaggagtataggctcagcgcttaagcgcagatagatccaggggatacgatggcactggcaggaataggtgtagatatgcttgagattgcccgcatgcagcaggcaattaagaggcgccctcactttattcgccgtatgttcaccgatgccgagcgtgcgtattgtgagcgcactgctcgtcctgcggagcactatgctgctcgctttgcggcaagagaagccgtgctcaaagccttaggaacgggtttctcgtctggtattggttttcaggatgtgtctgttgagagagatcaactgggcaggccacaggcgcgcctggctggcaaggctgcacagattgcggccgagcagggcgtgcaagagattgcgctttctatctcgtacaccagagacgtggcggtagccaatgcagttgcggtgaccaatgccgtaaaacccaaggtagatcaaaaggaagacgctgcccaagagctggcgcgttcgttcaaagaagctcgttctgtgttggatgagcttgagcgcgtgcaagaacctataattgagacaacctttgatgatgttgttaaatccgaggagtaagttatgcagccggtactaaatgttgaggacatcaagcgtgtagagattgcgctgacacgcgtgggcgtgagcgtttccgagcttatgcaccgtgcaggttacgctgctgctcaagaggcccttggcatgggaggggacatctctaacgttgtcatcctcgtaggtcttggcaataacgggggagatggctgggtggcagcagaagcgctgcgctctagaaactgtaacgttaaggtggtcactccacttgagcctgatcagatttccggcgatcttgcacgtcagatggcgcagcgcgccgttcgcgcgggagtctccgtgcttgttggcccttctcgccaggagctgattgacctgctggcaacggctgatgtggtgctcgattgtatgctgggcaccggcttccacggcaaggttcgtgctccgtttgatatttggattgagtgcttgaatcagtctggtgctcgcgtgctttccgttgacgttccaagtggtctttctgcgcagaagggccaggtagaaagcgcatgtgttgtcgccgacgtcactgttaccatgattgcactgaagcccggccttattgccgatgctggccgcgatgtctgcggctctattgttgtagcacctctggccgagcagaccgagcgtctggttgttgaggcagatcctgttgcctggcgtgttgacctggaagattatcttccctgtgttcccgcgcagctcaataactgcgataagtactctcgtggctccgtgttggtggttggcggctctagccgcttccctggagccgctgtctttgctgccaaggctgctgctcgcgcgggtgctggctacgttacgctggctgttcctgaggcaattgtcagctgcgttcagatgatgttgccagaggttcccgttattggcctcccgtgtgacgctgagggcgtgtttaccgaggaagcagctccactggtgctgcaacttgccgccatgcgtacggttacgttggttggccctggcatgcgcgtttctggcggaaccgtcaaggttacctctgcattgcttgattctgagttgctcgttattgttgacgccgatgcgctcaactgcattgctcgcctcaccaataacaacctcccagatttccctgagcttacacgtcgtaccgctccgctcatcatgactccacatcgtcgagagcttggtcgcctgatcaatcaagttgacaatccacccgcaagcctggtggctcagctggaggccgctcgcaagattgtctgggcagatggtggctctgagctggtcattgttgccaagggtaccgctactggttgcgtaggcgtacagaaagctgtgctgccaaagcctggtcccgttacgctggcaaccgctggttctggcgatgttcttgctggtactattgctggccgcttaactcaggttgctggtcaagttgatgatctgccaaccttctgctcgcttgcctgtgaggttcacgcatacgcaggtcagctagctgccgagaagttcggtgtacgcggagctatggcgggcgacatctgcgatgttattggtcttgcttccgacgcacttgaagagcaaattgcattccctatggaagactttgaagaagctgcggagtaggtgagcctgatgtcggcatatccccaggatagatgggcttggatagagatcgatctttctgccgtccgccacaacgtaaaggcatttaaggcccagcttaaccgcggtgtcaagatgatgtgtgtggttaaggccgacgcctatggacacggtgctgctcagtgcgctaaagccatgcaatccgtgggcgccgatcagtttgccgttgcaacggttgacgagggagtggagctgcgttgcgcgggcatcgataaccccatcctggttctttccgagcctccggtcacttctattccagacctcgttcgttttgacattatgccttccgtctacacggttgactttgcgcttgcgtatggcgaggcttccgctgcagctaacaaggttggtcgctatcacctggccattgatactggaatgactcgcattggcgtcaggcgagaagatttgcttgaggtacgcggctctattgatttccacagaggccttgaatgtgctggcacgtttacgcattttgctacggccgacgtgctcgacaactgggactttgatctgcaggttaatcgttttattgaagccgttacaacgcttaaaaacgcaggctatgagctgggcttggttcacgccgacaacactcctggcacggttctgcacaaagatattcagtttgatatggttcgcgtgggcattggcctgtacggacttcatcctagcaagctcactattccccgcattgacttgcagcccgtcatgagcgtacgcggtcgtgtgacgcgcgtggtgtatccagctgttggcgatggcgttggctatggtatgacgtggcgcgttcctcgcaataacatccaggtagcaacggtgcctatcggatatgccgatggtcttgcacgcagcctttctaaccgcatggacgttttgacgcgcggagaccgtgtccgtcaggtgggtaacatctgtatggatcagttcatgattgctgttgataccgcaggaacacacgctaataagcccgcgcacgaaattcgctatggtgacgtggttaccctcattggcaaagacggcgaccaagagattaccgcagatgagatggctgacctgcgcgagactatcaattacgaggttgtttgcaattttggtgcgcgcctcgataaggtgtacatctaatggtagttactcctgattctcctaaaaatgctgtaggaagaaagcgcatgtcaaatgtagaatatacgaaaatcgcatattctaaacaagcaggtaaaacgcttgatgagattcgtgagcagatagctgattgcaagaagtgtccgctttgggaaacacgcaccaatattgtgtttggtggcccaaaccccatagctcgcgttatgattgtgggagaagctcctggtaaaaatgaggatctaagtggtcaacccttcgtgggcgtatcgggcaaaaagcttgatgcactgttagaagaagttggcctttctcgccaggatgtttttatctctaacgtggtcaaatgccgaccaccttcaaacagaaatcccaaggtagccgaggtggaggagtgctctccgtaccttcgcgaccagattcgcgctattaagccggacgttattgtctgcctgggtaattttgcaacgcagtttgtcatgcataccgataagggtgtgacggagttgcgcggcaagttttaccagataggctcctttagcgtgctacctactatgcatcccgcatcaactatttaccgcagggagtgggcacagttcctcaaagatgacctgcgacttcttgctgattggcttaagaaacatcctcggggaggttcttgtgattaatccttctgccagcgctgacattggcacaaataacaccattgcaaacaacctgccagaaaaaactgcagctggtacgtttgtctccactaccactgaacagaccattgctcttggtcgggttctaggtaaactcctgcaggcaggagatgttctagtgctcacaggagacttgggcgcgggaaagacgcaactcactaagggtattgctgcaggcatgggtgttactgatgacgtaaccagcccaacctttactatcgagatggtttatgagggtacaaccatgccgctctatcactttgatttgtatcgtttgagcaatcctgaccagctcgaagataccggcctctatgatgcgcttgagtccgatgggccaactatcattgagtggggagagcaatttgcagagcaaattggcgagagaactcttgatgtgtatgtttccaggttatcagaggaagagttagtttccgatgacgctgagcctcgtcgtgagattcgatttatctcgcaaaatgttcgtggagaagaaattatccagtcgctttaatttttaactgcgataaaagattttaattagtaataaagcattcctagaagtagaagttctagatgccgtttacggtaataatgcgccagcttccaatcaacaagagagctaatttaagaaatttcctgtaacatatttgataatggatgcttaaattttaaaatgaactttcactaatgaactagatgtctacattgatgagctgagtacttacgtataaaacatttacgtgttaagcgtggaatacatagacgccacctgtacaataggtggcgtctattctttttaccgactgctcttttgagcttaagaaagaagcgtgatctatcatgcagaaggctttgatttcgattgactacacctacgattttgtagcagatgatggaaagcttacagcaggtaagccggctcaggctatttcagatgctatttatgaggctacaaagtgtgcttttgatcgtggtgattatattttctttgctattgatgctcacgacccagaggataatttccatccagagactaagcttttcccacctcacaatattatcggcacaagtggtagagacctgtttggacctctgaatgatttttatcagcagcacaaagacgatagccatgtgttctggatggacaaacgtcattactcgtccttctcgggaactgatcttgatattcgtctgagggagcgcggtattaacacagttatcctgactggcgttcttaccgatatctgcgtgatgcacacggcagtggacgcttacaacctgggttatcacattgaggttgttgagccagcagttgcatcgctgacgccagaaaaccatcagtttgctctttcgcacttcaagtacacgcttggtgcaacattggttaacgcagagcttaatgagattgagagcgcataatgacgccagaacaacgagcagttaaatggtttgagaaagtgcccgaggcagatgacctttcatttgaccagagacttgctatttgcaaaaagactggaaataccatggcacttgtctttgttgttctattttcgcttgagttgatacttgcgtatgtgcttaccgacggctcatttgtattcactatgactgatattttaaacagcatactatcaagacctggtagaagagttacggcccagggagtggctgtcgcgggtattcttgtggttgcgccactattggtcattcctgtagctgtcgcgttttttactcgttccattgtttttaatcaagaaattaagaagtgcttaagtaagtagttaagtaaattagttaaagcatttataagacccaagaataaaacttgggtctttttttgttacctctggctaacttatctgataagatacggatgttcaatgggcaaaactgttgtggctcaattggagggttcacataaacagttagattgggggaagctctatgtacgttaagcatgcgccaagtaggctccgtgctcagtttgctgttgtgatggcaattgctgcttgcttgtttttctggccatttacaacaaaggcttatgcagatggaacgtttgagattactgactggctctcgggctatggttctagtagtttgcaatacatctacagcaacaacaaggctgcaatggatgctgcatccacatggtctttctctggttcaagggtgactattggcgccagtagcggttcttctattcaggacttcactgttcctactaccgtaacaaatattactagtacctatcagagcacctacttgggcaatggtactcgtgttcaggtttacgctggtctgaatcctaagggttctcgcattattttcccaactggctttaacggaaccgtctcaaatatgaagtttgagggcgaggttattgttgaggctggtgcaaacgtaacctttgataatgttacgttctataacggtcttgataacagaggtacttcaactgttaagaactccacggttgttcagattgatcttactaccaccaatggcggtgatttgactatcgagaataccaggttccagaattccaacaataccgctggcgtagtgcttccttctaataagatcgctcctgcaaaggttggcgaggcctacaacgagccaatcaccattccttgggctgcatctactatgggttacgacacctttaccgtagacaatctgcctgctggtcttacgcttagtccaatggagaatgatgcaactgctcgtagaagcactgcaactatttctggtactccaactgctgcaagcaatggttatacgcgcatcaccatcaagaatggcactctgtatgactttactattcctatgaagatgagcgttcagaagggcaccgtttctgttccagccgcaaccaactatacctataacggtcatctgcgaagaggctttgatgccaccgctaacccacaggtagttgttagtggccaggtttcagcaacttatcctggtacgtatgacgttgagcttgatctagctgaccctatgaactacacctgggaagatggcaccgttggtaccaaggatgcaaattggacaatcaataaggctcagcttgttgtgacctatgctggcgagactgttcagaagggcgttgctcctcagcttgctcttactgttaccggttttgtaaacggtgagactgctgatactgctcgcaactacaccgctcctaccctcagcgcaactgacctgagcgttggtgcgcacgagttgactcctgcaggtggctcagctgacgactacgagttcgtctacgtttctggaactcttaccgtgaccgatactgcaagcgacccatctaatagcaacgccaacaacagcaccaacaacggcaccaacaacggcaccaacaacggcaccaacagctctcagaagaagcacaagtcgcacaagaagggagtgctgccagatacctctgacgcttccgttgttctgtcttctgtcagtatgattgctgctgcaggcgcaatagcttctggtattcgttttcgtaagcgcgcatagcaggaattgagctttaacactcttttcaattgctttaactgacaacagccttctctgtaaagggaaggctgttttgctttatattttatttactctagtaaaagaattaccttttatggaatcgataacataaatctattcttcgatatttgctgtagatataaaattaaattaactcgtttatttttaatcaaggagctgccatgtcaaaatctgatcgtggacgtgtttttggagttgatttaggaaagtccggaaatggtctagcgagtatcgattacgagaataaagatatcaattttctttcaagtaggccttttaaggctccagagaatagagctggcaaatcacttgccaaagttagacgagaagcgcggtctattagacgacagcttgataggaagtcaacaagaaaaaagcaaattataaaggtactaaagcaatttagtgttattgctcaagaatgtgacagcagatggtttgaaacaaaaaagaatggtaacggtgggattgacttaccgattattatcttaagaagtcaggggcttgatcgacagcttactaatagagagtgggctcgtgttctttattggttctgcagccagcgcggatacatcaatcgaggagaagagactttaagtaataaagaagcttcagttgaggactcttctgaatctgatgaagtgggaaaagttctttctgctatttcagataatagaaacgcacttaagagatcaggttataggacttttggtgagtacctctataaagagatctatgccacaacccgtagctatagaaataaaaatggcgaatatagacattgtgtatctcatccaatggttgttgatgagattaatgagttatttaagcaacaacgtaagcttggaaatacatacacttcagaagaatttagagatgcttatttagaacagtttaattggcttaaagatactatagcttttgataagttgacctatcaaaaggttggctactgtgtttactttgatcaatatagtgacgaacctaaaaaaagagcggcaaacgctgatttaatttctgaagtcgttaaagcctatgaaaagcttggaaatatacgtttgaaatttgacgataagtcagaacaaaatctaactaaggaagttagagatgcggttattaatgagatgtttagcattcatcaaggtagtagggtaaaatccataacatacaaaactttgcgcaaattaatagataacgaaaatttgattgagtttaaaggaatcaaaccagatttagagaagaacccagtgtttgttcctaaggcctggaatatctactgtagagtgttttctgcatctaatcctggacttcagctgttaaatagaatgaagaaagactttaaatttgctaatgcgatttcagagtctctgacttatgcgacatctcttgaaagtcttgaatcaagaattttaatgtatcaagataaagaggacttagtaatctctgaggaagagcttactttaatagaatctttaccttataattcaaaaatttttaaaggatacggctcaagatccattgaagcgcttgagatgctatacgatcaatttacagagggagaagctttcacatttgatgaagctgaaaagcaatcgggacttcaaggttttagattaagggacaaaggaattaaacaaagacttcttcctccatattctgattatgaccctcagtgtactaatcctgtcgttttaagatctctttctcaggccaggaaaatgataaattccggaattaaacaatttggaatgccagacattatcagagttgaattagctaaggagttaacaaaatctcctaagcaaagagaaaaaattgcaaaggagcaaaacaaaaatagaaaagaaaatgaaaggattagaaaagaaatttctaaatttcttgaaattgattcttcttgtgtgacaaaaaagcagattctaaagaaaaaattatatgaagagcaaaaaggtctagacgtatatacaggtgaggctctaggagcgtctctacacgatgatgacctgacataccttaaagatgacagttattgtcaaattgaccatatattaccttattcaagaagtgctgatgactctattgcaaataaggtgttggttttagccaaatctaatcaagacaaaggcaacagaacaccatttgagtggatgacttcaggtcatggatatcatctttcatgggaagaattctctatcagagtctccaccaatttgtcatttccagacagcaagaaatggagattgctagaagaagacttcgataaaaaagaagttcaatttatgaatcgtaatctttcggatactcagtatatgagtaaagctattgttgcgtggctttctgatactttagatttcccatcgcgatatggccaaaaacaacatgtctatgcaacaaatggaagaatgacgtcaaaattgagaaaagaatgacgtcaaaattgagaaaagaatggggcttaaatttcggagagaatggcattaaagataggaacgataaaagacatcatgctattgatgctgcagtgattgcagcttgtagtgcatctatggttaaagagtttgcaacttcatactctagattacgtgaaacaaagaattctactattgctgaaccttgggaaggtttcgcagatcaagtgcgagaagcaagagaatgggtaattcctacaatgtaccgtcccaataaaaagaatggcttgatgtttgaagatagacgttatcgatatgcagggaagacaaataaacatattttgataggaaaagaaggaaaagagaaaacatcaggaaatattcgtttctttgataatgaaaaagatggcaagcatgtaaaaattgttggagatgttgcctatattagactttggcttgatgtaaatgctcgagaaggtaaaggagaatggctaatcgagccggtttattttgccgatttacagtccataaaaaatggtacatatattccaaaatatatcgccacttataatgcgaccaatgatgaatggaaatcagttcctgatgatgtcttgtcaaaaaataatcctctgatagttcatagacaagatgttattaaagtagactcttcattttttagagtcaattcagtcgatattgctaaaaaaacactaaaacttatacctgtgttttatgattctaaatatagcaatccagaattgatgataactagaaaatgggacaaaagtacaaagatagaattggtttatgaagacgcacttggaatgatatggttcaattttttaaagaaccaaaactctagtgaaagttgagctggattataagataacttaccttttttcgatgaattgatcagaatcttcctccctgtgtattgcttttcagtaagctcgagaacagttacacatcctttgggaggaagatttttatttactcttgagaggtggctatttgtattttcagtacctaaagttaccctactatagacacttaattgctccattacccagccggagccaactaagaacttgtggaatgcttgataagcttttttatcagattgggtcctggttgataggtcacacataattagtaatcttatgactcttctccttattcaaaagtaatcaattcaatgggtaaaagagaaggacatgaaaaacggaagaatcttctttcttcatgcttctaattaaggattcgattgattcgtctattgattgtcttacggaaatttttctttcgttttgaaaaacataaagttctaaaactttagataaagccactttgacctcatgtgataactctacatttaatttgtacgatgcgatataaaaatctacaactagtctaaatggttcaataagatcatccgctaaattaaatgcattttcaatgctattgtggtgaatcccttttgaaggcattaatccatgggctatcaatgattgaatgattgcagatctaataattgaataaccatagtctagagaaggagtccatttactatctcgtcgtgatccatctgtaattaaaattttgaagtaggtttgagctgccacagcttctcaattagtcgcatcatcggactgtatcttatcaattagtttgcgaactgaaagaaatggaaggtttaaatattctaaacagagtgactgattatagattttggtagatacaattgatttccattgttgcttttgtaagagctttttcacgttaaattgaaggctaattaactcgttctgtcgacaattacctacgaggggaagaataatcgcctctggaatatgattgatcctacaacacaggatacttgctttgtttttgctaatttctgttattagtctttctgtaatgacaactgcgggatgatcaatagtaatcatccctatatcttctatagggatagagataattctttcttcatgtttgtcaatttgaagttgagaatgcttataggacaaatacgccgctgaccgaattgctattgagtattgcacgattcacctcttaataagaagctttctgatacaatatgcatatgttttgattcatactttctgggagatcgtacggatctagacaaggccaagcatttttatgcttgagccgcaaacgaagcccggggcaacccgggctagtttttataaattatgtcaactatcgtgaattttttggagagatttgtatagttttcaaaataccaagcccctgaattccttgttaaacaaggaaaacaagggcttggtattttactacctgggagatcgtacggtaatcaagacttgcaatatgccgaatatgcttgattacctattttattacctgggagatcgtacggtaatcaagacttttactatacacaccggacaaatacttgtattttactacccaggagatcgtacggtaatcaaagaggaacactatgggtactcgaatttttaataagaataatttgattgaaaaatcagtgtcgttttaaagcactaactttatttcagctgaaagaaacttaaagaaacgtcatcttacgattattgcaagtttaaaatctaagatgatgcaagtttcaataacgttcctgagattcaaggttagtgtagacacaatatattattttagcaagaaaggtatctattatggctactagtgaagcacagaaaagggccagcgctaaatatcgaaagaataacgtaaaggcaattatgtttaatctatatccaagtgatagcgatttaatagagttcttggaaggtaaagagaatcgttcaagctacatcaaagagcttatccgcaaggatatgaataattcaaaaaattagtttgagctagcgtctgtatttggcgttctcaaatgcaatcttgaagtcttcaagcagttcacgcgggaccttctcctgatctccgtggtgaagttcttgcataaacacattgcttatagctccaaaaatcaggcgaggagcaatcttatctgcaagaggaacaaactctagagcgtatctcttgtcgtcgatagtgagccaggtacctctccaactgccgaccgttccttcaatatctgaagcatgggcagaagcaaagacattttgattgttatcaaagaggtacacgacaccatctgcgtcaacaccaacaaaaccgtctgtagcgcattgttcaaaaccagaaacaatatgcgcaccactggtccagaacacccagttcttctcgccagccatagacagacctttctaggacatcaaaagtttattgattaaatggtagttggagagcgattctagggcaagtaattttcggtcaaaaaacatagtttacctgctaactcaacctgctgttgagtagttggaaaccgttacgctacctaactcaactgatgcgttcttgttgaacgtattgttacgactcatagtggaatcagcggcccgcaagctatttcagtaataatgagttgagaaaaaggagcaactatgactacttcacctgagacccttggtcgtcgtattgcacgtcttcgtttggctagaactgcaacgcaggagcgtctggcaaaagagctgaacgtgagcccgcaggcggtgagcaaatgggagaacgacattaactatccggatatctcgctgttgccagatcttgcacgcttccttggtgtgtttgttgacgagcttttgagtggcgcaagtgcttccgctcaggagagtgttgctgcccaagagagtactgtcgagaagagcgctgctgaggctgtttctgttgtagttgacgagcccgcagagatcgtagaagagcccatcgagcaggacaaccagggtattgctactcagtcttcaggtttcagctttggtaagctttttggtaagagtatgatcaaagtcgagaagagcgacgaggctgacggtagcaagaagaagggcgtccgccttggaaacggctctgcaaaacacggcttgcacttgtatatagtctccgatgacggcgacgttgtagatatgtgcgtacctctgggactggcaaaatttgttttgaattctggaattcagataagcggaagctatcttaatcaggaaactcaggagcagctctctaacattaatcttgatgcacttatggatgctgcaaagacaggcgagagtggcacacttgtggatattacttccgcagacggcgacgttgtaaagatctggtttgattaagcgctaacgattacatagcctgacaaaaaacgagatacgcccgggcagttacttgtcgggaaacggtctcgtttttgttggcgcggatttacttaaggttcattattccatgttacttctcatttgatgtaaaataatgctactaaattgcgtactggatagtacgggctcaagagagccaattatcttttttggcatcttcatattgcatggagatgccattttttaaaaggagaatgtaatggagcaaattgctctgttgttcgaatcttctgcagagaaccctaatgttgttgattctgtttggtataacgagtggtcggcagcaaaagagttttcacagtttgatgttcatctttttaattacgaggcatatcttaatggcgaagaacttatttgtgataaagctccaaaacatgacatgccaacgtttcttcgctgtcatccaacctctaaagaaaattacaaacgcctagagcatgatcttttgtctttggggtataggcttttgactgattcttggcgtgtaatcggtcctgaggaatggggattaggaatttcttcagcacgggattacgaaattgagagtatcaatgtcggcgcatgttttggctcaagtggtcatggctcctattctcctaccgtctatgtcataagagacgctgacggtcctcttagtgatttgaaagaaagcctagctataggatatttttctggagatgagggcgaagaacttgctaaaaaatttgagaaagcaaaaggtactcactttactggtagggcttttttcgagaaacatgtaacaaaacttacatgtagtgatgttcctgtgacttggagagttttttattttgagggtaaggccttttttaaaagttcaatagagccagaagccttaacaatttgtcccaatttacccaaaccacctaaaaagcttgttggggtgtttcagggtgttgcccggaacttattttatgcttgcgatttcatcttattaaaagagggcatttggaaatgtaataggttttttgacggacagatgtctcaggtcccgattggtgaagacactaaaaaattctatacaacacttgctagatgtattaaaaaggcacctcaaattccagaatgggtatggtgtcttactgcggaagttagagatgaaaataagattggggaggataaacgcattgttcatggaacgcgtcatttttctccaggtacaaaagtttttcttcacccaccaaattgggatgaacgtgtccctgcaataggcatccctcgttatacagataaatatatacgcgttgttatggatgtcagaaaacttgaacattttgcattagagaaagtaagtgatccggaaattgtaactgcacttcaaaatcctggtaacatctggatgtttacccacatggcgccaacttcagttggacgtggctactgggatcagagtgaggaatcaaaacaacgtattcaggaagatataaattggctttctcatttagattcagatggaaagcgctggtcataacttattttgttgacatcacattaaagggatgtagaattacattaacaacgtgtagcacaattagcagtgcccttgctggagatgacccaggtgcaaatcctggccgttgttattagccgccttagagcggctttttgtttagcattaatttgatttacatgcgcacacaaacaaaagcacctcagtcatcccacaagggggatagccggggcgcttttgcttcaatatagcatatgtctacaatgagaagtcattcggacgcgcaatcctatcaactatacttgtggcaaataaattcgacgtaatgttgcaacagcacgttcttctcgaccggtagtggagattcttacatgaagtctttgattgtgtactattcatattccggcatcacaagaaggcttacagaggacattgcgctgattactgatggtgagttgctggagcttaagcctcaagatccctattctttctcgtataacacggcggtaaaagaggttagggttcaaatagaaaagggtgtttgtcctgtacttatgccaagtgatgtacatgtcggtgactttgatactgtttttataggatcgcccaactggcttaaaacatttgctcctccggtgctttcgttcttaagagcaacggatttgagtggtaagacaatcgttccgttctgcacgcatggcggcggaggatttggaaacatgattgaggagtaccagggggagtgcagtgcttctcgtgtaatgcctggactggcggtaaaaggcacgtatacttttagtgaagtgcaaaagtggctggatttgatagggttggacaatgcgagtacttctagctgaagatgagaagagaatggccgcagctattgtggctctcttgaaacaagaaaaatacgacgtcgatcatatgactgacggcacgtccgctcttctcgccctagaaagcaacatgttcgacatggcaatccttgatgtcatgatgcctaaaatgagcggttttgaggtttctcggagggctcgcagcaagggaattactattcccattttgatgctgacggcaaaaagccagctagacgataaggttgagggcctggataacggtgccgacgattacctgaccaagccgttccagacggcggagttgttggctcgcttgcgcgcactgggaagaaggagttctagcttccaggaaaatgttctgcgctttggcgatctctcgctcgatgctacaacagcaacgcttacctgcgaaacttctggccagagcgttcgcttgagcgaaaaagagctgcgcattcttgagtatatgattggcaatcacggtcgtattatgacgcgcgatcagcttgccattaagatatggggatttgaaagcgacgccgagtacaacaacgttgaggtgtacatgtcgtttactcgtaaaaagctggcatttatcggttctacggtagagattaaagcagttcgtggcttgggatatgaattgagggactaaactgtttaggcaatccagaagaaaaatcgtcctttccattatggtgtcgcttgtgctgttgtttacggtgacgctgtcggttattctgtttgcgagcactcaggagatcaggcagaagaacatggacgcgctcaaccgctatgcaagccagtattcgcttgagaaggaaaaaggtagttctgagggacaggatggttcggggggacagagtagctcagagggcaagggcggttctgaggggcaaacaagctccgaaggtcagagtccacagcagccactggtcaaacctgacgctcagctgtcaaacaaatctgacaatcaaccgccaggccagagatctgcttacgagctctcaacgttttactcagtatcgttttctgcagacggctctgtactttcagtttttaatggcgagaaaaccgttagctccgatgaaaacctcgctgagtttgctcgtcagattttgaacgaaggaaattcttctggcagaacaggtaatctttcctacgtggttatgaaaaaagatggttatacgcttgtggcgtttatggataacaccgtttctgaagccggtcttcagaccatgatgcgaaacgctctgcttgtaggaggcgcgtcgctggtagttatgttctttatttctgtgtttctggcaaagcgcatcattcacccacttgaagagagcgataaaaagcagaagcagtttatatccgacgcaagtcacgagctcaagactcctattgcggttattgacgccaatgcagagattctatccagagagcttagccacaacgaatggctctccaacattcaatacgaaagcaatcgtatgggaaagttggtaaaacagctgctagatttttctagtgcggagaatagagaagttcctatggaaaagctggacttttctcatgtggttactggagaatcactggtctttgagacgtttgcgttcgagaatggcaaggtacttcaaagcaacattgaagaggggattgttcttacaggcaatcagaatcaacttatgcaagttatttctgtgctgcttgataatgccctgaggcacgcaacgggtactcagattgaactaaatctcaagaaacaaggccatagtgccatcttaagcgttagtaacgacgcggaagagatttctcaggaaaagcttgatcatctagttgaccgtttttatcgcgttgatgatgttcgaaacagtgaggataatcactatggactaggcctttcgattgcacaagctgtagttcaaaagcatggcggaaccattaatgtaggctactcagaaggtaggattacctttactgttcagcttcctattaagggcaaataacgtgtagatagaaattcaatattcaatctttagttcaataaaattgttttatatagacgtttttctcgtgaagacgtcttttttatttgcgcaggtagatgactatagagcaaaatatgtgaaaatcgcatattttgcatttgaactggtgttttactaactttccaaaaatttctaaaaaaactttgagaattcaatctttgttcaatcttcgccccctactatgtcctcatcagatgcaagggagtaaaaatcacttcattgcatacaccaaataagtgcaaggaggcgcacattatgcagtacacaagaagagatgtagtagccggtcttccagttttgatgacattcggacttgctggttgcaaaaccgcaaaagcaaccgctgataacacaaccgaagctaccaagaaggcttcagaagcacttcggattaccgccgctcagaccctagatggttatgcagtcaacagcactactgctgatgagaataccatcctggtcaatactaccgacgatgtaaccattaccaattccacgattactaagacaggagattccgacggcggagataactgtaacttctacggtcagaacgctgcagttcttgttgagggaggttcaaccactacgctgactaacctcaccgttacttcagatgcaaagggtgccaacggcatcttcagctacggtggcaacggaggtcacaacggtagtgagggcgatggcaccaaggtcatcatcaaagactccatcatcacgacaaccggcgacggctctggtggcaccatgacaaccggtggcggcaccaccaatgcctacaacctcacggttaccacaaacggtcagtcctctgcagctattcgtaccgataggggcggcggaacagtctacgtagacggcggtacctatacctccaatggtctgggttcgccagcaatctattccacggcagagatccacgttgctaacgccacacttgtttctaacctttccgagggcgtttgtattgagggcttgaattccattgagcttaccgattgcgacctcacggcaaacaacaccaagtgcaatggcaacgcaaccttcatggataccatcatgatttatcagtccatgtccggagacgcagcaacgggtaattccacctttgctatgaccggtggttccctcaccagcaagaacggccacatgttccacgttactaacactaacgctgacattgagctcaatggcgtcaagttaactaacgaagacgctgttaacgttcttatctctgtctgcgatgatggttggaatggcggcaataacaaggcaacctttaacgctaaagctcaagacctggtgggagcggtgcttgttagcaacaactccacacttgctctgaacctcaccgaagga

SEQ ID NO: 3399 - DNA, 19606 bp, synthetic construct
  misc_feature 1..19606: note = Synthetic
  source 1..19606: mol_type = other DNA
cttaggtgtgttttgaactgcctcctatttctcgtgtccaagaaatgggaggcagttcaattttctagaggcgtttctttttaaggtatctttgattcgtgaggagacgaacctttaaaatacgctaaaagatatatccctttgcaacagcccagttccagatgcggtcagcctgtacttcacagcgctgcttaagttcagcagtgttagaacctgtgaaagtaacttgctggacagaaagaggaaggttatctggcctactaatagtcagagttgcactgttcatagccaggcgagctgtcttgttagcaccaacgcggaccttaacagtaaagtaaccacgagcaacaggccactcggtaacttctccgctattggctgttccggacctgaatccgtttgcattagcaataatgctatagccactcataaagaaaccagctgcaataagtaggccaccaatggcgcacaaaagaattcctgcaaaaatagtgccctcaccatttaaattaaagaaattccagagaccgccaacagcaaaaaacgcaccggttgcccaaccaacaagtgggctagcagctccctgaggtttaccaaaatcaattacatcgtaagtaagaggaattggggaggtgtcgtttttatcgtaaagataaacgttgcttagagtttcttgtttttgagcgagtttttgtggtatttctagtggagttggaagtgacataaagcgtcctccttttaactggtagaaccgttcaggatattaaaattatcctatttgagggatttattgtaacatattggatagtagaggcttaaattttttaatttttcactgctcccgctgaaagaatgcttaatgaaaagacgtcaactagcactgatttgcgcactggtccttgcgctttttcaggtgctgtatttactgcgtgtagttttaacattggtataccatcacctgaagaaattgccgcccagaaggaagcagaagagaagaaagctgcgcttgctccttatgtaggcatttgggaagccaagtcaattgaggatgaaaataagggcacagtcactgaagacatgtacaaagatgttagagatgtttatctagcaatttatggctatgacttctctgacgatggcactggtttgttcgttcgcttcggtgctcagaagccctttacctggtctgttgatgctgacggcaagattactattacccttgcaggtaatgccggaagctatacagcaactgttgattcctcaggccagatgaccgttgagggctctgatggttcaaaagctatccttactcgggtaagcacaacctcaggtgattattctcatattaggtatgagccttttaatccactaacaggaacgggcaatatttctaagaacacttcatcgcatgaaactaaactacgctttactatcaccactgagcttgatcaggtcattgttgataccgatgagctctatgtaaggcttattggcatcgcttcccttaaagacctcaagggttttgaaggctatgtctttgaggttattaatagaactccttatacaaccggctataaatttgatattcaagatccaaccaaaggctattgggcttatggatttaacgtgttagagccaggtgagagagtctatgagtatgttcttaataacaatgttagagataagtcactttctgaagtcacggatgtaaaaggcactcttgagtatgaccactctagcaatggtgcccttcataatgacgagaaaaccgtgacatttgatttgcctactgggcagagcaagtaacagttaagagttagttttatatcgctgcacgtatggaaggaagtttaatgaaaaagcgtcaaatgctgttaggatgcctgcttgcactggtgctttctgtaagtgcagtgctcagcgcctgttcatctggggataatagtcccgcaggaaacaaaaagtctgctggtcagatcgtaggtgtttgggaagcttatgacatctttgaacccggactaggaaacctgagggagggagcaggctacgacgattataaagaacagttccatgcaatttatgctttcagctttgctgaggatggaactggcttgtttactcgctttggcataatgaagccttttacctggactgttgatgcagaaggaaagattacagttacccttgagggtactgcgggttcttttacgggacagattgacgctgagactggcaggttaaggctcaagggcactggctacgatgagactgacgccgagcttaagcagatttcaactactgctggagactatgcaagtgctacctatcagccatttgatcaacttaccaataaaggtaccataccaaccatgattaggtataacgatctcaagtttaagaattttgaaataactcgagaggtcaataaagttcttatcgatacagataagctgtatatgaatctgtacgctatcgctcaggtgccgggaagctctcaagaaggttacgtatttgagattatcaataagtgtcctgagtcattttacggagagttctctcttggagatctacatggtcctctgaaagcctttggtcaagcctccttacaacctggtgagaagttctatttgttcgttcctaatgtctcgcaaacacctggatctcttgtggcactttccaatccaaaagccacggttgatactatttacactgacccaacaacgagcgtacttactcagcaaaggcagagattagaacttgatctaaacatccctcctaagtctgagtaacaaaagaacgcatatcttcaggttgatcactaccattgaaaggacacttgatgaaaaaacgtagaatactgccagttcttgcgcttgtcttggcgctctctactggtgttatgtttacggcttgcactcctaacattggtgggccttcggctgaagagattgcagctcagaaggaagcagaagagaagaaagctgctcttgctccgtttgtgggcgtttgggaagcaaagtctattagtgatcctaaccagggagatatccccgagagtgtttacccaacggcagtagaatccatgaagtcaatttatggctatgactttgctgatgacggcacgggcaattttatccgttttggcgctcagaagccctttacctggaccgctgatgccgatggcaagattaccatcacccttgcaggcaacgccggaagctatacagcaaccgttgattcctcaggccagatgaccattgagggctctgacggttccaaggcagtcctgaagcaagtcactaaaacatctggtgattattccagccttaagtacaagccttttgatgcaatggcagacaagggtactattgcgtataacttctcttctaccaagggcgaatataagatgcgctttaagttgaagaccgaggtggacaaggttcttatcgataatgacgatctctatgtcaggtatgttggtattgctaaatccccagatggttactctgaaggctacgtctttgagattatcaataggtctgaaaactgggtaaattacacttttaagttagataattctgagaattccgtatgggctaacgattccaactatcttgagagtggcgagagggtctttgcatttgttattaacgattcttatcagaaaaagcctcttgctgatcagactgaggtacaagcagttgttgagtactatcacatcaaaggcggtaagagtatggaagacactaagacagaaaacgttgacctgataatctctcagaagaagtaagtggactgccgccatgcgccaaatacgtacacataaaacaattacgtgttaagcgtggaatacagagacgtcacctgtacaatgggtggcgtctattcttttactgactgttcttttaaactcaagaaagaagcgtgaccaaacatgcagaaagctttgatttcgattgactacacctacgattttgtagcagatgacggaaagctgacagcaggtgcgccagctcaagctatttcagacgcaatttatgaggctacaaagtgcgcttttgatcgtggcgattatattttctttgctattgatgctcacgatccagaggataacttccatccagagactaagcttttcccacctcacaatattattggcacaagtggtagagacctgtttggtcctctaaatgatttctatcagcagcataaagacgatagccatgtattctggatggacaagcgtcactactcgtccttctcgggaactgatcttgatattcgtctgagggagcgcggcattaacacggttatcctaaccggtgttcttaccgatatctgcgtgctgcacacggcagtggacgcttacaacctgggttatcacattgaggttgttgagccagcagttgcatcgctgacgcctgagaatcatcagtttgcgcttgcgcacttcaagtacacccttggagcaacattagttgatgcagagcttaatgagattgagaactcgtaatgacgccagaagagcgcgcagttataagtaattaagtagttacgcacattagttaaagcgttgattagacccaaggtcaaaaacttgggtctttttgttggtcttttttgttacctaaggctaacttatctgataagatacgaattctatatgggcaaaactgttgtggctcaattggagagttcatataaacagtaagattgggggaagctctatgtacgttaagcatgtgccaagtaggctccgtgctcagcttgttgttgtgatggcaattgctgcttgcttgtttttctcgccatttgtaacaaaggcttatgcagatggaacatttgagattacggactggctctcgggctatggctctagcagtttgcagtatatctacagcaacaacaaggctgcgatggacgctgcatccacatggtctttctctggctcaagggtgactattggtgccggtagcgcttcttctattcaggacttcactgttcctactaccgtaaccaacattactagtacctatcagagcacgtatctgggtaacggtacgcgcgttcagatttacgctggcctgaatcctaagggttcacgcatcatttttccagctggttttaacggaaccgtttcaaatatgaagtttgagggcgatgttattgttgaggctggtgcaaacgtaacctttgacaatgttacgttctataacggtcttgataatagaggtacttcaactgttaagaactccacggttgttcaaattgaccttaccaccaccgatagcggtgatttgactatcgagaacaccaggttccagaattctaacaataccgctggcgtagtgcttccttctaacaagatcactcctgcaaaggttggtgaggcctacaacgagccaatcactattccttgggccgcatctactatgggttacgatacctttaccgtaagcaacctgcctgctggtcttacacttagtccaatggagaatgatgcagctgctcgtagaagtactgcaactatttctggtactccaactgctgcaagcaatggttatacgcgcatcaccatcaagaacagcggtctgtatgacttcaccattcctatgaagatgagcgttcagaagggcactgttgctgttccaaccgcaactaactatacctataacggtcataatcagcgtggttttgatgccaccgctaacccacaggtagttgttagtggccaggtttcagcaacttatcctggtacgtatgaagttgaacttgatcttgctgaccctatgaattacacctgggaagatggtaccactgccactaaggatgcaacttggacaatcaataaggctcagcttgttgtgacctatgctggcgagactgttcagaagggcgttgctcctcagcttatgcttactgttatcggttttgtaaacggtgagactgctgatactgctcgcaactacaccgctcctaccctcagcacaactgtcctgagcattggtgcgcacgagctgactcctgcaggtggttcagctgacgactacgagttcatctacgtttctggaactcttaccgtgaccgatactgcaagcgacccatctaacagcaacgccaacaacagcaccagcaacggtaccaacaacagcaccaacaacagcaccaacaacagcacgaacagctcgcagaagaagcataagttgcacaagaagggagtgctgccagatacctctgacgctgccgttgttctgtcttctgtcagtatgcttgctgctgcaggcgcaatagcttctggtattcgtcttcgtaagcgtgcatagtctctcagacgcagcaccctttgtaatcgtttgaactagaacagcctctcctgtatgggggaggctgtttttgatttatattttatttaccctaataaaagaattaccgtttatggaatagtttaaataagtctattcttcaatatttgctacagatatagaattgcattattcgtttgattttaatcaaggagctgccatgtcaaaatctgatcgtggacttgtttttggagttgatttaggaaaagcctcatgtggattagctattattgattatgaagctaaagaagtaaaattgctttcaagccgaattatcaaagctcctgaaaatagaagcggaaaatctctagctgcagtaaggcgagaaaagcgttcgattagacgacaaatcgacagaagagcagcaagaaaaaagaatgttttaaaagtattaaaacaatttggaattactccacaggattgtgattgcaagtggtttgaaactaagaaaaacggtaatgacggaatagatttaccggttattgtgttaagaagtcagggacttgatcgacaactctctaacagagaatgggcccgtattctctattggttctgtagtcagcgtggttatattaatcgaggagaagagactttaattaatggagaagtttctactgaagtttcttctgaatctgaggaagctggaaaagttctttctgctatctcagaaaataaaaaagcactaaaagaatcaggctatagaacttttggtgagtacttgtataaagagagctatgtttcaactcgtagctatagaaacaaagccggggattataaacattgcgtgtctcatccaatggttgtggatgagattaaagagttatttgagcaacagaagaagtttggaaatactcatacatcagaagaatttagagatgcttatttagaacagctcaattggcttaaagatactaaagcttttgataaattgacttatcaaaaggtgggctactgtgtttactttgatcaatatagtgatgagccccaaaaaagggcggcaaatgctgatttaatttctgaagtcgttaaagcttatgaaaagcttggaaatatacgtttgaaatttgatgataaaccagagcaatctctaacaagagaagttagagatgcagttattaatgagatgtttagtgttcatcaaggcgctaaagttaaatcggttacgtataaaactttgcgcaagctgatagacgatgacaatttggttggctttaaaggagttaaaccagatttagagaagaatccagtattcgtacctaaagcctggaatacattttgtagagttctttcagcatcagaatcaggaattcagttattaaatagaatgaagaatgattttaaattttctaatgcgattgctgagtctcttacctatgcgtcatctcttgatagtttggaaagaagaatttcaatgtatcaagaaaaagagagtttagaaatctctggagatgaacttgctttaatagaatcgctgccttataacacaaaaatatttaagggatatggatccagatctattcaagcgttggagatgatacatgatcaatttttagatggagaagcttttactcttgatgaggctgaaaagcaatctggactccaaggtttcaggttaagagaaaaaggaattagacagcctcttctgttgccatattctgattatgatgtgcaatgtacaaaccctgttgttttaagagttcttgcccaagcaagaagaatgattaattctgctatcaaacaatatggaatgcctaacataatccgtattgaattgggcaacgatattgctaagtcggcaaaagaaaaaagtaaaattgcaaaaggacaaaatgaaaatagaaaagagaatgagcgtataaaagataaaattgccgaacttcttcatattgatcagtcagaggtaactggcaagcagattaccaagatgaagctttatgaagaacagggcggcaaagatatatataccggagaaggtcttggtgatatcgcattcgcaggaggaagacgctttttaatagacgataactattgcgagatagatcatgtgcttccatactcaagaagcgctgatgatctgaagtcgaataaagttcttgttctggcaaaatctaatcaagaaaaaggaaatagaaccccatacgaatggatgaactccaatgacggcagtcatccaaattgggaacaattctgcttgcgagttttgtctaacattagattatccgatggtaaaaaatcaaagttattggaagagaattttgctgaaaaagaggtttcctttattaaacgtaatatggtggatactcaatatatggccagagcaattgctgcttggctttctgattcattgaatttttcaacagagtttgatcaaaagcagcatgtctatgccgtaaacggaagaatgactgcaaaattgaggagaaaatggggcctcaattttggtgaggatgatacaaaagatcgtagcgataacagacatcatgcagttgatgctgcggtaattgcagcctgtagcgcatcaatggttaaggaatttgcaatttcttgctctagcttgagagaggtaagggattcagttattgctgaaccatggaaaggctttgctgatcaggtgcgtgaagcaagggaatgggtaattcctacaatgtatcgccctaataaaaagaatggcttaatttatgaagagactaaatataaatatttaggtaaagaggtgagcgataaaaaaatcgttcatattttaaaagggaaaaaacaaggaattggaactgttgatctatttagagatccaacagggggacagtttgcaagaattttgggagatcgtgcatacattagactatggcttgatgaggagggaaaatctggaagaggtgaatggctgatagagccagtatattttgctgatctagataaaataaaaagagggtcttatgtgtccagatatatacctcgacaaaaagttacaacacaggaatgggaaccaattccatcacgtataacagagaattcaatgcctgttgtccttagaaatgatgacatagtgaggatagatggtatttatggaaggctaagcggtttggatattaatagcaagagattaatatttgatagaattttgtcaaaggacgtaaagacaataggaagctggactaaggacacctccgttgaagttattcatgaagattgtttaggtttaatgtggtttaacttattaaagaatcaaaactctagtgagagttgagctggattataagataacccttctcttttcgtggagttgattagaatcttccttcctgtgtattgtttctcagtaagttcgagaacagttacacatcctttgggaggaagatttttatttactcttgagagatggctatttgtgttttcagtacctaaagttattctgctatagacgctaaactgctccattatccagccagagctaaccaggaacttatgaaactcatggtatgcctttttatcagattgggttttggttggtaagtcaaacataattagtaatctcatgactctcatttttctccttattcaaaagtaatcaattcaatgggtaaaagagaaggacatgaaagaacggaagaatctccttccttcatacttctaattaaggattcaattaactcgtctattgactgtcttacggaaatttttcttccgttatgatgaacacaaagctctaaaaccttagataaagatattttaatttcatgggacaattctgcatttaatttatacgacgcaatataaaaatctacgactggcctaaatggctcgataagatcgtccgctaaattgaatgcattttcaatactattgtggtgaataccttttgaaggcattaatccatgggcaatcaatgattgaatgattgcagatctaataatcgaatagccatagtctaaagaaggggtccagttgctatctcgtcgtgatccatccgtaattaaaattttgaagtaagcctgagccgctacagcttctcggttagtcgcatcatcggattgtatcttatcaattagttttcgaaccgaatgaaatggaaggtttaaatattctaaacagagtgactggttataaattttggcagaaacaatcgatttccattgttgcttttgtaaaggcttcttcacattaaattgaagactgattaactcgttttgccggcaattacctacgaggggaagaataatcgcctctggaatatgattagttccacaacataaaatacttgctttatttttgctaatttctgttataagtctttctgtaatggcaactgcaggatgatcaatggtaatcatccctatatcttctatagggacagtaataattccttcttcatgtctatcaatttgaagttgagagtgcttacaggataaatatgccgctgaccgaattgctattgagtattgcacgattcacctcttaataagaagctttctgatacaatatgcatatgttttgattcatactttctgggagatcgtacggatctagacaaggccaagcatttttatgcttgagccgcaaacgaagcccggggcaacccgggctagtttttataaattatatcaactatcgtgaattttttggagaaatttgtatagttttcaaaatactaagcccctgaattccctgttaaacaaggaaaacaagggcttggtattttactacctgggagatcgtacggtaatcaagacatctatgcgctggttggctgcaagcaaaacattttactacctgggagatcgtacggtaatcaagactatgtagcgttttcgctatacgtacaacaaattttactacctgggagatcgtacggtaatcaagactggtagggggtagtaaaaattggtagacccattttactacctgggagatcgtacggtaatcaagacggtcaatctaagagacacgtttatttaaggattttactacctgggagatcgtacggtaatcaagacaatgactggttaacctacctacagaatgaaattttactacctgggagatcgtacggtaatcaagactgcgaatcgttttgctgcagcacacgtctcattttactacctgggagatcgtacggtaatcaagacctctcggttgttgccatgttattgccgagtattttactacctgggagatcgtacggtaatcaagacaggtataagggcagagcccttgacttttggattttactacctgggagatcgtacggtaatcaagacaataactggctaaactacctacagaatgaaattttactacctgggagatcgtacggtaatcaagacagtgactggctaaattacctacagaatgaaattttactacctgggagatcgtacggtaatcaagaccctgtaatgcgtgtttatggaacgggagcagattttactacctgggagatcgtacggtaatcaagacaccaacgaggcaggcaattcctttgctgacttttctacctgggagatcgtacggtaatcaagacatacctcaacgacaatatgcctgattttggattttactacctgggagatcgtacggtaatcaagacgagaatggaggtttttagaacgtagtttttattttactacctgggagatcgtacggtaatcaagacccaagtcgcgctatagcttgtgggtattgaattttactacctgggagatcgtacggtaatcaagatagtgacgtgactattaacgtccagggagcaattttactacctgggagatcgtacggtaatcaagacatgcttagttcgtggtctaacggttctacaattttactacctgggagatcgtacggtaatcaagaccaactggtattgacggtcttccaacgtcacattttactacctgggagatcgtacggtaatcaagactccgcactcctcagtgatacggtcgatggcattttactacctgggagatcgtacggtaatcaagactctcgtgctttagctggttgaacttctcaaattttactacctgggagatcgtacggtaatcaagacacttgggcgcgtcttaaacttcgcaagggtattttactacctgggagatcgtacggtaatcaagacctcacagaggctcagagcaccattgatgcaattttactacctgggagatcgtacggtaatcaagaccatcatgaagatgtatcagactgatggctaattttactacctgggagatcgtacggtaatcaagacagcggtgcagatctgcaggcagcaacacagattttactacctgggagatcgtacggtaatcaagacattgatacttccactatggttaagaacgataattttactacctgggagatcgtacggtaatcaagacagccttggagtaattgcagatgtcactaatattttactacctgggagatcgtacggtaatcaagacatcatctaatggaatccaagttcgatcagtattttactacctgggagatcgtgcggtaatcaagacagctggcgattgttattcatgaccctgagaattttactacctgggagatcgtacggtaatcaagaccatcaagctaacaattactgcagatccataattttactacctgggagatcgtacggtaatcaagactataaccctttattgcgtcttcagcttcctattttactacctgggagatcgtacggtaatcaagacgataacggcggcggtagtcagtggacagcaattttactacatgggagatcgtacggtaatcaagacctgtaggctctcacggtatgcctgagcaatattttactacctgggagatcgtacggtaatcaagaccctgtgctgcgttcgctgccacatttgccaattttactacttgggagatcgtacggtaatcaagaccagcctcgttcacggattgcgtaattgacgattttactacctgggagatcgtacggtaatcaagacgatgataaattcatcttccccgtttttgttattttactacctgggagatcgtatggtaatcaagatatagtcgcagtgaattttattaaaaactagggttattataaaattaaatatatgattaatagcgtgtgttgttacatcagcttatatttagaaaagtatataagaaaggcatccattatggctactagtgaagcacagaaaagggccagcgctaaatatcgaaagaataacgtaaaggcaattatgtttaatctatatccaagcgatagcgatttaatagagttcttggaaggtaaagagaaccgttcaagctacatcaaagagcttattcgcaaggatatgaataattcagaaaattagtttgttagcgcttatgtttagcgttctcaaatgcaatcttgaagtcttcgaggagttctcgtgggaccttctcctggtctccatgatggagctcttgcataaacacattgcttatggctccaaaaatcaggcgaggagcaatcttatctgcaagaggaacaaactctaggacatatcttttatcatcaatggtaagccaggtgactctccagctactgacggttccctcaatatctgaagcatgagccgaagcaaagacattttgattgttatcaaagaggtacacgacaccatctgcgtcaacgccaacaaaaccgtttgtagcgcattgctcaaaaccagaaacaatatgcgcaccactggtccagaacacccagttcttctcgccagccatagacagacctttctaaaacatcaaaagtttcttgtttaaatggtagagggaggatgattttagggcaagtaaatttcggtcaaaaagcatagtttacctgcgaactcaacctgctgttgagtggtcggaaaccgttgcgatacccaactcaactgatgcgttcttgttgaacgtattattacgactcatagtgaaatcagcggcccgcaagctatttcagtaataataagttgagaaaaggagcaactatgactacttcatctgagacccttggtcgtcgtattgcacgtcttcgtttggctagaactgcaacgcaggagcgcctggcaaaagagctgaacgtgagcccgcaggcggtgagcaagtgggagaacgacattaactacccggatatctcgctgttgccagatcttgcacgcttccttggtgtgtctgttgacgagcttttgagtggcgcaagcgcttccgctcaggagagctctgctgcccaggagagcgctgctgcccaggagagcgctgctgctagggagcgtgctactgaggttgtttctgttgcgtctgacgagcccgcagagatcgtagaagagcctacagagcaggtcaaccagggtattgctactcagtcttcaggtttcagctttggtaagctttttggcaagagtatggtaaaagtcgagaagaacgacgaggctgacggtagcaagaagaagggcgtccgccttggaaacggctctgcaaaacacggcctgcacttgtatgtagtctctgacgacggcgacgttgttgatatgtgtgtgcctctgggcctggcaaagtttgttttgaattcgggaattcaggtcagcggaaactaccttaatcaggaaactcaggagcagctctctaacatcaatcttgatgcacttatggatgccgcaaagactggcgagagtggcacacttgtggatattacatctgcagacggtgacgtcgtgaagatctggtttgactaagcgctaacgattacatagactgactaaaaacgagatacgcccgggcagttgcttgtcgggaatcggtctcgttttttgttggcatggatttatttaagtttactatctcatggtatttctcatttgatgtaaaatagtgctaccaaattgcgtactggatagtgcgggctcaagagagccaattatcttttttggcatcttcatattgcatggagatgccattttttaaaggaggatgggatggagcaaattgctctattgttcgaatcttctgtagaaaaccccaatattgttaatcctgtttggtataacgaatggtcggcagccaaagagttaccacagtttgatgttcatctttttaattacgaggcataccttaatggagaagaactaatttgtgataaagctctaagacatgacatgccaacgtttcttcgctgtcatccaacctctaaagaaaattacaaacgcctagagcatgatcttttgtctttagggtataggcttttgactgattcttggcgcgtactcggtcctgaggaaaggggattaggaggatattcttttgcaggtgattacgaaattgagaatattaatgtcggtgcatgttttggttcaagtggtcatggctcctatcctcccactgtctatgttataagagacgctgatggtcctcttagtgatttgaatgaaagcctagctataggatatttttctggagatgagggcaaagaacttgctaaaaaatttgagaaagcaaaaggcacttactttactggtggggctttctttgaggaatatgtaacaaaagctacatgtaatgagattcctgtgatttggagagtttttttattttgaaggcaaggcattttttaaaagtccattagaacctgatgccttaacaatttgtcccaatttacccaaaccacctaaaaagcttattggagcatttcaggatgttatctggaacttgttttatgcttgcgatttcatcttgttaaaagagggcatttggaaatgtaatagattttttgacggacagatgtctcaggttgcgactggtgtagatgtcgagaaattctatacaacacttgctagatgtattaaaaaggcacctcaaattccagaatgggtatggtgccttacggcagaagtcagagatgaaaataagattggggaagataaacgtatagttcatggaacgcgtcatttttctccgggtacaaaagtttttcttcatccaccaaattgggacgaacgtgtcgctgcaataggcatccctcgttatacagataaatatatacgcgttgttatggatgtcagaaaacttgaaaattttgcattagagaaagtaagtgatccggaaatagtaactgcacttcaaaatcctggtaacatctggatgtttacccacatggcgccaacttcagttggacgcggctattgggatcaaagcgaggaatcaagacaacagattcaggatgaaataaattggttgtctaatctagatccagacggaaagcgctggtcataacttattttattgacatcacattaaagggatgtagaattacattaacaacgtgtagcacaattagcagtgcccttgttggagatgacccaggtgcaaatcctggccgttgttattagccgctttagagcggctttttgtttagtgtagattttgacgtaatgctgcaacagcacgttcttctcgaccggtagtggagattcttacatgaagcctttgattgtgtactattcatattccggcatcacaagaaggcttgcagaggatattgcgctgattaccgatggtgagttgttggagcttaagcctcaagatccctattctttctcgtataacacggcagtaaaagaggttagagcgcaaatagaaaagggcgtttgtcttgcgcttatgccaagtgatgtacatgtcagtgactttgatactgtctttataggatcacccaactggcttagagcatttgctcctccggtgctttcgttcttacgggcaacggatttgagcggcaaaacaatcattccgttttgcacgcatggcggtggaggatttggaaacatgattgaggagtaccagagagagtgcggtgcttctcttgtaatgcctggactggcggtaaagggcacgtatacttttagtgaagcgcaaaagtggctggattcgatagggttggacaatgcgagtacttctagctgaagatgagaagagaatggccgcagctattgtggctttataaagtaaatggcgtgccctctctctctgcagagcgaggatgcgcgccggtgttatatgtaatataacacagttttcttgaataaaagtgccttacacagacgtctttctcgacaaggcgtcttttttatttatgcaggtagatgagtgtattacaaaatatgcgaaaatcgcatatttatggattgacgtgcagttttataaatattccaaaatcgcatactttaggctttatctggggttattcagtttccgtatcatcatgtgcaagcaaggagttgaacagctcgtcgatatcggagtgtcgctgagcggtttcttcctcggctagcatccacgtgccatcttggtagtaaagtacatcgccctggcaagcattgcttggtagctcgttgatagaaacggtcagcatatcgcctggctggtcatctaattcaagcacggcaagattgttgtcttcaaatcgatcaatgattgctttcattacttggacctcgatgtcgacgacgtgccagatttttcttgtgaggtaggcgctacaacggtaccgtttttctcgctagatatatcaatggttgtaccatcgcaggtaatggtaatggttccgttggcgcctgttccccaaacctcaacggaatgtttatggagggcgtttaggaccgactgcatggggtggccgtaggagttgtctagggcgtacgagacgatggcgtaggtaggcgagagtctgcgaaccagctgctcgtttgtgcccgttcgggagccgtggtgcgagagtttaagcacgtcaatgtggcccgggttagtctgcaggatggcgcttgtaggagcatcgcccgtgaagaggaacgttttggtgcccacggttagcttgatgattatcgagtaatcgttggtgtcggggaaatttgcgtctttggtgggccaaaggatttctaacttgtaagcatcggtttgatcgatgatggttcctgcttcagcaagggttatctgcaggttattatcctggatggcggtcagaaacttcctgtatgttgcggtgttgtttgtcttatttggcgcgtaaatggtcccgatttgggtgctggaaatgacgtctgccataccgccgatgtgatcttcgtcaggatgggtagctaccaggtaatcaattttctcgcgaccaagttcgtggagcacctgcgcgatttttggagccgagcctgtggggccggcatcgatgagcatggttttctcaggaagggcaatgaggatagcttctccctggccaacgtcgataaacttgatagttacgtttgtgctggtctgtgcggtggtagacggcgcaccggggtctgattgggaggacccgtcaggcgcttgaactgcggtttgttggcccgaggatcccgcggtagataaagtggttggaagcggctgcgtgagcgctgcgctaaagtagagcactaccgtcaacgtggcgagtacgattccagctttctgttttcccgcgtatcgtttatgtggtttgagcttgccttttatgagctttttgggagcactaacatcctcgtagatgaggttcagagcgctctcgataaccggaagtgaaaaaattgctggtaaaagataagagagcatcgatggtaaagcaagtatttgagccagagtaaatgcgccaacaatcagtgctgtgttcacggcaagtcgggtaagtcccgatttccagcctttaagataaaactgcggaatgccaaaaatgccaaagattagggaaagaataagcgcaaaaaagtagtcagattgcttaccggaggctgcatgggacgattcagttttgctgtcaaattgctttggtttgggcataaaacctctctggacacgtgcgttctgaagaatcttaccctatttgagcagccagtccagagctttttgtattcttccctcaacgttttggaagtggtttccgcggttgagttcaaacgttgaggtgattcccgcgctttccagcttattggcgagaagttctgcgttttctcgcacgtgcattatttgcggattgggggttcgtgcttctcggtcacccagagaaagataggcgtgtgtgaggccgaccgctcctccgttgagctgctgatctacgtagtccaaaagccctgagaaccaaaacgatccagagacagctccgatgcgctgaaaggttggggtgggggtgtcgtcgggctggcagccgcgtgcgacctgctgcggtgtgccggactgcgacacgccggcccagaggc

SEQ ID NO: 3400 - DNA, 15855 bp, synthetic construct
  source 1..15855: mol_type = other DNA
  misc_feature 1..15855: note = Synthetic
ataatgacgatctctatgtcaggtatgttggtattgctaaatccccagatggttactctgaaggctacgtctttgaggttatcaacaggtctgaaaactgggtgaattgcacctttaagttagataattctgagaattccgtatgggctaacgattctaactatcttgaaagtggcgagagggtctttgcatttgttattaatagtgcaaatcagaaaaagcctcttgctgatcagactgaggtaaatgcagttgttgagtattaccacatcaaaggtggtaagagtatggaagacaataagacagaaaacgtcgacctgataatctctcagaagaagtaagtgtgccgttgatatgagcctactctatctactatcagcaccattagacgcaagcattgcatggtttctaagcgcacatacacaaacaacacaactaaggagaatcaatatgcacatagatatgctcatattgttcctcaaatttacagtaatgaccctattcatacttatgattggctactcattactgctaattgaatacgctttaacaatactaaacatgggttgatttgcgtaacaaacgccgatggatgtacaagtagcggtatgccccgcattacaaaagaaagcgtgaccaaacatgaagaaggctttgatttcgattgactacacctacgattttgtagcagatgatggaaagcttacagcaggtaagccggctcaggctatttcagatgctatttatgaggctacaaagtgtgcttttgatcgtggcgattatattttctttgctattgatgctcacgatccagaggataacttccatccagagactaagcttttcccacctcacaacattattggaacaagtggtagagacctgtttggtcctctgaatgatttctatcagcagcataaagacgatagccatgtgttctggatggacaagcgtcattactcgtccttctcgggaactgatcttgatattcgtctgagggagcgcggcattaacacggttatcctgactggtgttcttaccgacatctgtgtactgcacacagcggttgatgcttacaacctgggttatcacattgaggttgtcgagccagcagttgcatcgctgacgccagagaatcaccagtttgcgcttgcgcacttcaaaaatacccttggagcaacgctggttgatgcagagctcaacgagattgagaacgcgtaatgactccagaagaacgagccgttatacgcaaataagtacctacgtaaattagttaaagcgttgataagacccaaggtcaaaaacttgggtcttttttgttaccttaggctaacttatctgataagatacgggtgttcaatgggcaaaactgttgtggctcaattggagagttcatataaacagtcagattgggggaagctctatgtacgttaagcatgtgccaagtaggctccgtgctcagtttgctgttgtgatggcgattgcagcttgtttgtttttctcgccatttacaacaaaggcttacgcagatggaacatttgagattactgactggctctcgggctatggttctagtagtttgcaatacatctacagcaacaacaagactgcaatggacgctgtatccacatggtctttctctggttcaagggtgactattggtgccagtagcggttcttctattcaggacttcactgttcctactactgtaaccaatattactagtacctaccagagcacgtacctgggcaatggtactcgtgttcaggtttacgctggtctgagccctaggggttctcgcattattttcccagcaggctttaacggaaccatttcaaatatgaagtttgagggcgatgttattgttgaggctggtgcaaacgtaacttttgacaatgttacgttctacaacggccttgataacaggggaacttcaaccgttaagaactccacggttgttcagattgaccttaccaccaccaatggcggtgatttgactatcgagaataccaggttccagaattccaacaataccgctggcgtagtgcttccttctaacaagatcactcctgcaaaggtcggcgaggcctacaacgagccaatcaccattccttgggcagcgtctactatgggttacgacacctttaccgtagacaacctgcctgccgatcttacgcttagtccaatggagaatgatgcaaccgctcgtagaagcactgcaactatttctggtactccaactgctgcaagcaatggttatacacgtattaccattaagaacggcagtctgtacgacttcaccattcctatgaagatgagcgttcagaagggtactgttgccgttccaaccgcaactaactacacctataacggtcataatcagcgtggttttgatgccaccgctaacccacaggtagttgttagtggccaggtttcagcaacttatcctggtacgtatgaagttgagcttgatcttgcagaccctatgaactacacctgggaagatggcaccactgccactaaggatgcaacttggacaatcaataaggctcagcttgttgtgacctatgctggcgagactgttcagaagggcgttgctcctcagcttgctcttactgttaccggttttgtaaacggtgagactgctgatactgctcgcagctacaccgctcctaccctcagcgcaactgacctgagcgttggtgcgcacgagctgactcctgcaggtggttcagctgacgactacgagttcgtctacgtttctggaactcttaccgtgaccgatactgcaagcgacccatctaacagcagcactaacaacagcaccaataacagcaccaacaacggcaccaacagctctcagaagaagcacaagtcgcacaagaagggagtactgccagatacctctgacgcttccgttgttctgtcttctgtcagtatgattgctgctgcaggcgcaatagcttctggtattcgtcttcgtaagcgtgcatagcgggaattgagccttagagctctctgcaattgcttgaactaacaacagcctttcctgaaaagggaaggctgttttggtttgatttaagtttatattgaataaaagaattaccgtttatggaatagtggaataaatctatcttttaggattttaagcagatataaaattacatcaactcgtttaattttaatcaaggagctgccatgtcaaaatctgatcgtggacttgtttttggagttgatttaggaaaagcctcatgtggattagctattattgattatgaagctaaagaagtaaaattgctttcaagccgaattatcaaagctcccgaaaacagaagcggaaaatctctagccgcagtaaggcgagaaaagcgttcaattagacggcaaatcgacagaagagcagcaagaaaaaagaatgttttaaaagtattaaaacaatttggagttactccacaggattctgattgtacgtggtttgaaactaagaaaaacggtaatgacggaatagatttaccagttattgcattaagaagtcaaggtcttgatcgacagctctctgatagggaatgggctcgtattctctattggttctgtagtcagcgtggctatattaatcgaggagaagagactttaattaatggagaaacttctattgaaggtactcctgaatctgaagaggcaggaaaagttctttctgctatctcagaaaacagaaaaacgctaaagaaatcaggctatagaacttttggtgagtacttgtataaagagagctatgttacaacccatagctatagaaacaaagctggtgattataaacattgcgtgtctcatccaatggttgttgatgagattaacgagttatttaagcaacagcaaaagcttggaaatacatatacttcagaagaatttagagatgcttatttagaacagctcaatttgcttaaggatactaaagcttttgataaattgacttatcaaaaggtgggctactgtgtttactttgatcaatatagtgatgagccccaaaaaagggcggcaaatgctgatttaatttctgaagttgtaaaagcttatgaaaagcttggaaatatacgtttgaaatttgaggataaacctgagcaatctctaacaagagaagttagagatgcagttattaatgagatgtttagtgttcatcaaggcgctaaggttaaatcggttacgtataaaactttacgtaagctgatagatgatgacaatttggttggttttaaaggagttaaatcagatttagagaagaatccggtattcgtacctaaggcctggaatatattttgtagagttctttcaggctcagaatcaggaattcagctgctaaatagaatgaggagtgactttaaatttgctaatgcgatttctgagtctcttacttacgcatcatctcttgatagtttggaaagaagaatttcaatgtatcaagaaaaagagaacttagtaatctctgaagatgaacttgccttaatagaatcgttgccttacaacacaaaaatatttaagggatatggatccagatctgttcaagcgctagagatgttacatgatcaattttcagacggagaagcttttactcttgatgaagctgaaaaacagtctgggcttcaaggcttcagactaagagaaaagggaattagacagtctctcctgccgccatattctgattatgatgtgcaatgtacaaaccctgttgttttaagagtccttgcccaagcaaggagaatgattaattctgctatcaaacaatatggaatgccaaatataatccgtattgaattgggcaatgatattgctaaatcggcaaaagaaaaaagcaaaattgcaaaaggacaaaatgaaaatagaaaagagaatgagcgtataaaagaaaaaattgccgaaattcttcgtattgatcagtcggaggtaactggtaagcagattaccaagatgaaactctatgaagaacagggaggcaaagatatatataccggagaaggtcttggtgatattgcattcgcgggaggaagacgctttttaatagacgagaagtattgcgagatagatcatgtacttccatactcaagaagtgctgatgacctaaagtcaaataaagttcttgttcttgcaaattctaatcaagaaaaaggaaatagaaccccatacgaatggatgaactccaatgacggcagtcatccaaattgggaacaattctgtttgcgagtttcgtctaacgttagattatccgatggtaaaaaatcaaagttattggaagaaaattttgctgaaaaagaggtttcctttattaaacgtaatatggtggatactcaatatatggccagagcaatttctgcttggctttcagattcactgaatttttcaacagagtttgatcaaaaacagcatgtctatgctgtaaacggaagaatgactgcaaaattgaggagaaaatggggcctcaattttggcgaggatgatacaaaagatcgtagcgacaacagacatcatgcaattgatgctgcggtaattgcagtatgcagtgcatcaatggttaaggaatttgcaatttcttgttctagattgagagatgtaagggattcagttattgctgaaccatgggaaggctttgctgatcaggtgcgtgaagcaagggaatggataattcctacaatgtatcgccctaataagaagaatggcttattgtttgaagaaagtcgctatcgatatgttgggaagaaaaagaaacatattttgactagcagggatggaaaagaaaaatcatcaggaaatatccgtttctttgagaatgaaaaagatggcaaacatgtaaaaattgttggaaatattgcttacatcagactgtggcttgatgaaagtgctcgcaaaggtaaaggagagtggttaatcgagccactatactttgctgatttgcaatcaataaaagatgggagctatgtgccaagatatattagtgcttctcatgtgactagtgatgaatggaaatcaatccctaaagatgttttgtcaaaaattcctccagtagtagttcacattcaagatgtcattcaagtagactcttcgtattttagagttgatggtgtggatattgattctaaagcgttaaacctaataccagtttttagggattcaaataatagcaatcccgcattggcaaaaatgagcaaatggaacaagggcacagaggtgacacgaatctctgaagatgcattaggtttagtgtggttcaattttttaaagaatcaaaattctagtgagagttgagctggattgtaagataacccacctcttttcgatgaattgattagaatcttcctccctgtatattgcttctcggtaagttcgagaacagttacgcatcctttgggaggaagatttttatttactcttgaaaggtggctatttgtattttcagtacctaaagttatcctactatagatactaaactgctccattatccagccagagttaaccaggaacttatgaaattcatggtaggcctttttatcagactgggttttggtcggtagatcaaacataattagtaatctcatgactctcatttttctccttattcaaaagtgattaattcaataggtgaaagagaaggacatgaaagtatggaagaatcttcttccttcatgcttttaattaaggattcaatcaactcgtctattgactgtcttacggaaattttccttccattttgaagaacacaaagttctaaaactttagataaagatactttgatctcatgcgataatcttgcattcaatttatatgatgcaatataaaaatctacaactggtctaaatggctcgataagatcgtctgctaaattgaatgcgttttcaatactattgtggtgaataccctttgaaggcattaagccatgagctatcaatgattgaatgattgcagatctaataatcgaataaccataatctagagaaggagtccaatcactatctcgtcgtgatccatctgtaattaaaattttgaaataggcttgagctgctacagcttctcggttagttgcatcatcggactgtaccttatcaattagtttgcgaaccgaataaaatggtagattcaaatattctaaacagagtgactggttataaattttggcagaaacaattgatttccattgttgcttttgtaaaggctttttcacattaaattgaaggctaatcaactcgttctgtcggcaattacctacgaaaggaagaataatcgcctctggaatatgattggttccacaacataaaatgcttgctttatttttactaatttctgttatgagtctttcggtaatgacaactgcaggatgatcaatagtaatcatccctatatcctctatagggatagagacaattccttcttcatgtttgtcaatttgaagttgagaatgcttacaggacaaatatgccgctgaccgaattgctattgagtattgcacgattcacctcttaataagaagctttctgatacaatatgcatatgttttgattcatactttctgggagatcgtacggatctagacaaggccaagtatttttatgcttgagccgcaaacgaagcccggggtaacccgggctagtttttataaattatatcaactatcgtgaattttttggagaagtttgtatagttttcaaaatatcaagcccctgaattccctgttaaacaaggaaaacaagagcttggtattttactacctgggagatcgtacggtaatcaagacatatgggatagcgatactaaagagtggttaattttactacctgggagatcgtacggtaatcaagactgtaccctgtctttggatatcctcgaacctattttactacctgggagatcgtacggtaatcaagacttacaagctgttccaatagggaacttcttaattttactacctgggagatcgtacggtaatcaagactctgtcatcgaggatatctgcgactcctgcattttactacctgggagatcgtacggtaatcaagacatcgaggtgagaaaggcagttcacagcgtaattttactacctgggagatcgtacggtaatcaagacggtactgagtctaaagagaccgctggcaacattttactacctgggagatcgtacggtaatcaagactctaggctgtcatttaggcggttaaacgccattttactacctgggagatcgtacggtaatcaagacctagatgatgaatgacgtttcacccgcccaattttactacctgggagatcgtacggtaatcaagactcttcccactgacccgtttgcgagttcttaattttactacctgggagatcgtacggtaatcaagacccagacggcggtaaaacatacgctaattgtattttactacctgggagatcgtacggtaatcaagacacagatgtagatatccgtaagatgttagccattttactacctgggagatcgtacggtaatcaagacagcttaattactcataccgctatatataaaattttactacctgggagatcgtacggtaatcaagactatagacctcttacttgctcaccctcaacgattttactacctgggagatcgtacggtaatcaagaccaaaacgccaacgtgcttaaagtgtggttcattttactacctgggagatcgtacggtaatcaagacctatctagtggattgatggcgctatcaggaattttactacctgggagatcgtacggtaatcaagactggaaaggtagtcattgagattctaggtgaattttactacctgggagattgtacggtaatcaagacttcacgggcattcgcatagataccacaagtattttactacctgggagatcgtacggtaatcaagacgactgcaacctgtcagacatatagttaatgattttactacctaggagatcgtacggtaatcaagaccaaaagactacgtgggatagataacaggcgattttactacctgggagatcgtacggtaatcaagacttgttgctagttgtcaacaactccaccaaaattttactacctgggagatcgtacggtaatcaagacaacataatctggtccatggtgttgacaaacattttactacctgggagatcgtacggtaatcaagatacaaacgcgatgcttgcaattccagttcgattttactacttgtaatatcgtacgataatcaaagtggattaccatgagcgctcgaattttttataagaataatttgattagaaaaatcagtttcgttttgaggtgctaattttatttcagctgaaagaaacctaaagaaacacaaagaaatgtcatcttatgattattgcgagtttaaaattgaagctgatacaagttttaataacgttgttgagattcaagattactatagacacaatacattattttaataagaaaggcatccattatggctactagtgaagcacagaaaagggccagcgctaaatatcggaagaataacgtaaaggccattatgttcaatctgtatccaagtgacagcgatttaatagagttcttggaaggtaaagagaaccgttcaagctatatcaaagagctaattcgcaaggatatgaataaattaaaaaattagcttgctttagtgcctatacttggcgttctcaaatgcaatcttgaagtcttcaaggagctcacgagggactttctcctgatctccgtgatggagctcctgcataaagacattgcttatggctccaaaaatcagacgaggagcaatcttatctgccagaggcacaaattctagaacatatcttttatcgtcaatggtaagccaggtgcctctccagctactgaccgttccctcaatatctgaagcgtgggctgaggcaaaaacattttgattgttattaaagaggtacacgacgccatctgcatcgacaccaacaaaaccgtctgtagcgcattgctcaaaaccagaaacaatatgcgcaccactggtccagaacacccagttcttctcgccagccatagacagaccttcctaaaacatcaaaagttacttgtttaaatggtagtgggagagcgttttttgggcaagtcattttcggtcaaaaagtatagtttacctgctaactcaacctactgttgagtagttagaaaccgttacgatacccaactcaactgatgcgttcttgttgaacgtattgttacgactcatagtgaaatcagcggcccgtaagctatttcagtaataatgagttgagaaaaaggagcaactatgactacttcatctgagacccttggtcgtcgtatcgcacgtcttcgtttggctagaactgcaacgcaggagcgtctggcaaaagagctgaacgtgagcccgcaggcggtgagcaagtgggagaacgacattaactatccggacatctcgctgttgccagatcttgcgcgcttccttggcgtatccgttgacgagcttttgagcggcgcaagtgcttccgctcaggagagtgttgctgcccaagagattactgtcgagaagagcgctgctgaggttgtttctgttgcagcagacgagcccgcagagatcgtagaagagcctacagagcaggacaaccagggtattgctactcagtcttcaggtttcagctttggtaagctttttggtaagagcatgatcaaagtcgagaagaacgacgaggctgacggtagcaagaagaagggtgtccgccttggcaacggttctgcaaagcacggtttgcacgtgtatgtagtctccgacgacggcgacgttgtagatatgtgcgtacctctgggcctggcaaagtttgttttgaactcgggaattcaggtcagcggaagctatcttaatcaggagactcaggagcagctctctaacatcaatcttgatgcacttatggatgctgcaaagacaggcgagagcggcacacttgtggatatcacttctgcagatggtgacgttgtaaagatctggtttgactaagcactaacgattacataggctgactaaaaaacgagatacgcccgggcagttgcttggaaggaaacggtctcgttttttgttgcaaatagtcacatacggttattgcgctaataatttgaagctgatgatgtaataaaagtattgaattttataaaagtctaattctataaaaagtatgtatttagttattttttgatatttttgtacaaattatggagtaaaaaagtattctcactattaaaacaaagcttaaaggaacctcataaaaaggagcgattatgagagtacgaatgattgacaatgttactggtaaggttgttagagttgcaaagcagttctccaaagcggtcgtaaatgctccaaaggcagcggtgaccgtggcaaagactggcactattgcgcagaaggttgccatgggaattgcaacaactggtcttgttgctggcggtgcaactggtattgtcctcaatattcctaaacaggcgcctgctcctgaacagaagcctgctattacacaatcaacaaagaccgaggagacaaaacctgaggatactaagtctgcagaagagacaaaaaccgaggatgctaagcctgcagaggagacaaaaaccaaggaagctaagcctactgaggagacaaaaaccgaggacactaagtcctctgcacctgcaggacattacgagtccgttcagaagagtaagtatgttgaggatggtacttatactgtagttaccatgactgatgatgatggtgatcctattacctttactacatcttttggtacttctacagacgcacagtttagtactcaagcagaggccgaggcataccttaactcacaacatcaagcacttacacagcgtactggtcgtaaaagtgtcctccctggtaacactggccgtggttttaatgtcggtgaaactcagactaagggccatacagagtattggactgaacaggtttgggtttctggcaactaattaaataaaacttaatgcaactgaaaatacggggattgcttaaacaatctccgtattgtgttatatgtggtaaaacaaattagtaataaaacgtattgtttggcgcagtggcattctggctaaaaataggcataatagttaataaagatacccacccgattctacttgatgtggatttgcgtgggtatctttaggttttagcgtagtgacactttgattggtgatgttcgataaagattggctttctcatttagattcagacggaaagcgctggtcataatcaattttgttgacattatattgcagggatgtagaatttcaatgacggaaagtagcacagtacggggagtgcccttgatggaggagacgtaggttcaaatcctaccgccgttattagccgccttagagcggctttttgtttagcatggattttgatgtgtggttgtacgctagcaaaaaagcaccccggtcatcccacaaattgtgatagcgagggtgcttttgtgtcactgtagcatatacttgctgtgagaagccattcggacgcgcaatcctatcaattatacttgtggcaaataattcgacgtaatgtctcaacggcacgttcttctcggctggtagtggagattcttacatgaagtctttgattgtgtactattcatattccggcatcacaagaaggcttgcagaggatattgcgttgattactgatggtgagttgctggagcttaagcctcaagatccctattctttctcgtataacacggcggtaaaagaggttagggttcaaatagaaaagggcgtttgtcctgcgttaatgcaatacgatatagatgttgccggctttgatactgtttttataggatcgcccaactggcttaaaacatttgctcctccggtgctttcgttcttaagagcaacggatttgagcgataagacggtcattccgttctgcacgcatggcggtggaggatttggaaacatgattgaggagtaccagagggagtgcggtgcttctcgtgtaatgcctggactggcagtaaaaggtacgtatacttttgttgaagtgcaaaaatggcttgagtcgatagggctaaatgatgcgagtgcttctagctgaagacgagaagagaatggctgcagctattgtggctctataaagcggatggcgtgccctctctctctgcagagcgaggatgcgcgccatcggcatatgtaatatatcatatttttcttgaataaaagtgccttacacagacgtctttctcgacaaggcgtcttttttatttatgcaggtagatgagtgtattacaaaatatgcgaaaatcgcatatttatgggttgacgtgtagttttataaatattctaaaatcgcatattttgggttttatctgggactattcagtttccgtatcgtcatgcacaagcagggagctgaacagcgcatcaatatcgttttgacgctggattgtttcttcatcggctagcatccacatgccattttggtagtaaagaacgtcaccctggcaagcgttgtttggtagctcgttgatagaaacggtcagcatattgcctggctggtcatctagttcaagcacagcaagattgttgtcttcaaatcgatcaatgattgctttcattatttggacctcgatgtcgacgacgtgccagatttttcttgtgtggatggagctactacctcaccgtttttctcgccatagatatcaatggttgtaccatcgcaggtaatggtaatagttccgttggcgcccgttccccaaaccttaacagaatgcttgtggagggcgtttagaaccgactgcatggggtgaccgtaggagttgtccagggcgtatgaaatgacggcgtaagtgggcgagagctcgcggaccagctgctcgtttgtgcctgttcgtgagccgtgatgggagagcttaagtacgtcaatgtggcctggattgctttgaagaattgcgcttgtaggagcatcgcccgtgaagaggaacgtcttggtgccaacagtcagcttgatgataaccgagtaatcgttggtgtcgggaaaatttgcgtccttggtaggccagaggatctctaacttgtagtcgtcagtttggtcaatgacggtgcctgcctcagcaagagttatttgtaggttattgttctggatggcggtcagaaactttctgtacgtagccgtgttgttcgtcttgtttggcgcgtaaatggtcccaatgtgggtgctggaaatgacgtctgccatgccaccgatgtgatcttcgtcaggatgggtggctaccaggtaatcaattttgttgcgaccaagttcgtggaggacttgggtaatttttggagcagatcctgtgggaccagcatcgatgagcatggttttctcgggaagagcaataaggatagcttctccctggccaacgtcgataaacttgatggttacgtttgcgctggtctgagtggttgtggacgacgtgtcggagcctgattgggatgacgcgccggagtttgcgtgagaggaccccgcaggtgagagggtagctggaagcggttgcgtcagcgcagcactaaagtagaccatcacactcagtgcggcaagcgcgattccagctttttgttttccagcataccgtttatgaggtttgagcttgccttttataaggttttttggagcactggcatcttcatatatgagattcagagcgctctcgataatcgggtacgagaaaattgctggcagaagatacgagagcatcgatggtaaagcaagtatttgagccagagtaaatgcaccaacaatcagtgctgtattcacggcaagtcgggtaagtcccgatttccagcctttaagataaaactgtggaatgccaaaaatgccaaagattagggaaagaataagcgcaaaaaagtagtcagattgtttgccagagactgcattgggcgattcagttttgctgtcaaattgctttggtttaggcataaaacctttctggacgcgtgcgttctgaagaatcttaccctatttgagcagccagtccagagctttttgcattcttccctcaacgttttggaaatggtttccgcggttcagctcaaacgtcgaggttattcccgcgtcctctagtttgctggcgagaagttcggcgttttctcgcacgtgcattatttgcggattgggagttcgtgcttctcggtcacctagtgaaagataggcatgtgtgaagacgaccacccctccgctaagctgttggtcaacgtaatccagaagccctgggaaccagaacgatcccgagacagctccaatgcgctgaaaagttggggtgggggtgttgtctggctggcagccgcgtgcgacttgctgcggtgtgccggagcgcgacatgccggcttgggtcatgccagcttgagtcatgccagcttgagtcacgccaacccacaggctgaacaggcctgcgagcgagtaacccacaagcaccctatacgccggtggcttggtgagctccgattccgtccagggaatgacttggttgatgagggcatcaagcgtcctctgagcgtcgttgccaaagttggggcccttagcaaaaacgcgtggagcacaccagggcgaaaagttctcttcccactgctcaacaccaacgtttaccaggccgacgccttcaggtatctgaacgggggagttgtcggccacgtctcccaagaggtacacaacaggagctccagctacagaggacatctgcgcgtggacggaaagttcggagatgatcgtttttctcgccacggggttggagggccgtgtgtctggtgcggcgctcatgctactcgcccagagccatctgcaggtagtagacgttttc

SEQ ID NO: 3401 - DNA, 5478 bp, synthetic construct
  source 1..5478: mol_type = other DNA
  misc_feature 1..5478: note = Synthetic
cagtggacgcttacaacctgggttatcacattgaggttgttgagccagcagttgcgtcgctaacgccagaaaaccatcagtttgcgcttgcacatttcaaaaatacccttggagcaacattggttgacgcagatcttaatgagattgagagcgcataatgacaccagaacaacgagcagttaaatggtttgagaaggttcctgaggcagatgatctttcatttgaccagaggcttgctatatgcaaaaagaccggaattgccatggcgcttgtctttgttgttctattttcgcttgagttgatacttgcgtatgtgcttaccgacggctcatttgtattcactatgacagatattttaaacagcatactatcaagacctggtagaagagttacgacccagggagtagctgtcgcgggtattcttgtggtggcaccactattggttattcctgcagctgctatgtttcttgctcgatctattgtttttaagcaagaaattaagaagtgtctaggtagataagaacctaagaacctaagaacctaagaacctaagaacctaagaacctaagaacctaagtaaattagttaaagcatttatttgacccaaggttaaaaacttgggtctttttgttaacctaatatttatattcaatagaagaattaccgtttatggaatagttgaataaatctatctttcagaattttaagcagatataaaattgcatcaactcgtttaattttaatcaaggagctgccatgtcaaaatccgatcgtggacttgtttttggagttgatttaggaaaatctggaaatggtcttgcgggtatcgattatgaaaataaagaaataaaatttctttcaagtaggtgctttaaggctccagaggatagaactggcaagtcacttgcaaaagttagacgagaagctcggtcaattaggcgacagcttaacaggaagtcaataagaaaaaagcaaattataaaagtgctgaagcaatttggtgttattgctcatgaatgtgacagcagatggtttgaaacaaaaaagaacggaaacggtgggattgacttaccgattattatcttaagaagtcagggacttgatcgacagcttactaatagagagtgggctcgtgttctctattggttctgtagccaacgcggatatatcaatcgaggagaagaggttttaagtaacggagaagctttagttgaagattcttctgaatctgacgaagcaggaaaggttctttctgctatctcagataatagaaaggcgctaaagaaatcgggctatagaacttttggtgagtatctctataaagagagttatgctacaactcgtagctatagaaataaaaatggcgaatatagacattgtgtatcccatccaatggttgttgatgagattaacgagttatttaagcaacagcaaaagcttggaaatacatatacttccgaagaatttagagacgcttatttagaacagcttaattggcttaaagatactatagcttttgataggttgacctatcaaaaggtgggctactgtgtttactttgatcaatatagtgacgaacctcaaaaaagagcagcaaacgctgatttaatttctgaagctgttaaagcttatgaaaagcttggaaatatacgtttgaaatttgacgataagtcagaacaaaatctaactaaggaagttagagatgcggttatcaatgagatgtttagcattcatcaaggtagtagggtaaaatctgtaacatacaaaactttgcgcaaattaatagataacgaaaatttgattgaatttaaaggaatcaaatcagatttagagaagaacccagtgtttgttcctaaggcttggaatatctactgtagagtgctttctgtatctgaatctggacttcagctgctaaatagaatgaagagtgactttaaatttgctaatgcaatctcagagtctttaacttatgcgacatctcttgaaagccttgagtcaagaattttaatgtaccaggatgaagagagtctagaaatctctgaagaagagcttactttaatagaatctctaccctataattcaaaaatttttaagggatatggctcaagatctattgaagcgcttgagatgttatatgatcaatttacggagggaaatgcctttacacttgatgaggctgaaaagcaatcggggcttcaaggttttagattaagggacaaggggattaggcaaagattgcttcctccatattccgactatgatcctcagtgtactaatcctgtcgttttaagggctctttctcaggccagaaaaatgattaattcaggaattaaacaatttggaatgccgaacattattagagttgaattaggtaaggagttaacaaaatcacctaagcaaagagaaaaaattgcgaaggagcaaaacaagaataggaaagaaaatgaaaggattagagaagaaatttctatagttcttgaaattgattcttcttgtgtgacaaaaaaacagattttaaagaaaaaattatatgaagagcaaaaaggtttagacgtgtatacaggggagagtctgggaccatctctgtatgctgacgatttgacataccttaaagatgacagctattgtcaaattgaccacatattaccttattcaagaagtgcggatgattctattgcaaataaggtattggttctagccaaatctaatcaagacaaaggtaacagaacgccatgtgagtggatgacttcaggtcatggacaccatctttcatgggaagaattctctatcagagtctccactaatttgtcatttccagatagcaagaaatggagattgctagaagaagacttcgataaaaaagaagttcaatttatgaatcgaaatcttgtggatacacaatatatgagcaaagctattgttgcgtggctttctgattctttagatttcccatcacgatatggccagaaacaacacgtttatgcgacgaatggaagaatgacatcaaagttaagaaaagaatggggcttaaatttcggagagaatggtattaaagatagaaacgataaaagacatcatgctgttgatgctgtagcgattgcagcttgtagtgcatctatggttaaagagtttgcaacttcatactctagattacgtgaaacaaagaatgctactcttgctgaaccatgggaaggtttcgcagatcaagtgcgagaagcaagagaatgggtaattcccacaatgtatcgtcccaataaaaagaatggcttgttgtttgaagacaagcgctatcggtatgtggggaagaaaaagaagcatattttgattggaaaagaaggaaaagaaaaatcatcaggaaatatccgtttctttgagaatgaaaaagatggtaagcatgtaaaaattgttggaaatattgcttatatcagactgtggcttgatgaaagtgctcgcaaaggtaagggagagtggttaattgagccagtatactttgctgatttgcagtcaataaaaaatagcacttatgtaccgaagtacataagtgctgcccatgtaactagtgatgaatggaggaaaataccaaatcatttattagtttcatcaaatcctattatcattcacctacaggatgtaattaaagttgatagtgttttctttagggtcgaaggagtcaacatcgataataagtcacttgatttaaaggttttacattccgacaaacaaggcgactcaggagaagaaagaataagtaagtggcataaagaaacgcaaatctcagtatttgaagaagatgtattaggaagaaattggtttgaaaagttgaagaatcaaaactctagcgagagttgagctggattataagataacttaccccttttcgatgaattgattagaatcttcctccccgtgtattgtttctcagtaagttctagaacagttacacatcctttgggaggaagatttctatttactcttgaaagatggctatttgtattttcagtacctaaagttgtcctgctatagatactaaactgctccattatccagccagaattgaccagaaacttatgaaattcatggtaagcttttttatcagactgggttttggttggtagatcaaacataattagtaatctcatgactctcatttttctccttattcaaaagtgattaattcaattggtaaaagagaaggacatgaaaaaacgcaagaatcggcttccttcatgcttctaattaaggattcaatcgattcgtctattgattgtcttacagaaatctttcttccgttttgaaaaacacagagctctaaaactttagataaagctactttaacctcatgtgataactctgtatttaatttatatgatgcaatataaaaatctatgactggtctaaatggttcgacaagatcatctgctaaattgaatgcgttttcaacgctgttgtgatgaataccttttgaaggcattaatccatgggttatcaatgattgaatgattgcagatctaataatcgaataaccatagtctagagaaggagtccaatcactatctcgtcgtgatccatctgtaattaaaattttgaagtaggcttgagctgctacggcttcccggttagtcgcatcatcggactgtactttatcaattagtttccgaacggaatgaaatggaaggtttaaatattctagacaaagtgactggttataaattttggaagcaacaattgatttccattgttgcttttgtaatggctttttcacgttaaattgaaggccaatcaactcgttctgtcggcaattacctacgaagggaagaataatcgcctctggaatatgattggttccacaacacaaaatacttgctttgtttttgctaatttctgttattagtctttcggtaatgacgactgcaggatgatcaatagtaatcattcctatatcctctataggaatagtgacaattccttcttcatgtttgtcaatttgaagttgagagtgtttacaagacaaatatgccgctgaccgaattgctattgagtattgcacgattcacctcttaataagaagctttctgatacaatatgcatatgttttgattcatactttctgggagatcgtacggatctagacaaggccaagcattttatgcttgagccgcaaacgaagcccggggtaacccgggctagtttttctaaattatatcaactatcgtgaattttttggagaagtttgtctagttttcaaaatactaagccctcgaattccctgttaaacaagaaaaaacaagggcttggtattttactacctgggagatcgtacggtaatcaagactcaaaagagcaacataagcagcatcgcataattttactacctgggagatcgtacggtaatcaagacttcacaagcgcgctcgtcatgcacaacctcattttactacctgggagatcgtacggtaatcaagacgccttgccggactt

SEQ ID NO: 3402 - DNA, 23669 bp, synthetic construct
  misc_feature 1..23669: note = Synthetic
  source 1..23669: mol_type = other DNA
ttgtaccgttccatgcggtattcatagtattcaggcgagcctttggggggcttggtcctgactttgtcggcttgctcggcctgctcggcagacgaaggcaggcagagtgaggctgctgctataagggcagtgattatcttagagctgcacaacttcataggagtaggaattgcgtgtgacggtatagataatgtagctgcaggacttggcgtcgtcgcattgtatataggtggtgccgtcctcgccgaagggatgcatcacctcaaacacgtggtcatggccgcagacgcagaaacgcaggtcgcggtatagcaggcactgctggttaaaatagtcggccacgttgtcgttgaagagaaacatgcccggggctacatgcatggcaatgatggtggatgttatgctgtcgggcagcgatgccacatccttcttcatgaatgcgaaatcgggtatgttttttgagtagtcgtactcgtaggcattggtgttgaggctgacgatgtgcaggaacgaggcgttgaggctgaagttgtcgtcgccaaacatcttgtggtaagcggcttctccggagcccaggcagtcatggttgccgatggcggtgatgtacggcattttgagggtgttgagtattctgcgctgccacacatattccttcggcaggccgaagtctgtcatgtcgccggtatgtatgacgaagtcgatgctgtcgcggcggttgatgtccctgacgattttctcggtctcgtcgtagaatcgctgggtgtcgctgaggtgtgcgaagcgcagtgtgtccttgccggcgcactgctgctctatcagggcgcagttggtgtgggtaagccttgtcggcccgtcaatgctgacgtcgtaggggtgatattccaccatgtcgcatgcggtgagcagggctatggctatggcgtagatgatttttttcatttggtgtctgccgggggctttgggttagggtctttagggtgccttgtcggttggttggccttatagcagccgcaggccgtcgtcggtgatggtgatgatgtgctctttgtatagtgcgcctacggcccgcttgaatgtcttcttgcttactccgaaatagtcgtagatgtcctcggggtcagaattgtcgttgagggcgataaagtgattgggtttctcctgcaggctgcgcagtagcgttacggcgaagtcctctgtgtgttgtctgccgctggtctgcagcacgaggtccacccttccgtcggggcgcaccttcttcacgtaggctttgagtttgtcgccgtagctgagtggttggaagacctcgttgtggtatagcagtccctcgcagttaggccccagaatgatggctttgtatcctatctctgtctgcttgtacaccagcacctccacctcatcgtggggttgcagtgtgctgcagtcctcgctgatatgtctgcccagcttggctgtgcccacgatgcgtccgctctgctcgtcgatgtagatatatactatgtatttctctccctgctgcatcttggtgcgctgctcgctgtatggaacgaagaggtccttcatcagtccccagtcgaggaatgcgccgtacttattgcgccatgccactgtgaggcatgcaaactgtcccactttcgccagcggtttctccgtggtggctacggggcggttttcctggtcaaggtatacaaacactctcacctcgtcgccggggtgcatgtcgggggtggtatatcgcctgggcatcagtatctccagtccgtcgccgtcgaggtatgctccgctgtcggtgaagcgggtgatggtcagggtgttgtagtcgccgagttttacgttcatagtcctgtggagtgaggagtttttagttagtcgcaaagtcgcaaagccgcagagtcgcaaagccgtgagaaattaggaatgagaaattaggaattaggaattttcagttagtcgcagagtcggcgcttcgcgctcagtcaactatcaattatcaactgtcaattatcaactatcaactatcaattatcaactatcaactatcaattatcaattctcaattattcagaacatttccttcagtgcgtcttgcaccttggcggcggctatcacctctatgccggcaggggcgggggatagtcccttcatgttggactggggtattattattcggcggaagccgaggcgctgtgcctcgctcactcgctgccctattcgtgttacggagcgcagctcgccgctgaggcctacctcgccggccatgcatgtgccggggctgacgggctggtcgtaggtgctggagagtacgctgacgatgacgctgaggtcgatggcggggtcgctgaccttgatgcctccggctatgttgaggaatacgtccttctgtgccagcttgaagccggcgcgcttctcaagcaccgccagcagcatgttgaggcgccgtatgtcgaagccggtggctgagcgctgggcattgccgtaggctgcggagctgacgagtgcctgtgtctctatcatgagtggtcgcgcgccctccatggtggctgccaccgccactccgctcagtccctcgttgacgcggttgaggagcatctcggaggggttgctgactgccacgaggccgccgctctgcatctcgtagatgcccagctcggaggtggagccgaagcggttcttcaggccgcggagcacgcggtacatatagtggcggtcgccctcgaagtggaggacggtgtcaacgatatgctcgagcaccttggggcctgccagtgagccctccttggtgatatggcccacgaggatgacgctcctgccggtctccttgacatatcgtagcaggctgacggcgctgtccctgacttgcgtcaccgagcctgggaatgcctcgccctggtcggaggagatggcctgtatggagtctatcactatcaggtcgggactgatggcctcggcctgctcgtatatccgctccagcgaggtctcgcagagtatgaacagggagtcaggaattgttagtgaggagttaggagttaggagtgtggagttaggagttaggagtgaggagttgggagtgaggagtgtggagttaggagttaggagtgaggagttaggagttaggagttttgagttattagtgaggaggcggtctgccctcatcttgatttgctgctcgctctcctcgccgcttacgtagagtacgcggaggccggtcatgcgcagcacggtctgcagcagtagggtggacttgcctatgccgggctcaccgcccagcaggacgagggagcccttgacgagtccgccgcccagcactcggttgagctcaccgtcgagggtgtcgatgcgctgctcgctgccatgctctatctcgctgaggcgcctcacctgtcgtgagccggcggagcctacggcagactggcgggctgccacgggtgccttgcccagccgtacctccttgaaggtgtcccatgcgccgcagttagggcaacggcccagccacttggctgagtcgtagccgcactctgtgcatacgtatgctgtcttttccttggacacggtgctgtttggggtttgaggtttgaggtttgaggtttattgcgaggtcccgattgattaagactcacggccgttaacggttattggttattggttaacggttaacggttattggttattgtttattggttaacggttaacggttattggttaacggttaacggttattggttaacggttattggttaacggttattggttattgtttatcaggtattctgctatctgcactgcattgagggcggcgcccttgcgtatctggtcgccaacgagccagaaggtgagtccgttggggttggcgaggtcgctgcgtatgcgtcccacccacacatcgtcctctcctgccaggaacagcggcatggggtactgcttgtcggcgggattgtcgcacaccctgaggcccggctgctgctcaaagaggcgtcgtgcctcctcggggctcacggggcgctcggtctctatccacacagcctctgagtggctcctgagcgacggcactctcacacaggtggcactggtcattacatcgctgtgcatgattttgcgcgtctcgttgaacatcttcatctcctccttggtatagtcattgtcgaggaagacgtcaacctgcggtatcatgttgaatgccagctgatactggaatttctccactgtgggctcctcgccccttagcacctggcggtactgctcatacagctcgtccatggctgctgccccggcgccggaggctgcctggtaggtggagacatggatgcggcgtatgtgggtgacgttctctatcgccttgagggctacgaccatgatgatggtggtgcagttggggttggcaatcactccgaggggacgctccagcgcatcctcggggttacactccggcaccaccagcggcacctggtcgtccatgcggaaggcgctggagttgtcgatcatcactgcaccgtagcgtgtgatgtcctcacggaactccttcgacactccggctcccgccgaggtgaaggcaaagtcgatatctttgaagtcatcgccgtggcgcaactcctccacggtgtattccttgcccttgaaggtatatgtgcggcctgcgctccgcttggagccgaacagcctgaggttgtctatcggaaaactgcgctccgccaaaattcgcaggaactcctgccctacggcgccgctggcgccaactattgccacattcatattggtaatttacaatgtactgatttttatcggggaattaacaatttgtatgctatttgattattggcggcaaagttagtgaaaagttggtagtttagagtcaggagttaggagtttttttgctaattttgcagcgcaaacacaaaatgtaaattataaacggtaaaattgtaatttgtaaatagtaaaattgtaaattattttttcgttttcgttttcgttaacttgtgaaattgtaaattcccccatgtttcccctgaccgaccccaaatggataatgctctgcgtgctatgccttatcttggtagtgccgctgctgatggagcgcatcaaggtgccgccattggtaggcatggtgctggcgggcatggctgtggggccctacgggttcaatgtgctggagcgcgacggcagcttcgagacgctggggttggtgggactgtactatataatgttcatggcgggcctgtcgatggacatcagtgcgctgaagaagaagcgcctggagatggcgtcgttcggtctgctcagcttcggcttgccgtgcctgatgggctatgctgcggcccgttggtgtctgggcatgagtggcgcagcctcggtggtggtggcatgcatactgtccagccacacgatggtagccttcagcattgccaggcgctatggtctggcacgccatggcggcgtcacgctgtcggtggcagccaccatggtctcgctgcttctctcgctgctcatcctggcagccctgagcagctcatggcatggcggtggcggtgcgttgacatggctgctcatcggtggcaagtgcgccctggtaaccctggcagccctgtggggactgcccaggctgacgaggctggccttcaggaagctgtctgacgatgtgctgcagtatatctatgtcatgtgcgccatgctgctgtgtgcagccgtttgcgacgccctggggcttgagggagtgctgggcgccttcctctgcggcctggtgatgaaccgctacatccccgagtcagcgccgctgatgcgccatatcgacttcatgggcaacgccctgttcataccctatttcctcatcggcgtgggcatgctgatagacgtcaggctgatggtggagagcatggatgcgctcacggtgaccgccgtggttgtcagcgtcgccctgctgtccaagtgcctgagcgccttcgtcgccgccaggctcttccgcatcgatgccgacagccgcctgatgatgtgcggcctcacctcggcccatgccgccggagccctcgccatcgtcatggtggggcgccgtctgctgctgcccgacggcagtgagctggtgggcaccgtgctcctcaatgccgtggtcatgctcatactgttcagctgtatctttagcgccttcgtcaccaccgccgcctcgcgccgcatcagcctgcgggaggtcagcgccgaggagcaggagggcgtggaggacaagatgctggtggccatgtcgaggcctgagtcgatgcccgacctcgtcaacgcctccatcctcatgcgcccccaccgcagcacgacgcccctggtgggagtgaggctggtggtcgatgccgtgggcaatgagcgggagctgcagcaggcccgcctgctcgtcaacgacgccgcagccatagccgcctccgccggagtgagcctcaagaaggtggtaaggtccagcgtcaaccccatcacgggcctctcccatctgatgaaggacttcgagacctccgagatcatcatgggctatcacctcagcgacggcaaggcagccgacagcttcggcagcatgacgtcggagatgctcgtggcgatcccaaggcagataatcatcatgcatatcacccggccgctcaacacgctgaggcgcatccatgtggcggtgccccccaaggcggagaaggagaccggcttcatacgctggctcaaccatgtgctcaggctgtcgcgccagctcgactgccagatagccttccactgcagcgacgaggcatgggcgctcatccaggagcgccagcgcaagcactacggcaccgtcaaggcattcttccaccccttccgcgactacgacagcctgcagcagctccggtcagacatcagcgaggaccacatggccgtcttcgtggcagggcgcagcggctcgccgtcataccatccccagatgagcaagctgcccgcaatggtcgccgccgactataagaacgtcagcataatgatcatctaccccgaccagtacggcgtcgagaaccgcaacatggcattctccaccggaataaagtaagagccccctctaactccccctcaaggggaggactctggtgcaagggataaatcctccccctttagggggataagaggggatctcctaactcctaactcctaaccccataatgatttccatcacagacatcacaaaaagcttcggcgacctggaggtgctcaagggcatcagcctgaccatagagaaaggcgaggtcgtcagcatcgtaggtcccagcggcgcgggcaagacgacgctgctgcagataatggggctgctcgacaggccctcctccggcgaggtgcttattgacggccgcaacgtcaccaacctcaaggccagggagctggccaaggtgaggaacacccagataggcttcgtcttccagttccaccagctgctgcccgagttcacggcgagggagaacgtgatgattcccgccctgatagcaggcaccggcaggcgcgaggcaggccgcagggccgacgagctgctcaccttcatgggcctctccgaccgcgccccgcgccctggtcaacaaccccagcatcatcctcgccgacgagccgtcaggcagcctcgacagccagaacaaggccgagctccaccagctcttcttcgacctgcgcgacaagatgggacagaccttcatcatcgtcacccacgacgagcagctcgccgccatcaccgaccgcaccatccacctcaaggacggaataatagtttagcggttagcggttagcgtttagcggttagcgattatcgcgcttcgcgctcagtcaagagccaagagtcaagagtcaagagcctttttaatttgacaattggacaatttactattccacaatttagtaagtcgttgggcataaatttctgatatatttctgataatttctgtgccacttcgctctcaggctcttatttgtcagcccggcttcgccgaccactgacagagccttcgcgatgcctttggcattcagtgtccacctccggacttggataaaaaattcctaatttctaattgtcgcttcgcgacacgcagattgcgcagataaaagcagatttcgcagattattaaactacgaattatacaaataaatttctgaataatttctggtaatttctttcagtgtccacctccggacttggataaaaaatttcaaatttcaaatttcaaatttcaaataactcaaggtgttcaagcaactcaatctccgtgtatcccctcaggtggcagccaccgacgcgctgctgcgccggcgcgtggccgacgagctgggcatcgccgagcgccgcatcgagggcgtcagggtgacgcgcagcagcatcgatgcccgtcagcggcaggtcatggtcaacctctccctgctcatctatgtcgatgagcccgccccggcgctgccctatcaggagatagcctatcccaatgtcgagggcaggccgcaggtcgtcgtcgtcggagccggtcctgccggcctcttcgctgccctgcgcctcatagagagaggcctgcgccccatcgtcctcgagcggggcaaggatgtccatgagcgcaagaaggatatcgccctcatctcgtgccagagcctcgtcaaccctgagagcaactacgccttcggcgagggcgtatccggcgcctcctccgacgccaagctctacacccgctccaccaagcgcggcgacgtaggccgcatcctcgccatcttctgccagcatggcgccagcaccgacatcctctccgccgcccatccccatatcggcaccgaccgtctgccgcgtgtcatcgagaatatgcgcaaccgcatccgtgagcacggcggcgaggtgcgtttccagacccgtgtcgaccgtctgctgctgcgtggcgacgaggccgtcggcgtggtcaccgctgccggcgaggaagtcctcggccccgtcatcctcgccaccggccatagtgcccgcgatgtctaccgcatgctccatcgcgagggcgtggagctggaggccaagagcctcgccatcggcgtcaggctcgagcaccccagcgatatgatagaccgcatcatgtatcacagccgtgagggtaggggcccctggctgcctgcggccgagtaccgtctcaccgcgcagagcggcggcaggggcgtctatagcttctgcatgtgccccgggggcttcgtcatccccgccgcctccggccccgggcaggtcgtcgtcaacggcatgagcccctccgcccgcaactcccgctggagcaactccggcatcgtcgtcgaagtccgcaccgacgacctcccccaaatttcaaatttcaaatttcaaatttcaactccattcgccatgctcaccttgcaggaggaattagagcgtcagtgctggctgcaggccaaccgtcgtcagaccgcccctgcgcagcgtatgaccgacttcgtcaacaagcggttgagtgccgatctgccctccacctcctacgctgccggcttgatagcgtcgccgttgcatttctggatgccaccgttcctcaccgagcgtctgcgtgaggctttccttctgtggggtcgtcatcatcatgggttcctcaccggcgaggccaccgtcatagccatcgagacgcgcacctcgtcgcccgtgcgcatactgcgcgacggcaccaccctctgtcatgtccgtgtcaggggcctctacccctgcggtgagggagcaggctatgccggcggcatcgtcagcgcagccatcgacggtgagcggtgtgccgatgccgtggcacaggcaggcagtgacgtgtgatgccatagcccccatccccctctttcttaaagggaaaaaaagcgaggctaccttgcggtagcccccctttagatgttttcacaacggaataatccttattgtgaattgcttcaaattagttccgcaaaagtagtatttttatattaaagcaccaagttttccgcaaaaaaatgtaactttggccacaaaataacataaacacattccttaatttacaaaatgaaaagagtacttggacttgatttaggtgttggctccgttgggtgggcacttgtggaaaaagacgaacaaaatattcctatcaatgttaataagataggtagcagaactgttcctttatccaatgacgaagaaaataattttagtaagggtgctgctataccaaccaacaaagaccgcactatcaagcgtacagcccgcaaatgcaacaacagatataagttgcgccgtgagcaattgaccaatggattgcgggctctgaaaatgctcccggacgaaactctattcaaattagatcctctacagttgtgggaactaagggctaaggctgcaacggaaaaggtttccttgccagaattaggcagagttctatatcatctcaatcaaaaacgagggtataagcatagcaaggacaacgaacaggatagcaaacaaacggattatgttgcaacggtaaacaagcgttataaggatttgcagtccaagaacctgacaatcatcggccaatacttcgcccaaaagctgaaagagtctgaacatattcaagagggtggtaagagttattcttttcgaatcaaggataatgtataccctcgtgctgcctacgaagaagagtgtaagagaatccttagtacccaaaagcaattttatccagacattctgacggataacaatgtaaaggatttgtttcagtttatatactatcaacgcccattaaggtcatgcaaacatctaataagcagatgtagccttgaagagcagttgcatgatgtaaaagaaaaagatttctatgcccccaaggttgcccccatatcttcgcctctcgctcagctggacaagatttgggaagcagtcaacaactttactgtacgtggcaagagaaatgaggaactctatatcacacacgagcagcgctctgccatagtggagcatctggagcacaataaggacataaagttaactgctattcagaaaattcttggaataggcaagagcaaggaatggtttattaagaaggagcagttaaagccattgcaaggcgatataaccagaataaagcttgccgaggcattctcgtcaggtcatctctcaaaagaaaagatagaaagcctgttgcagcttaagatagattttgaggaaatggcagacactacgactggtgaagtaatgggcggcattgttgttaaaaacaatgttgagagtcagcccctctaccagttgtggcatgctatttattccatcgatgacgaaaaggctttgagaaagactcttgccaaactcggcattgatgacgatgatgtgatggatgctttgtgtaagatttctttcaagacctctggttatgcgaaaaaatccacaagagccataaagaagattcttccttatctgatggaaggatatcaatatagtgaagcatgccagatggctggctacaatcattctaacagtattacaaaagaggaggaagcgtcaagaccgctacaagatcacatacctcagattcaaaagaatgagttacgccagcccgtggttgaaaagattttgaaccagatgatcaacatcgtcaacactttgcttaaagatggtcccatcgacgagattcgtgtagagttggcaagagaactgaagcgaagcaaagatgaacgtgagatggcaaatattcgcatgaataggaataagaggagaaacgacgaaatcgcaagtatcattcaaaacgaatatggacttattcctactaagaatagaataatgaaatataagatgtgggaggaaacagatggcttctgcatctattgtggcacaaagattaaacttgcagaattccttggcggtgtagattcagagcgtgagcacattatccccaaatctctgctttttgacgatagcttctccaaccagtcatgcgcttgccgcaaatgtaataaagaaaaaggcaatcgcactgcgcttgattatatgcgcgacataggcaaggaaaaacaatatgttgagcatattgcggagttgcttgagaaagataagattagcaagacaaaatataacaatcttcttgcctcctacaaagactatcttgagcgcaaggctaaaggcaaagaaacagaggaagacaagaacctgtgggaaagttttattgaccgccaattaaggttaagtcagaacatcgccagaagtgcaatggaattgttgcgtcaggtatgccataatgtttatgcaacaagtggtagcgtcactgactttgtgcgccatcagtggggatacgacaacatactgcatgacctcaacttcagccgatttgccaaatccggcaacacagaatttattacggttgtcggggcagatggcaaagaaacccaacaagaacgaataaagggatggtcaaagcgaatggacaatcgccaccatgctgttgacgccttggcaatagccctcaccacccaaagcataatacagcgcattaacaatcttaatgcttcgcgcgaattcatgcaaaaagacgtggaggcttccaaagagaaattcaaggagaagaaaagcttgttggagaaatgggttgccattcagccacatctttcttatggacaagccaaagacgcaattagcggcattcttgtctctcagcgcagcggcaagcacattactacgccgggcaagagatacgagtacaaaggtggcagcaagatattgcgtcaacaaggattggtagtgccacgcactgccctccatgatgaattcgtgtatggtcggatttcgcggtatgataaaaatggcgttctgcagccggagatagtccgcaagtacggcatccttggaggaatggggtgtctgttcaatggcaaagagacatacaaggaaaccacagtgactgacaaaaagacgggactgtccatgattaaggttaccgatggcattaaggacgttcttgacaagatagttgatggtggtatcaggaaacgcattctggaacgcctaaatcgtggatttgagcaagggactgattatcgtagcaatataaagaaggcacttgacaatcttcgcaatcttgaccaagatcccatctatcttgacgatgcaaaaacaatacccatcaagaccgtcagaaaatacacccgttccaccaaggccattcctttgcgttacaatgccaatggcgctcctatcgcctttgtggagcctggtggcaatcatcatgtcgcactatacaaaacacctgatgggactatcaaagaacatatctgcacaaattggcatgcagtgcaaaggcgcatgtatggattgcccgcaatcatagataatccttctgatatttggcaacaagttgcaaacaatgacaaattgccagaagacctgctgacacatctgcctgacgataacagtcaattcataatgagcatgcagattggcgacgccttcatccttggaatggaagaggatgaatatcagcgtgtaatggcagaaaaaaactatgcgttgttgggtgagcacttgtatttcgtgcagaatttgtcttcttcaaattatagatttaggcgacatgttgaagctcaatttgatgtaacgcaaatgaacaaagaagataaacgtttctataatattaagagcattggagcgttaagtattcttaatcctcataaggtaaagatttcaataacaggtgaaatcctcctatgatcaagcgcaccttatatttcagccagccgatgtatctgtcgctgcgcgacaatcagttggtaatgaagctgcctgaggttgagaagaagcccgaccattactcaccgtcgcttagggaacaggcagtgcgcacttttcccgtggaagacattggcgtggtaatccttgacaataagcaagtgaccatcacccatgcactcatggatgcattgctgcagaataactgcgccctcattacatgcgaccaacgctctatgccgtctggactgtttctgcccctgtcaaaacataccctccaaggagaacgtttcgctttccagatagaagcctcgctaccactcaagaagcaactatggcaacagactatcaggcaaaagatactcaaccaatccgccatactgcagaaagtgtcattggttgaaagccgatgcatggaaacatgggcaaaggatgtgagaagcggtgacttcgataaccttgaggcacgtgcagctgcctactattggaagaatgtctttgtaccatggggaataaaagactttgtcagaggacgcgatgaagcaccgcccaacaatctgctcaactatggttatgccatccttagagcaattgtggcacgagccctcgtaggcagcggactgctgcccacactgggcattcaccaccacaaccgatataacgcctaccctctggcagacgatataatggagccgtacagaccatttgtcgacaagaaggtcatagagataataaagagcggtgtagactattcagaactaaatcgtgacatcaaaggtacattattcacgctgcccaccacagatgtcatcatcaatgagcagcgtagcccactcatgattgccgcctccaccaccacagccagtctggctaaatgctacagcggggagagccgcaagttgatatatcccgaaatgccatagcgatggagcgattcagcgagttccggattatgtgggttttagtgttttttgatctccctacagagactaagaaagaccgaaaagaggcagcgtcatttcgcaaggaactgatgcgcgacggattcactatgttccagtttagcatatatacacgccactgcgcaagcgcggaaaatgcgcaagttcatgtaaagagagtaaaagcaatgctgcccgaatatgggaaggttggcatcatgtgtattacagataagcaatttggcgatatgcaaatcttttatgggcgaaaagcagcacagacggaaccgccaccattgcaattggagttattttagaattactaaaagacccctgcctgaatagcagaggtctttttctttgcacgttttttaatttctaatttgcactgcaaatatttgttccacaacattttgctgatagtttgttgtatttggtagtgcaaagatactaatttgagagcaattcacaaccataagcgactttttcgctgttttaatctgttgtatttggtagtgcaaagatactaatttgagagcaattcacaactatgacattctgaggaacagctacacactgttgtatttggtagtgcaaagatactaatttgagagcaattcacaacggcggctcagcgttacctacgatgtagtctgttgtatttggtagtgcaaagatactaatttgagagcaattcacaacacctgcctttcggtgcggtcggggttaagcgttgtatttggtagtgcaaagatactaatttgagagcaattcacaactggctgctctgggggctgcaagaggacgaagttgtatttggtagtgcaaagatactaatttgagagcaattcacaacctgcgcatgagcctgttcgagggtgccagcgttgtatttggtagtgcaaagatactaatttgagagcaattcacaacggatttcgctcaattttctttgcatgtgttttttaatcgcaagaataaaaaactcatcgcaccgaagtatattctgagcgcgccgaagtcaaatctaatcgcgccgaaactgacaacttctgcgcgataagaaaaattgttcgcgcgattagaaaatttattttcgcttttacagtaattttttagtcactaaaaaaaagacaatatttcctggtcatcttctgttgggcgctggcattgtcaacttgttgccggctgtcttctgtgggcctcctcacgcgcctggaaatggcaaaatggggcgcacacgggcgagaaaagcaaaaaagatgcgtattttcttggttgttatatataaataatgtatttttgcaccgcactattggaagtgagaggtcctcaagtcgggcttctcacttttgattaaagggcaaagttagcgttgagcggttagcggttagcgttgagcggttgccacttcgtttcaccttcgcttttcgcacccgcgcctaaaaagcatccttgctttttcgagacggcgcgactatgctgctacggttcgcgacccctaacggggttagcgttgagcggaggctttgcgactttgcgactttgcgactaacttctcactcttttcgactctagttctagtcttataatataatttccatgattgacaaacaaacagtacaaggccttgtagagaaatggctgaatgacaaggattacttccttactgacctgacgattagtgacgacgaccgcattgtggtggagatcgaccacaaggagggcgtatggattgacgactgcgtggagctgagcaagttcatcgaggctaacctcgaccgcgacgtggaggattacgagctggaggtgggcagcgccggcatcggccagccctttaaggtgaggcagcagtatgtcaacaatatcggcaacgaggtggagatactcctctccgacggctctaagctcaagggcgtgctgaaggatgccgacgacgacggcttcaccgccgtggtgaagaagaaggtcaagctggagggcgccaagaggcctaagatggtcgacgaggacgtcaggctcgcctacggcgaagccaaagaggtgaaggcagtgataaaattctagttatattggaggctaaagccagataacaactaacagagaaaagataaaggtttgaggtttaggctaaagccagataacaactaacagagaaaagataaaggtttgagaattagcggttagcgttgagcggttagcggttagcgaggactaactcctaattcctaattgccgcttcgctctcgcagctctttttctgccagcccgcgccgatggcgcgaccactggcgagctgctcgctcaaagagagcattgctcaaaagcaatttctcgcgatgcctgcggcattcctaactcctcactcctcactcctaactcctaactcctaactcctatcccctcactcctgagcgcggagcgcgaaatgcgaaaacgataaaaaacaatatatacaatggcaaagaaaaacgaagagacgattagcctgatcgaaacgtttgcggaattcaaggagaccaagaacatcgattatgctactatggtgagcgtgctggaggagagcttccgcagcgtgatcgccaagatgtatggttccgatgagaactacgacgtgattgtcaaccccaacaagggcgactgcgagatttaccataaccgcatcgtggtggccgacggagaggtgactgacgacaacaaggagattgcgctgagcgaggcgcagaagattgccgacgactatgagatcggcgaggaggtgagcgagcgcatcgacttctcgaagttcggccgacgcgccatcctcaacctgcgccagacgctcgccagccgcatcctggagctggagcacgacgccctgtacaataagtataaggacagggtgggcgagattgtgaacggcgaggtctatcagatatggaagaacgagatcatgctggtggacgacgagggcaacgagctcatcatgcccaagtcgcagcagattcccggcgacttcttccgcaagggcgacatcgtgagggcggtggtctataaggttgacaacgccaacaacaaccccaagatctacctcagccgcactgctcccgagtttctgcagcgtctgctggaggccgaggtgcctgagattaatgacggcctgattgccatcaggaagattgcacgcattgccggcgagagggccaagattgccgtggagagctacgacgaccgcatcactcccgtgggtgccgtggtcggcgtgaagggcagccgtgtgcacggcatcgtgcgcgagctgcgcaacgagaacctggacgttatcaactatacggctaatgctaagctcttcatccagcgtgcgctggctcccgccaccatcaacaggattgagctggatacggaagagaagaaggccaacgtctatctgaaccccaaggaggtgtcgctggccatcggcaagggcggcctcaacatcaagctggcctgcatgatcaccgactacgatatcgaggtgttccgcgacacggagggtgagcaggagacgaatactgccagcgatgtctatctggacgagtttaccgacgagattgacgtttgggtagtggaggctctgaagcatgccggctaccagactgcccgtcaggtgctggcagtgccccgcgaggtgctcgccgaggaagccgaccttgagtttgacaccgttgacgaggtgctcaaggtgctgaacgccgagtttgaacacgatgacgagaacacttagggtatttgaaatttgaaatttgaaatttgaaatttgagatttttgccaatccggaagtggatataagcgaacacgaatctcacgaataacacgaatctcacgagtaaaacgaaaacgaagaaaaacgaaaacaagttagccaagtcttgaataatgagcgtaagattaaataaagtattaaaggagtttaatatcgggctgcagactgccgttgagtgcctgagcaagaagggattcaaaattgagcctgacctgaataccaagattgatgatgagcagtataatgccatcagggaagcctatggtacggacaaaactcagaagagcctggcggagtctctcagctctaagcgcagtgccgagcgcaaggtggctcagcctaagcctgcccctgtagtggaggagataaagaccacgctgcccgacgaccagcgcccggccttcaagaccgtgggccatgtggacctcgacagtctgaacaagcctaaggtgcagaaggctgccaagccgaaggtggaggaggcgcctgccgagcctaagccggcagaggagacgccgcagccccagcccgctgaggagcccgaggtgatcgatgccccgatgccggcagacgacagcccgatgccggaggaggacagcccgatggcagaggacgagggcaggcgtgagccggagatcttccgccaggtggagactcagacgattgaggggcccaaggtgctgggcagcatcgacctgtcgaccatcaacgagaatatgcgccccaagaagaagagcaaggaggagcgcaagaaggagcgcgacgagaagctgcgccagcagcatgccgcctcctcggtgaagaagaagcgcaaccgcatccagcccaacaaggttgacgtgaacgccgaggccaagaaggtgaccgccgacgggcgccatgaacagggtgccgccgaccgcggcgccaagcagggcggccgcaacaagcggggcaagggcagcgctccactgctgaacaagaacaatatctctgacgaggatgtggcaaaggaggtaaagaagacccttgcccgcctgcagagcaagaaggcctttgccagcggtgccaagtatcgccgcgagaagcgcgaccagatacgcgagcagatggagctgcaggccagcgaggaggccagcgagagcaaggtgctcaagctgacggagtttgtgaccgccaacgagctggcaagcatgatgaacgtgccggtgaccaaggtgatcagcacctgcatgagcataggcatgatgataagcatcaaccagcgcatggacgccgagaccatcaacatggtggctgaggagttcggcttcaagaccgagtatgtcagcgcctctgtgtcggaggccgtgcatgaggaggaggaccaggccgaggacctgcagcccagagaccccatcgttaccgtgatgggccacgtggaccacggcaagacatcgctgcttgactggatacgcaagagtaacgtgattgccggcgaggccggtggcatcacccagcatatcggcgcctacaacgtgacgctggagaacgggcgccacatcaccttcctcgacacgccgggccacgaggcgtttaccgccatgcgtgcccgcggtgcacaggccacggatatagccatcatcatcattgccgccgacgacgacgtgatgccccagaccaaggaggccatcagccatgcacaggccgcaggagtgcccatggtgtttgccatcaacaagatagacaagcccggcgccgaccccgagaaggtgaagggctcgctggccaacatgaacctgctggtggaggactggggaggcaagtaccagagccaggacatctccgccaagaagggcatcggcgtcaacgacctgctggagaaggtgctgctggaggccgacatgctggagctgaaggccaaccccaaccgcaaggctaccggcaccgttatcgagtcgtcgctcgacaggggacgcggctatgtggccaccatcctggtgagcaacggcacgctgaacatcggcgatcacgtgattgccggcacatgctacggccgtgtgaaggacctcaccgacgagcgcggccgcaagatcaagagcgtaggcccctcgagggctgccacgctgctgggtctgaacggtgcgccgcaggcaggcgacaccttccacgtgatggacagcgagcaggaggtgcgcgagatagccaacaagcgtctgcagctgcagcgtgagcagggcatccgcacccagcaccgcatcggattggaggagattggcgcacgcatcgccatgggcggagtggaggaactcaacatcatcgtcaagggtgatgtggacggctccgtagaggccctctccgactcgctcatcaacctctccaccgagaagattcaggtgaacgtcatccataaggctgtgggccagatatcagagaacgatatcgtgctggccgcagcgtccaacgccatcatcatcggattccaggtaaggcccagcaagggcgcacgcgccgaggccgacaaggagggcgttgacatacgcctctactcagtgatctacgacgccatcgaggaggtgaaggaggccatggaaggcctgctgaagcctatcgtgaaggaagagataaccgcccaggttgaggtgcgccaggtttaccgcatcagcaaggtgggcctcgtggcgggagcctacgtggtggacggcaaggtgtcgcgcaccaacaaggcacgcctcatccgcgacggcatagtgatcttcaccggcgagataaacgccctcaagcgatttaaggacgacgtcaaggaggtgagcaccaactttgagtgcggtatctcactgactaactgcaacgatatccgcgaaggcgacatcatcgagaccttccaggagatagaggtaaggcagaaactgtaggaataaggagaaaaggagtaaggagttatcgcgcttcgcgctctgtctagagtcaagagccaagggtcttagcttaaccgctaaccgctaaccgctaacccttaacccttaacctctaacccctaaccgctaaccgttaacccaaaaaacgatgtccagcgtagatataataattgtcatcatcctgctgtggggcgcatggcgtggatggcgcagcggactgatcaaggagattttctctgcttgcggcttcgtggtgggactggtgctggctgcgatgttctatggagtggtgggcgagcatttcgcccctgccctgggctctggcagcaaggcatcgtttgcagcctgcgtgctggcgttcatactgatatgggtggtggtgccgataatcttcggcttcgtggccaatgccctcaccaagggcatcaaggccctgcatgccggtccgctcaattcgctgctaggcatggtggtgggagccgccaagtatttcctgctcatcagcgtggtgttcagcgccatggcctatgtgggcatcctctctgaggagaagaagcaggagtcgctgctctacccctacatcaccgtggtgggccaggccatctatgaacaccgcaacattgccatcgacagcggaaagctggatgacgataccgtctacgtcagcaatcccaaccataaagccaagcccgcaaaataatgccgcagagtcaagataatgcattggtgcgcgacatagccaaccgcgactatgagtatggcttcaccaccgacatcgagacagagattatccctcggggccttagcgaggacgtggtgcgccttatctcgcagaagaaaggcgagccgcagtggctgctggacttccgcctcaaggcataccgccactggctgaccatggagcagcccaagtggggacacgttgacctgccacccatcgactatcaggctatctcctactatgccgacccccgtggacgcaagcgcaaggatgggccgcaggagatagaccccgaactgcagaagaccttcgacaagctcggcatacccctcaatgagcgcctcgccctcagcggggtggcggtggatgccgtgatggactccgtaagcgtcaagacaacattcaaggagaaactggccgagaagggcatcatcttctgctccatctcagaggccgtcaaggaccaccccgacctggtacgccagtacctgggcagcgtggtgccctatcgcgacaacttctttgccgcactcaacagcgccgtcttcagcgacggctccttcgtatatatacccaagggggtgcgatgccccatggagctctccacctatttccgcatcaacgccatcaacaccggccagtttgagcgcacgctgatagtttgcgacgacggcggctacgtatcctatctcgagggatgcacagcccccatgcgcgatgaaaaccagctgcatgccgccatagtggagatagtggtatgccaggatgccgaggtgaagtactccacagtgcagaactggtaccccggcgaccgtgagggcaggggaggagtgtataacctggtgaccaagcgcggactgctcaagggcgaccgcagcaagctgtcatggactcaggtggagacaggctccgccatcacatggaaataccccagctgcgtactcaagggcgacggttcgacagcagagttctactcagtggccgtaaccaacaaccaccagcaggctgacaccggcaccaagatggtacacctgggccgcaacacccgcagcaccatcgtcagcaagggcatctccgccggccgcagccagaatagctaccgaggcctggtgagagtggcccccaatgccgagggctcgcgcaactactccagttgcgactcgctgctgctgggcgacacctgcggcgcacacaccttcccctacattgacgtaaacaatgacagctcggtggtggagcatgaggctaccacctccaagatatccgaggaccagctgctctactgcaatcagcggggcatcccccccgaggaggccgtggcactcatagtcaacggctacgccaaggaggtgctcaacaagcttcccatggagtttgccgtcgaggcgcagaagctgctcagcgtctcgctggagggcagcgtagggtgagagctgatagttgatagttgccgcttcgctctcgcggctctttgaagtcggcaccagcttcgctgacagccgacaagccgctcgcgatgccttcggcattgatagttgataattgatagttgaaagtttagctaacataaaatgcttgaaataaagaatctgcatgcctccgtggagggcaaggaaatcctcaagggcatagaccttagcatcaagccgggcgaggtgcatg

SEQ ID NO: 3403 - DNA, 23669 bp, synthetic construct
  source 1..23669: mol_type = other DNA
  misc_feature 1..23669: note = Synthetic
acagtacctcggcaagcacaaaacgatgactggaataagggtttgcagaccataaaatgtaacaaatacgagcaaaaaagtaaacaaagtaaagaaaaatttggaagataaaaatattttgcatacctttgtcgccgatatttaataaaattgtaaatttaaaactaaaacgaaagcctatcggaacattattactcttataaccaaaaagacgtaaaaatggataaattgcaagaaatgaccgacgaagagttggcattatcttatgtaaacggcaataacaaggctttcgatttgttactctcgcgtacacagtcgaaactattctcgtacatccttttcgtggttcgtgaccgcgacagggctgacgacgtgttccaagagacattcgtaaaggctattgcgaaacttcacgagggcaaatacgctactacgggaaagtttctggcgtggcttatgcgcattgcccacaacgttattatggacaactaccgcgagaatcgctcgaagggaaccgttgacgttgctggcgacaacgacctgtcgaacatctcctcggaaagtcttttggactcgaacatagagaaccggtttgtaaatacgcaggtgctcagcgacgtaaagaagatgatgaacatgctgcccacaccgcagcgcgaggtggtcttcatgagattctatcagaacatggctttcaaggagatagccgaagttaccggcgtaagcataaatacctccttaggtcgtatgcgctacgcacttcttaacatgcgcaggatggcacgcgacaataagctttcgcttgagatgatggactaaagagctgtgttcttcagcgacttgatgacctctgtggggttctcggctccgaagatatagctgccacttaccaatacgtcggcaccggcttcaacaagacgaggtgccgtctcgttttgtacgccgccgtcaacttcgataagtgccttgctgccgctacgggctatcagctcacggagacgcgaaaccttatttatggtgttagggatgaacttctgtccgccgaagcccgggttcacactcatcagcagtactaactccacgtcgccaatgatgtcttcgagggcgctgacaggggtggaagggttcagcgtaacgccagccttcatgcctgcctggtggatttcctgaatggtacggtgcagatgggtgcacgcctcgagatgcacattcataagcatagcgccaagacgtgctgtacgctctatgtactgttcgggatgaacaatcataaagtggacgtcgagaggtttcttacaaacctttgctaccgcctccataacggggaagccgaacgagatgttaggaacgaagacgccgtccatgatatcaagatgaagccagtcggcatcgctgttgttgatcatctcgatatccctctctaagtgcaggaagtctgccgacaacaatgacggagatactaatatgctcataaactgtttcgtaatgaatttagtttaacaatagctctgtttcctcgccgcctgacttatatgcctgataggaataagcaatttgacggatggtgttgagaacttgctcagagggatttaattcttcaggtgtaaaatatgtcataggcaaaaatggattaaattacacttgtataacgaaataaatatacgttttattatatcggattgcatattttccaaaaatatttgtacttttgcagtcagtatgaaatatatctataacgacaaacaacgagaattcgccgaatacaaggtgctggaggagtcgcagctgctggccttcctcatgcagcacgtagagaagagtcgtactaaggtgaaggctactctgcagggtcgcggcatcatggttgacaggaaggtcgtcacgcagtttgacttccccctgaagcccggaatggttgttgccgtcagcaagacgaagcgcaacaacgacacgctgaaaagtcgttatctgaagatagtctatgaggaccgctggctggtggtagtagagaagaagcccggcatactgtcgatggcggcgggacactcgtcgctcaacgtgaagacgctgctcgacgactatttcaggaagtcgagacaacagtgtacggcgcacgtggtgcacaggctggaccgcgacaccagcggactgatgatatatgccaaagatatggatacggagcagcggctggaacactcgtggcacgacatagtatatgaccgtcgctacgtagctctgctgtcgggcgagatggagcaggagagcggtaccatagccaactggttgcgcgacaacaaggcttacgttacctacagcagtcctgtggacaacggcgggaagtatgccgtaacccacttccgcactatggcggtgaggaatggctattcgctggtggagttcaggttggagacgggcaggaagaaccagatacgtgttcactccgccgatatggggcaccccgtatgtggcgacgtgaagtacggtaatggtgacaatcccttagggcgactgtgtcttcatgcttatgtgttgtgtttcacgcatcctgtaacgggagagagaatggagttctcgacgaaggtgccgttcagcctctccccagccctccccaaaagggaagggagttcagaagcgcataaaacatttctctaacccctaacctctaacccctaaccactaatttttaataaaaaagatgtctcaattctattattatattttccttatagttgctgtggtagtggcgttcctgatagtgaagaagatagcgggatgcttccttaagagtatcctgttgttcgtcattgcggcagcacttgtggctatctatttcctttatttcgccaagtagttacttgttggtgttttcttcttcgtatatggtgttgaagattttgcgtagctccttctcgttatgaatgaggttacgtatcttgcgcaggttctcctcgtttggtgatccctgcatccacagacgtatatatccgtgttccgagtatttgttgtgcatgtgttccacgaatctctcccattgttcttcgtcgctcttctcggggtagttggagagtccgtactgtatggtgcgacggaacaccgtatcggggtcgaggtcgcggtcagcctcagcaacaatctttccgtagatgcttcgtggggcgtgacttgctgaagcgcgatggtcctcgacggcttccttcataatcttcagctggtcggcagagaaccacttcttcaaacgagcatcggcgacaagaatctttccgctggtgatgtgatgaatggcacgcggaccgctaagtccgaggtcgtgatatgccgcgatgatgtacgccatattgaggtcggcgccagccttcctggcgatagctatgctacgacgtatcactcccgtcacgtgactcatgttgtgagccttgtcgaaggcggagtactgcgggagaatctcgcgctccacaaattccataaggtcaagactaacgttattttccattcaattcgtttgaaaattatttgcaaatgtacgatattatgtttacttttgcaaggattttttgaaagattaaataaatagtatatatgagaagcagagtaacagagtggtttgagaccaagataggctacgagaagactatggaagacggtatgcctaaaagggttaaggaattatatgtcgttgacgccctgagttttaccgaggcagagaaacgtatatgcgaggagatgtcgtcgtacatcagcggagccttcgaagtagttgacatcaggaaggcgacgtacaaggagattttcttcagcgaagatgcaagtgctgaccgctggtataaggcgaaactgcagtttataaccatagacgagaagacagagaaggagaagcgttccaacgtcttttaccttgtgcatgcagccaatttccagcaggcggcatcgaacatcaacgaggtgatgggcggaacaatgatagactacgtcatagcaagtattgcagagacagctatcatggatgttttcgaggctaacgcaccagtaaaggacagtaaaccagaatacgaagagtaagatgtacgacgtaaaaaagaatctacacgaagtgctcgacgacctgccgcagggcgtaagacttgtggcggtgagtaagttccacccctcggagtatatccgtgcggcatacgaggagggacagcggattttcggcgagagtcatgagcaggaactgcgaaggaaagtagaggagctcccgaaggacatagagtggcacttcataggacatctgcagacaaataaggtgaagtacatagcaccctatatatctatggtggaggcggtagattccatgaagctcctcagcgagataaaccgtcaggcgcagcgtaacaacaggacgataaaagtattgttggagttgcacattgccgaggaggagacgaagtacggactgaccgttgacgactgtcgtgagttgcttgcggcaggagagtggaagacgctggagaatgtgcgcatctgcggactgatgatgatggcgtcaaataccgacgacgaggcgcagatacgacgcgagatgatgacggcgtcggacttcttcgacgaggtgaagcgcgactttttccccgacgacgacagtttctgtgaacgcagttggggaatgagtcacgactataggatagcctgcgagtgtcgtagcactatggttcgtgtgggaagtaagatattcggagagagagtctattaagattctctcttattttttcatagacgccgtccagaagtcaacgtactgctgagccaccttgacgttgtcgtgatgacgacgtacatactctatgctctggcgtttcagttccttgagctgttcggggtgaagaattatcttttccagttccttagcgacatcctcctttgaaggaagaacatttattatgggtcgcagttccgtttcgttgataatctcgtagttctcgggctcgccgccaccgatgcacacgatacccttggccatagccaccaaagcgtttatggcaggagtgtaggagtagagctggtcgaggatgcagtcgcagctctcggtgagttttatgtattcgtcgtagggcaccctctgtgtccgtaccaccacgcagcggtcggggtatttctgttccacaatcttcagtgcctcgttcattacgtcggtacctttgtaaacgtcgcgttcgctgtccataccgatgaagaaacgtacttttcccggctctttaagttctgtggagaagttgccctcgggaatctgtatggggagaggaataaaacgagtcttgtgggggaagaactgttcgtagcacttctggtattcatagagacacgtaggtattccgtcgcagttggagtcgatatatcgtgagagctcaccctttgctgtgcctataaactcgttgatatagcgacgggtgaagatgtcgtcgcgcatcttgtcgccgatatagaagtcaccatatcggaacagtttcatcgttattcccgagtgaacccagtaccagtcgcacccgtaggcaccgacgaagatgctcctgttgttgcgacgaaggtagcggaagatggcaaattcgcgttccgccttaagttccaggaagtcggggtttataagctgtacgacgtcgtagcccctgagtcggggcagtatggtgagcagttttgccacatactttacggcggcccatttcccggtgccttctctgcacaggtcgatgtcgcgcttgtatcctcgccatttgtttccgttggagatgacggtgacctgatggcctaactgtcttagtccttcagccagcgcaacatgcagattgctgtattcgccaagtaggagtattttcatctctcgcgttttaggtatggaagagtatgcagcagcgcctttctgcccaagggactgttagtcatacggcggaagaggtcgtacttcagggtgtattcacgtttcggcagcgggaacattccgcgacgtcgcaagttctggagtcgtgactcgagttgtttctcggagtgggtaagcgttataatattatatatgtagtccatagtaagctgcgccacgcgacgttgtagtgccacacgttccgacataggctgtgttgctgccaggtggtcgagactgaatatgacgtgttctgcatcgttaagacgtttaagtatccattctttgtcgttgttgtggactatggagttctcgcgctcacgatagaagtaagcgcagttgtcggtagagtatagcgtctcggcacgcagtatcagctgcggcgtgaactcctcgtcttcgtggagcagtcctggagtgaagcgcagcgagatgagcattttcttgcggaagaggtatccccaggcgcaggctctgaggtttctgctgcgcatatattccgaacccgtcataggaccgtcgaagaggttgggggcgtcggtgtcgccttcctcctttgtgaagttaaagacgatgacgtcgggacgttctcgcttgagaagtccgagacacagctcgtacgacagctttatgaggtagtcgtcggcatcgacaaactggatatattcgccccttgcgaggtctattccggcgttgcgtgcctcgctgagtccgcggttgggctgtcgcaggtagagaatatcgtcgcggaagtcctcaatttcgtttatcggactgacatcagaaccgtcgtcgataaggattacctcgcgttctcctgtcgcaaaggaaagagagagaatgcttttaagacattctttcaacatatcgacatcctcgttgtgataggtgacgataaaacttacaataggtgtcgtagtgttttgtgaattctgcatagtccttttattccaaagatttttaaggttatgatttttattttgtcggagagcgaacgaaggttagacgtcctgatgtccttgcgctcctgaagaagaatttttcccgacaggcggtaaacgtcaagctggatgttcaggatataaagatagtacgcgtcgtcaacggtcatccctcggtctatgttcgactcgagaagcatgatgaggtcgtcggcaccagccttcgccgttatgccttgaagattgtcggtatagacgtagcagcccttgtcggttgtcgttaccgaacgggctttctggaggagtagggggtatatccacgcgtcctcaaagactctgcccacagggaagcggatgtcgtcgaagagacgacggcggaaaatcttgttccacacgtaggtgtgggtgtaagccttcgtgacgacccaatattgctgtatgtcgtcgtagtgcatgttgtgcggaataaacatattcttccccttgatggaaacgggatattccagaatttgtatgctctcgtcgtgcgctatcttgttcatcagcggggcaagagtagaaggcgctatcatgtcgtcgctatcaataaaggtgaggaagtcgccctgtgccacattgatgccggcgttacgggcgtcgctgagtcctccgttcttcttgtggattactcggatgcgactatcacgctctgcccacgcgtcgcacttctcaggacacaggtctggcgagccgtcatctacgaggattatttcgtaatcactataatcctgcgagagaatactctcaacgcagcggtcgagtgttttctctgctttatagacaggtatgataatagtgagtttcataatttgcgacaaaggtacgattaagcgagcggaataccaaagaaaaacggatttttctttgtattcctgagcgagagtaccttattcaaagccccgattaagcgagaacagagccaagcttgcttgagctatgtcgagcgtgagggggttagacgtagtcaaaggtacgattaagtgagcggaaagaggatgtgcctattttgacacaccctctttattctttagatgtatatcggtccgtgacccatacacgatgtcgttcccaatgcagtcagtgctgccgtcaatacagatatcaccacctgtataatcgtctgtctttccctgtatagtgttgactccttttgagccttgatttgttgctgttttgttaattactgtttactgtttctgttgacttatctctctgatcaggttgtctgctttcctgcttttgttgtcccttttcccgggttagtggactttgtactgaaaacgttgacattttcaactgagaaagtgtaaaaatgtggcaaaagttttgttggttaaaaaataatttgtatttttgccacagaaataaactatgaaaataattacaaggaactatgagtaacgtgataggtagaaatcttaaggtattgcgcgaagctaacgacttgacgcaggagcagatgtccagttatcttggcatcggtcgcagtgcgtatgccaactacgaggcaggcgagcgagagacaccacttgaggttcttgagcgttcggcagcattgctgggatgtgagttagaactgctgttcgagccggatgtggagatagtgaaagaccgtatgatggtctgcgccttccgcactgacggtctgacagaaggcgatatgaaagaggtggcacgcttcaagcaagtagtgctggagtatatgaaaatgcagaaaatgcttgagaaatgaagaagttagcaaaagaagccatcgagcaactggcattgaagatgcgtgtgcaggcaggacttaatccgtcagagcctatccacacgaagacgctgctgcgcaaacttgggattatggtgatttaccgtcctatgtcggagaaggcttgcggactctctatgtgctcatccgacaggcggtcgaagttcatgctcatcaactcgaacaactctcgtggtcgtcagcacttcaccatttgtcacgaactgttccatctatactacgacgaagaacccaagccccacatctgcggtacacctgggctggagaaagaccctgccgagattaatgccaacgccttcgcctcagcgctacttttgccacagtcaggcgtgctggagtcgataccgtcggaagagataatgaaccgccacatcaccacagccacgatgctgcgtgttgagcaactgtttggcgtcagtcaccagtcgctgtgctattgtctgcgccacctgcgtcttcttactgaagaggagctgcagagccatctcgaggagagcatggttattcaggacatagcaacagaatacggttacgacctctcgctttatcagccaggcaacgaaggtatggtcatcggtgactttggcgagaaggcacgcctgttgttcgaacaggaacgcatctccgaaggacactatgtagaactcttaaatctgctgaaatagtatggcaaaaagtgtaaagacacagattgtactggatgcagatgtggtgatacacttctctaagggaggacgactaagcatgttgcccacaattctccctaactacgaatacgtgctgcttgaagctgttcacgaggagctgctgtcagacgtcagaacgcagatagaccaccagatagcgctgctgaagaatatcaagctccttccctttgcgccacgtggcgagatgctccgcgagtatgctatgctaagaagccgattcggcaagggcgagagtgcctgcatggcatattgcctatttacaaacaacgtcatcggcagcagcaacctgcgcgacatccgtgcttactgcgaggagaaaaagatagtatatcttactaccatagacttcctttggtacgcctggcaatatgggttaatgacaccagcggagatttcatccttcatcagtgaagtacgggcaaagggcagcaaattgccggaggtggagatagagaaatatacttgtaagatgattttgtaagtgttttaattatgcagataatgatgtaaatataaaaagaaagggcgaggttgcccccgccctgaatgttttcacaacggataaaatccttattgtgaatagctgacataatcaatatcgttggcaaaggtataacttttatgtgaaatgcacaaataatttataaaaataatgaaaaaagtacttggcttagatttaggtgttggaagtataggctggtgtctcgtcgaaaaagatgacaagaatattccattacgaataattcgtatgggaagtcgtattgttcctatcactaaagaagaagaaaatggttatactagaggaaatgccattagcaagaatgccgatcgtactaccaagagaacagcacgaaagtgttacgacagatatcagttgcgccgtaaagcactcgtcaatctgctcaagcgttgtggaatgatgccggacaaaggtttaatactggaacagtcgccattggacttatggcagaaacgagccgatgctgcatcaaaagagataagtttggaagaactaggtcgtgtactccttcatataaaccaaaagcgcggatacaaacattcacgtctttcgaattctgatagtaaggaaaccgcatacgttcaagaggtaaacagtcgttatgacgaacttaaagcagaaggattgactgttgggcagcattttgcagccaaactaaaagagaacgaacagatatctgctgacggcaaaaagtattataactatagaataaaggaacaagtctatcctcgtcatgcctacgaggaggaagcgaagaggatattagaggttcaaagtcagttccatacagacgtattgacaacgaatgtatgcaaggaaatatttgataccatcttttaccaacgagacctgaagtcgtgcaaaaatcttgtgtcgttttgtgaatttgagtcctacaccatcaagaagaacggcaaaaatattactatcggtcctaaggttgctccaaggacttcacctctagcacagttgtcaagtattcttgaaactgccaataacatcaccattcgtaatcgtagaaatgatgaactctacatatcgccagaacaaagacaagccatagctaacttcttggacaacaacgaggtcatgaaacttacagacctttacaagatacttaacatcggcaggaaagacggatggtgggctggcaaggcaataggaaagggtttgaaaggtaacaccacaaaatgtcagatacgaaatgctctcagcaaattatcccaagaacaaattgataaacttacatccttcgacctgatatttgatgaatatgttgacgaggagacgggcgaggttcgtaagcgaatcaacaattcccatgcagaacgccaacccctatacagattgtggcatttagtttattcaattaaggataatgacgaattgtcgggagcactgcgcggtttaggtatagaggacgaggagtgcatacacaacctttgtaatttagacttccgaacagcaggttatgctaataagtcggctaaggctataggacgtattttgccatacttgatggaaggcatgatgtatagcgaggcttgcaaacgtgcaggctttgaccactccagaagagttaatccagaacgagagttgcttacttctcttcctcaaattcaaaagaacgagttacgtcagcctattgtagaaaagattcttaaccaattagtaaacgtcgtaaatgctctccttgaaaaggaaggaacgatagatgagattcgtgtagaacttgcacgagaactcaagcaaagcaaggatgagcgtaatgaaacatacaggcgcaacaatcaaaacgaaaagaaaaataaagaatatgcagaacgcataaaaaagtatgagcttactcctacacgcaatcgtatcatgaaaatgaagatgttggaagaaagcgagtacaaatgtatgtattgtggacagcctgttaaagagaaggaatttcttcagggtgccgatgtggaacgtgagcacataattcccagagcattactctttgataatagttttaccaaccaggtttgctcatgtcgtagttgtaacagtcagaagggaatgcgcactgcatacgacttcattgcagacgacaaaggacaagaagggctggaggcatacatagaacgcattaacgacttatttaataaaaagaagattagccgcagcaaactcaatcgactgttagtatcgcacaaagcatacgtcagcaggaaagcacaaggcaaggagaccgaagaagacgtgcagctgtgggagaacttcatagaccgtcaattgcgccaaagccagtatattgccaagaaatccgtcgagatactccagcaagtctgtaagaatgtctataccacaagtggcagcgttaccgattttgtacgccatcagtggggatatgatgagatacttcatgacctaaactttgagcgtttcaagaaagccaatcttaccactatggtaaaacaattgcactctggtaaggaggttgaagtggagcgtatcaaggactggacaaaacgccttgacaacaggcatcatgctgttgatgctctcgctattgcctgcactacacagggtatgatacaacgactgaacacccttaatgctagtcgtgacgcaatgctcgatgaactgaacaacaaagagcaacgcatgatagactctgagcgtagcatgttggaaaaatggattatctcacagccgcatgtctcatatgcggaagccaagaaagagataaacaagatactcatctctctccgtcccaacactcgtatcacggttcctggtaaacgttacattacgaagaatggcaaacgcactttggttcagacgggcatcatagtgccacgaggcgccctgcatgccgaattcgtatatggtcgtattatgaaacaagaggcagatggtgtaacgcttacccctcaatatgttaggaaatacaagttgggaattggtacccagggttatattttcaacgggaatgagacttataaggaagagctgaagaaagataaaaaaacaggccttccacaaattgttgtcaccgacaagataaaagacgttttggataagatcgttgatagcggtattcgcaagcgtattctggaacgcctgaacagaggctttgaggacggaacagactatcgcacaaacaccgcaaaagctcttgagaacctaaagaaccttgatgaggatcccatctattccgacgatgcaaagactcgtcccatccgaacggttcgcaagtatgtaaattcttctactatggtggctgtacgcaaagatggcaatggaaagcctgtgtcgtttgttgaacctgatggaaatcaccacgttgctttttataaggataaagacggcgttattactgaaagcattgttactaaatggcaggctgtacagcgcaagctaaaacacagacctgtaattgtagataacccaactcaaacctggaatgatttggttggacgaaacgatgtgcctgaagagttgctgcaatcgctccccaaagacaattccgagttcatgttaagtttgcagaaaggcgaagccgtaattctaggacttgaagaagctgcctatcaaaaggctatagatagtaacgatatgcataccttgagtaatcatttgtattttgtgcaaagtgcatcactaagcgattaccgtttccgaaggcatgtagagtcctcttttgataaaatgggtatgaacaaagaagaccaacgcttcctaaatgtcaaaagtattggagcattctttaattataatccacataaggtaaaggtaactattttaggggacataataaaataatattaggcatagaaacaagaaatcccgctcaaaaggcgggatttctgctgtcaatatacaacttttcttatgtgaatattcatatatcatcttgtaattcagacatttgcttaatgtcgttgtatatgatatgattttgtcagttattcacgacgagttcatgaaggccgtgaagcgcaacgtgttgtatatgatatgattttgtcagctattcataacgagttcctcgaggacatcatctactgcccgttgtatatgatatgattttgtcagctattcacaaccaactcaagagttaaagactaaggctgcgagttgtatatgatatgattttgtcagctattcacaacttgatggcatcccgcgctatccagtaatcgttgtatatgatatgattttgtcagctattcacaactggtcgatatgtccagccagagtcgccagagttgtatatgatatgattttgtcagctattcacaactgtacctctgcgcatttatcgcgaggtgtcgttgtatatgatacgattttgtcagctattcacaactaggcaagcccccgacaagttgagaactcgttgtatatgatacgattttgtcagctattcacaataatcttgtctgtttcatattctcgtttaagttgtatatgatacgattctgtcagcaatgtcaaagaactctctgcaaaattatgaaaagtattttaattctccaaataatctacgctaattataatatgtattgtctcttgacaaccctaattccgcaacctgctataaataaatgaagtaactatatttaacaaaagaaagtctccgtcagatgttgaatgatggagatttttttgtatcttcgcaatctggaactataaaactatataaccatgaagaagattattacattactattattgtttgttgcaatatttgcgtttaatggatgtaaaaatactaacataaagcaagtgcaacaagaggtacagaatgatttgaggtataagttatatccaacgcagaacatgtggacgtttttgaaacttgatacaaggacaggaaaaatttggcaagttcaatattctgttgatgatgacaactttcgtggagagattgtgctgaatgatgtcttgctcatcacaagtggagagctgaaggatggacgtttcaatctttatcctacacagaatatttttaacttcattctcttagatcaaatcgatggtaagatgtggcaggttcagtggtccacagaagaagaaaataggggtattatctccttaaatagcaagtaatataaagaaaaggaaatagcaaatgaatgaaacgtagtgtcgggatatttgtgattctgttactcctggtggggtgtgggaagaagaagtaagaaagcggggctttatgggctccgcttttgttttatagtttgtatgtcaatcctccgcggatttcgaaggtgcgtgcactgacgtcggcgaagtcgcggtagtgtgcgtgacgcatgaagtaactgccacgaatgtctaacaacagatggtgcgagaggtaaaggctgaagttggcgttgaacgccagcatgcgggtgttgccggggtcgccctgtgcattggtatagtcgaggtcgaagccttttttgcctatccactcgcggcggtcgtaacccttccatgtgaagatgtggaagtagttggcttcgatgttcatatatcccagtttcttgatgtccatacgtgtctgcacctttgccgagaagccgctacccatgttgtagtcgcgatcctggatgcgcaggtagtcgctgagagaaccgccaaggagtattccgctgaggaacacgcgctgttcgaggttcatgcggttctcgagttgtgggaaacggtaaatgataccgggacctaccgacgctgcctcgctgatgcggtagggtatcaggtcggtgccgtcctttactgcctctgagttgtagaagttgaagtgctggaagatgccgaagacggactcaaacttgtcggtgtcgcttattggcgttccccagatacgtcccatgaggttaagacggtttaccagcggctggttctttgagaagccgaaggtaacgttggacgtgaagtacgagaacggcttgtttatgtcggtgttatatgcgttgccgtactccattcccagttccagatagggattgtgttccccgcggaagaaagcgttgtcgtcggcaagatagcggttacccacggagatgctgtagcttataggtatcttgttgtagtcgtggtacaggtagttgcggctcttcaccttccatgcctcgccggtgagcacacgcttgaatcccttcataggagaaacgatagctcctcccaactcgcgcaggaaacggctgaatcccatctcgcggtcgtcgtagaacaggtcgcttatgcggaacgttatttcgccgatacatgttccgcctacagacgtcgccatgaggtcgttgatggcgggcggcgttatctcgccgaagaactcccacatgagagaaccggctacggcgcaggggaatgcctcgtagtagctgagtccgttggcacgtgccgagttaaagtaaaggttgccgtgataggggtgggcaaaaaggttggtgttgaagttgtcgttgtcccacacgaaggcatgcttgaaattgttcttgacggagtggatgcttatcttggcgaagtcttcgcgtagcacccatgcgtcaaagcgctgtacgaaggcgttgacggtgaaaatcatagcccccgtgcgccaccagtttttcttctgtggcaacgcaaaacggctctcgtcgccttctgtcatgtcggcttcggtgtgaagatgaaagtcggtgtccttatgaccgctatatccgccgtagttgtaagtcagtcctacttcgccaatcatcctgttgcggtagtgttttctgtggctgtaatagtgtgtacttccgtagcctacagagccgaagacgccccagtgcttgttcagctgatagtccatgttgatacgtgcttccaacgagtacagacgttccggggagtccgtagagttgcgctggaatgtctccacgtgggcaaagccgacgtcgccgctgagtgagagtttcggcgtaagctggaaatactgtcctatgcggtagtacagcgaccccgagaatttgctgtcgagtcccatatagtgcgttcccacacctattatgttgtacgtcgagcggttacggaaacgcaaggctaagtttatcttcgagttagtgccgccgaaagccatgatgtcaatgcgtgtcctggggctgatgtttataagtccgaaccgcttcgtgatactgtcgcgcgagaaattgacaaaacctatctgaacaccgctcctgtaatcgtgagcgataaagttgaagagacctaactggacgcctcgcagagtgtctgtctggttgcggaaggcaagctgtaaaccactcatggtgccgaaggtctggttggtgaaaccgctgagctgcacgccttttgcaccgccgatagcgatgttgttaagagctgacagctggacaccttccatgccgttataccccacattactgaatactgccaactgcacaccggaagagtgctcggcaatgtttgagattggcgacagctgaactccttttaccgagtcgttgatggagataactcccagccctacgttggaactgctcttctgtgcgtgagcgctcatgactgccgtcagggtgacaataatagttagtagtcttttcataatgtaggtgttttgtgtcttaattgttacgcaagcgtagcggttctctcgtgtgcgtacatcctctttatatgctcagttcgttgagcacttttatcatagtcttatcgactctcttctcttcggtgcgtatgcagtactcgaaaggaacgaggacggcctctccgttgcgatagcctatcattacgttgcgctgaccagtcttgagagcctctatggcagcacaacccatccaactggcgaggacgcggtcgcgggcagtgggggagcctccacgttgcaagtgaccgagtatagacacgcggacgtcgaattcggggaactcgttccttacgcggtcggcataatagagcgcaccgcacttaggactctcggaaacgatgacgatgcacgacttcttcgacttacgtatgccgcgggtaaggaactccttcagctgatccacatcggtcatctcctcggggatgatggcagcttcggcaccgcaggcaatggcggagttctgcgccaggaaaccggcgtcgcgtcccatcacctcaacgaagaatatccgttcgtgagagttggctgtatcgcgaatgcggtccacacactccacgatggtgttcatcgtagtgtcgtagcctatggtgtcgtcggtgccggcaacgtcgttgtcgatggtgcctggaagtcctacaacggggaagttgaactccatgccgaagttgcgggcaccggttagtgagccgttgccaccgataacgacgagggcgtcaataccttccttgacacatgtgtcgtaggctttcttcattccctccatagtcataaactccttgctgcgggcagtcttcaggatagtaccgcccctgtttatgatgccgctgacatcttccgtggtaaatgtcttcacctcgtcgtgaataagaccttcgtaaccacgataaatacccttaacggtaaatccgttgcatatagccgaacgcgtgacggcgcggatagccgcattcataccaggagcatcaccaccggatgtcagaattcctatagtcttaatcttgttcatttgttatattatgtttaatgtttttgataattgttattttcattatgcaaagtaacaaaaatataacgaaatgagcaaataaaacaataattttgtttatagaaattttacaccaaagggtgtaagggtgttgcaaaaagtcctacagcctttgagactatttttttagtatagtaaatacggtgttgatgatttcctcttcgtcgttaggtgagaaccaccgtgtttgtgggtcgcgcttaaaccatgtgagttgcttgcgacagtactggcgtgtgttgcctttgatacgttcaatggcttccggaaggctccactcgccgtcgaagtaacggaataactctttgtagcctacggtgttaagtgcgttcaggtgacgtaaaggataaagtgctctggcttcttcgacgagtccgttgtcaaccatcttgtcaacgcggaggttaatgcggtcgtacagttcttcgcgaggacgtgtgagtgctatctttataatgttgaaaggacgttctttcttagtgttggtgcggaaggaggtataggtcttgcccgtctggtggcatatctcgagggcgtggatgacccggcgtggattgttgcggtcaacgacttcgtagtgctcggggtcgagttggcggagctcttctaccaaggctggtagcccttcttctgcatagcgacgtttcatctcctcgcggatgtcgtcgcgaatggtggggatgtcgtcaatgccgttgcatacggcatctatgtacatcatagagccgccggtcaataacgaaagcctctccccagacccctccccaagcagtttcatgacgtcctgctcgtacatcgaagcactgtaataatcggttatggagtgggtcccgacaaagtggtgtttcacacgcgcctgttgctctgccgtaggagcggcggtgcctatgggtatctcgcggaatatctggcgcgagtcggcgttgatgatatccgtatgaaaacgttcggcaagacgaatgcatagttccgtcttgccgacacctgttggtcctgttataacgacgagcgtttggctcataataacattctatcttattataccgcgctttgaggactccacgaagtcgatgatatactgaacttccggaattatttccatgttcttcttaatctcttcgatgccttcctttatgagtcccttagagtagagcagtgagtaggctttgtcgatagcatggatggtatcgttagagaagccgcgacgacgcagtccgatgaggttgacaccggcgaaacgtataggctccttgcctgcgataacgtagggcggaatgtcctgactggtgcggctgccgccctggaacattccgtagccaccgacgcgacagaactggtggaagagacaggtggctgagatgatggcgcagtcgtcaacaatcacctcgccggcaagtttcgtggagttaccgatgatacagccgttgccaacgacacagtcgtgagcaatgtgcatattctccatgaggaggttgttgttgcctacaacggtcttgcccttgctggcagtaccgcgtgagatggttacattctcgcggatgctgttgttgtcgccaatctcagctgtggtctcctcgcccttgaacttcaggtcctggggctttgtggctatgctgcagcctgggaagaactcgttgttgttgcctatgcgtgcaccatagtttatggttacgctgttctgaaggacgttattgtcgcccatcaccgtgttgcggtcgatgtagcagaacggtcctatgatattattgtctccaagtttggcctcggggtgaacgaaggccatagggcttatttgattcatctttgtaatctactattttactatttacgatttacgatttatttacgatttgacgattttttcgaacaagttctcaaggaactcctatttatttacggtttagctatttgttctttacgatttgtgcagtaaatgtagcttcgctgacgatggtgtcgccaacgaacatatatcccttcatagagcttacgccgtgacgaacaggagcaaggagttctaccttgaagagcagggtgtctccgggaaccaccttctggcggaacttgacgttgtctatcttcatgaagtaagtactccagcgctcgggctcctcgagagagttcagtacgagcagtcctccgcactgtgccatagcctcaatctgcagcactcccggcattaccggttcctcggggaagtgtccggtaaagaaaggctcgttgctggtgatgttcttcagtcctacgatgctgttaggtccaatagagatgaccttatcgacgagctgcataggatagcggtgtggaagcagttcgcggatgcggtttacgtccattaccggcgcctcgttaggatcgtagaagggtgcctgcacctcgtgcttgcgtatctccttgcgcataagtcgcgcgaacttgttgtttacggtatgtcccggtcgtgtagctacgatgcgcccctttataggtttgccgatgagagccatatcgccgatgatgtcgagcagtttatgacgtgtgcactcgttgtcccagacaagtggcttgtgctgtatgtatcccagtttcgtggcgtccatgcgcggtactccgaggaggtcggcaagtttgtcgagcttgtcctgttccagttgtcgttcgtagataacgatggcgttgtccatatcgccgcccttgataaggttggcgctgagcagaggctctatgtcgcgaacgaatacgaaggttcgtgccgcagcgatatcggtagcaaacttatccatattgtcaagggtagcaaactgactgcttatgaacttcgagtcgaaggagcacatcgcagtaattgagaagtcgtcgtcggggaggatggtgatgcaggatcctgtcttgtcatccttgatctccatcttgtgacgaatgacgtaatagtccttcggagcattctgttcaacagttcctatctcctgaattttctcaacatagtttttagaagagccgtcgaggatagggaactccggaccgttgacctgtataagacagttgtcgatgcctaaggcgtagagcgccgccataccgtgttctaccgttgacacgcggacgtcgcccttggcgagaacggttcctcgttgtgtgtcaacgacgttctcggcaacggcatcgatgacgggttcgccttcaaggtcgatacgctgaatcttgtaaccggtattctccggagcgggattaaaagtgacggtgatgctaagtcccgtatgcagtcccttgccaaacagtgagaaactgcctttgagagtcgtttgtttcatcatatcgctatttctttttaagttcttctacttctttgcgcaatgcgctcagttccttatacatgtcgggcagacgacgaaggattgccatacccttgaaatataccttcgggtccatagctggtgatcctatgagctgttcgccgttacccttagtgtcaccgatgacaccacactgggcacccacgaaggtcttgtcggcaacgtggatgtgaccggcgaaaccagcctgaccgccagccatacaccatgaacctatcttggtgcttcctgccagtcctacctgtgctgacatgacggtattttcgcctacctcgcagttgtgggctatctgcaccaggttgtccagtttcacacccttgtgaagaacggtactgcccattgtagagcggtcaacacaggtgttggcaccaatttctacgtcgtcctcaatgatgacgttacctatctgcggtatcttgtcgtatttgtcggtgttaggagcgaaaccgaagccgtcggcaccgatgacggcgccggaatggatggttacgcggttgcctatcttacagccgtgataaatagtaacgtgggggttaatggtacagccctctccaatctctacgttgtcgccaacgtaagcaaaaggacctatgtaggtgtccttgccaatctttgcggtaggcgaaacgaaagcaagagagtcgatacctgtcttacgcggcatcatgctctggtagagctgtagtagtttggctacacattcgtaggcattagcaacgcggatgagagtagccttaactggtttctcaagttctacatcttcgtttacaaggactatgctcgattctgtatcgtagagatagtgcgtatatttgggatttgagaggaacgagatagctcccggctttccttcctcaatctttgcgaaggtgttgatggtggcattttcgtcgccttcaacacgtccctgaataaattctgcgatttgttttgctgtaaattccatggtttataatatattttgtgggcaaagatacgaattatttcttacattcgttgataacagaggtaatatttgcgtattttttttgaaagaagctctacattaagtatttccgacgcctccgcaatgtcctttagggtgttgtccttgttgagtattgagatgtggtcgtcgtgaatgtcgtacatatctttctgaatggtgttgagactaatgaggaaccacgcgtcgtcggttgttatgccgaaatgttctgccaactccttgcgaagttctgctatccgttcgtcgctgacctcttcatcgtgtatctccacgcggaagggacgacgttctatcaggtcgttagagagtagcgcaagtactttgtcatcgctgtctttccatacttttacggcactccaaatatcgttgtcgtcgaggttcacatagtgcttcaatgcttctgagtcggtatggaaatgagccgcatcgacatcgttgtacaggaaatagtgaagggcaggggaggcgaagagttccacaccctcgctggcgagtttcttggcgcgcagtagggcatttacaagcaccttttcgcacgcaacggtggtcttgtgcagatatacctgccaatacatcagtcgtcgcgaggtaaggtagttctctatggaatagatgcctttatagtctataaccagctggtcgtcaacgacattgagcatctttattattcgtgctgacccgatgtttccctcggtgacacccgtgaagaaggagtcgcgacgcagatagtccagacggtccatatcgagctgtgaagagataagctggtggaggaagcgcttgggatattcgtcgcggaaaatctttatggcgagggtaagctctccacccatctctttgtt

SEQ ID NO: 3404 - DNA, 15724 bp, synthetic construct
  source 1..15724: mol_type = other DNA
  misc_feature 1..15724: note = Synthetic
cgaccagttccgcgacggcgccgagcagaacgacgacctcaccatgctcgccttccgcatcaccaacagacaatagaactcatccaatgcaaaaaaaaaaaataatatgagaaagaacgggtcaccagcaaaaccctgtgtcctttcaagtttgtcttcttcctgccattttacaggtagtggaaaaagcattcagggtcagcaaagggaatctggagatgcgccccatattccacttcacagaacggaggatagaggcacacatctgtatctgcttcgtggcatacaaggtttataaggaactggaacgcgtcatcagacatgccggcattgacatgagtgtggacaaagtcctggatattgccaagaccatcatcaccatcgatgtcaggacagatggagtgcatggggtgtcaaagcgaacgctgtttctcacggaagagcagaaagccatcaagcaattgttcgaaatggataccacaaaaggtgattagggtgacgcatcgacgaagtcaggagaagtacgggctcctgtatggctatgaatagcggcagataaaagaactattgcactttcaatttgaattcgcatagggtttaagaacgttaaatacgttgttgattatcaacatttaaaatattctggggttgtagtagtctagaatctattattatacccaaaagcgttacctctatggatacagaaagtgcagaatccgaagcgaatttatttgggttctgtagcaatttacaatcaataattgtagaagaggggaatcctgtttatgattcaagggataattgcaatgctattataaaaaggaataataattgtcttgttgcaagttgccaaaatacatctattcctaacactgttacttcgataggaattaatgctttccgaggatgcagcggattgaagtcaatatcaatacccaatagcgtaacctctataggtcatgaggcatttagggagtgtcgtgatttggaatcactattaatttctaatagcgttgtcacaataggaatggatgcgtttgatgaatgtgagagtcttgcgtctattatagtcgaagaacataatccagtatacgattctcgtaacaattgtaatgctatcattgaaacaaataataagttgcttttattaggttgtaaaaatactattattcctaaggatattacaactataggagatttcgccttttatagctgttttggattgacttcaatagaaattcccgataatataattaaaattggcggtggggcattctgtggttgtaatggtctcacaacattaactatccctaatagtgttacaacaatagagagtaatgcttttggttcctgctcgggattgagatatattattttacctaaaagtattaataaaatctctgcgtctgcatttgcttggtgtacaaatcttatagatatatattgttatgcagaaacagttcctaaaacatcaagttatgcatttgagaattgtaataatgaaaatgttatacttcatgtaccagaaactagcataattttatatagtgagaataatccttggaaaaattttaagagcatagttgctttgacagcatcagacccgcaaccaacggggatcagaaatataaaagaattattagatgacaataaaatcatatatgccctaaacggtgttcgcttgtcggagcccaataaaggtctgaacatcatccgtacaaaagacggaaagaccaagaaggttatattaaaataagttttagttcaaggtattatgacagtggttctgatatataatataagaaccgttaccatgtttttccatactgcccccagcttttgcttttgctaggattgggtgaagattggcaagagcagttcacacaatgataaaagtatggtgagccaatgggcatacacaagggcgagttgccccgccctaaatgttttcacaacggaataatccttattgtgaatagctgacttaatcagtatctggcagcaaaggtaggaaataaaatcgaaacatacaaataaatcgatataaaaatgaagaaagttcttggtttggatcttggtgtaggtagtataggatggtgcctcatagaaaaagatgataataataccccaaaacgtattatacgaatgggaagccgtattgtccccatcagttctgacgaggaaacaggttataccaaagggaatgcagtaagcaagaatgccgaccgtacagccaagagaacggcaagaaagtgctatgacagataccaactcagacgtcaggctcttgtaaatctgctcaaacgacttggaatggagccaaataagaaactcatgcttgagcagacaccaatggaactatggcagaaacgtgctgatgctgcttccaaagagatatctttagaagaacttggcagagtgcttcttcatatcaaccaaaagcgtggttacaaacattcacgtcttagtaattcggatagtaaagaaacggcttatgttcaagaagtcaatagtcattacgatgatctgaaagcagaaggtctgacggttggacaacattttgctgccaaactgaaagagaacgagcagaaatccgttgatggcaaaaagtattataactatcgaatcaaggaacaggtatatcctcgacatgcctatgaagaggaagcgaaaaagatattggaggtacaaagccgataccattctgaggtattgacgccagacgtttgtaaggagatgatggatattatcttctatcaacgtgacctgaaatcctgtaagaatcttgtttcattctgcgagtttgagtcttacaccattacaagagacgggaaaaaaataactatcggtcctaaggttgcgccaagaacctctccgttggcacaattatccagcatccttgagacagcaaataatatcactattcgtaacaaaaggaacgatgaactgtatatttctccagagcaaaaaaaggcaatagcagatttccttgataatcatgaggtaatgaagttgacagacctctataagatactgaacatcggcaggaaaaatggatggtgggcaggaaaggctatcggtaaaggtctgaaaggaaacacaaccaagtgtcagatccgtgaagctctaagtacccttcctaaagaacaagtagattcaatcacagccttccagttggaatttgacgagtatgtggatgaaggaactggtgaggtacgcaagagaatcaataatactctagcagaacaacaacccttgtacaagttatggcacatgctttattccataaaagataatacagagttgtctggagcattacaacatttagggataaaagataaagagagcatagaaaaactctgcaaacttgattttcgtactgctgggtatgccagcaagtctgcaaaggctattggtcgtatcctaccgtacttgatggagggcgtgatgtatagtgaagcatgtgaaagagcaggcttagaccactctaggagaatagatcctaatcgctctctgctcacacaccttcctcaaatccagaagaacgagctcagacagccagtggttgaaaagatactcaatcaattggtcaatattgtaaacgcactccttgagaaggaggggactattgatgaaattcgtgtggagctagcaagagagttgaagcaaagcaaagatgagcgcaacgaggctttcaaacgtaacaaccaaaacgaaagaaaaaatagagaatatgcagaacgtataaaagagtatggcctcacgcccacaagaaaccgtattatgaagatgaaaatgtgggaagaaagtgaatacacctgtatgtattgcggacagcctgttaatgtgacagaattcctaaaaggagccgatgttgaacgagagcacattatccctagaggattgcttttcgataacagttttaccaatcaggtttgttcatgtcgacgttgtaatagcaaaaagggaatgcgaactgcttatgactttattgctgacgataaaggtctggaaggattaaatgtctatatagaccgcatcaatgacctatttgacaaaaagaagattagtcgcagtaaattgaatcgtcttttagtctctcataaagcctatatcagcagaaaagctcatggcaaggaaactgaagaagacaaagagctatgggaaaacttcatagaccgtcaactgcgacaaagccagtatattgccaaaaaatctgtagagatgcttcagcaagtatgcaagaacgtttataccaccagtggtagcgtaaccgattttgtgcgtcatcagtggggatatgacgaacttctgcacgatttgaactttgaacgctttaagaaagctggtcttactgcgatggtgaaacaattgcattctggcgaggaggtagaggtggaacgcatcgcaaattggacaaagcgacttgataatcggcatcatgcggtggatgcacttgccatagcttgcactactcaaagcatgatacaacgccttaacaccctcaatgccagtcgcgatgacatgctcgaagaactaaatagcaaagatcagcgtttagttgatccagagcgaagcatgctggagaaatgggtatttatccaacctcacatctcttacgcagatgcgaaaagtgagatagataagatcatcatctctcaacgaccaaatacacgcgtcactgttcctggcaaacgatatgtaactaaaaacggcaaacggactttggcacagacgggcatcattgtaccacgaggtgccttgcatgccgaatttgtatatggccgtattatgaagcaagaagccgatggtgtgacgatgacgccccagtacgtaagaaaatacaaattgggcatcggtgctcaggggtttctgttcaatggaaaggagttctataaggaagaattaaagaaggattccaagactggactttcaaagattgtagtaacagacaagataaaggatgtcttagagaaaattgtggatggtggaatacggcagcgtatattggagcgattgaatagaggtttcgaagagggcacagattatcgtgctaacgtagcgcaagcccttgctaacctcaaaaaccttgatgaagatcccatctattcagatgatgccaagactcgccccatccgcaccgttcgcaaatatgtcagttcttccacaatggtggcagcacgcaaagacgataaagggaaacccgttgcttttgtagagcctgatggtaatcatcatgtagccttttacaaagacgaaaatggtgtgataatcgaaactatagtcaccaaatggcaagctgtacaacgtaaattgcatcatatacctattattattgataacccatcacaaacttggaacgaggtcttgggaaggaacgatgttcctgatgaactacttcaatcactccccaaggacagttccacattcctccttagtttgcagattggagaagctttcatcatgggaatggaagaaatagactatcaaagagccttagaggaaaaggatgtgcagtcattatctgagcatctctattttgtgcagaacatctcatcaaacaactatcgtcttcgccgccatgtggagtcttcgtttgatactactgatatgaataaagaagatcaaagattcttgaatatcaaaagtataggctcattctttaatagcaacccgcacaaagtaaagataactattttaggtgatattatcgcagatgtatagaaaaaagaaatcccgtctattgagcgggatttcgtctatcataatacaactttcttttgtgaattatcgtttattgagctgtaaaacagagacttaatagtcacctgttgtatatgatacgattttgtcagctattcacaacaactgcagcctgcacttgtaccagcggtcggttgtatatgatacgattttgtcagctattcacaacagccagcagtcctttgccttgcggtcgcgcgttgtatatgatacgatttttcagctattcacaactgtgctcgcctacccttaaatatttactatgttgtatatgatacgattttgtcagctattcacaacatatcttgtttgttttacactccatttttgttgtatatgatacgattttgttagccatttcaaagaacgatggtgcaaagataagcattatgattgctttttcaaaataatctaagcactttttacgttagttttcctaatatcatttggaattctcattatttttctgtaaatttgcacttaaaatacacaaagtgttattatagaatcacggggacggttcttgtgatcatttcaaaataattgattatctttgcaagcgaaatatgacgaaagaagaattacagaagattatagccatagacgagggattccggattgaattgaccacgtctaaaagtgacatggataaattccaggaggctatctgtgcttttgcaaacgacatgccaggctctggaaagaaggggtatcttctaattggcgtatatgacgatggtaaaattagtggaatgaaagttgatgatgccctaatgaaacgcatcagtggcattcgttctgatggcaacattctgcctctccccgttatgactacagagaaggtgcagacggatgaaggtgatgtattggttgtggaggttactccatcattcgatacacctgtacgctatcgaggtaggacgttcatcaggattgggccacgtcgtgacatcgccagtgctgaagaagagagaatccttgcggaacgttgtgctgcaagtctgccaacatacgacacaagaccttgtcgtgaagcgactttagatgatattgatatagatacaatcatcaaagagtatctacctaaggccatcgatgcagaaacgttggctacagataaacgtccactcaatgaacagttagcatcccttcgcctgttcaatatgcaatgggactgtccgacgtatgcagcattgattatgtttggaaagaatcccagatacttcatgcctggagcctatatacaattcgttcgctttaagggcgagacaaacggaggtgaaatactgaatgaacgtcgctttgagggatgcctatacaagatcctgccactattggagaacttcatccgcgatggcattgtgaccaagcggcctgttcccatcagtattctgagagaaaaggacgtgcagaactatccatacaaggtactgcgcgaattgatgatgaatgctatgatgcatcgtgactatcaggcaaacatgcctactcgcctctatcaatatgaccatcacatagaaatcatgaatcctggtggtctgtatggtcaggctcgtcctgagaacttccctcatgtgaatgactatcggaatagtgttgtagcagagatgatgaagaacctgaactacgtcaacatgttcaatcatggtgtaagtgaggtgcaaggcttgctgaaagaaaatcaaagtcctgctgccgagttcaatgtcaatcttgtaacggctttcagtgtcgtcgttcgtgaaccagatgccgcagagaccatgcaaaaggatccagacaccatgcaaaagaccatgcataagaccatgcaaaaggatgcaaagagcatacaaaaggccatacaaaaggctcttgatgaacgtggaatttcaataacagatttgcaaatggacatcctcgtttatttctatctctatccaaaagcaactcgtaacgactatatatcatctgatgaaaacatttcagaaggcggaacaaagtctaacatttcccgccttcaggaattagaattgcttaaaagaaaaggaggaaagaagaatggagaatggattgtcgctattgatttgagcaatgatgacgatatatgaatcaagaagataaagacatattgttacgattgctccagcaacataaggagctggggatatcagagcagatagactatcagaagttctatcttgattccgtcatcagcaattctgttgctctttctaatctggagccagagcctatagcccctgaaatggtcgataaatggtcgataaagccctctttagcagaaaaactggtcgatattctggaatttgtggccgataaggacgaattcaccacagaacaaatagtcagtcactttggttttaacaccaccactgccaaacggtatcttcgccaacttactgagttcggctacttggaaccacatggaggcaataagaacagaacctatggcaataaaaagtagaaacaaccatcaaaaccaaataacacaattatgaaaaaaaagattttaactatctgtgccatccttctggggagcatcagcatgctgacagcacaagtgaaactacaaactaacaatgttgacgaagtcctgaaggcgatgacacttgaggagaaagcgatgctcgtggtaggcggcaaccgccagattgcaacgagtggtgacaatggtatgataggcggtcatgcccagcgtgtgcctggtgccgctggtgccactcaggcgattcccagactcggtattccctcgacggtcctgacagacggccctgcaggtgtgagaatcagtcccagacgcaacaacgaccagaatacctatttctgcacaggatttcctgtgggcactgccctcgcctgcacctggaacacacaacttgtagaggaagtcggaaaatgcattggcaacgaggtgctggaatatggctgcgacgtgttactcgccccaggcatgaacattcaccgttcgccgctctgtggccgtaacttcgaatactattccgaagatccgtatgtgacaggtaagatagctgctgcctacgtgcgaggtgtgcagagtcagggcgtaggcacctctgtgaagcacttcgcaggcaactcgcaggagaccaatcgtatgggtgtcgacgaaatcatatcacaacgagcccttcgcgagatctacctgaaaggctttgagattgcagtccgcgaggctgctccctggacggtgatgtcatcgtataaccgcatcaacgggcccttcacacaggagaacggcgaactgctcaccaccatcctgcgcgatgaatggggtttcgacggtatcgtgatgaccgactggactggtctgcgtaataccgctgcccagattcaggcaggcaacgacctgatggaaccaggcaacgaatcgcaaatcaaggatattatagataaggtgaagagtggcaccttgaaagaggccgatctcgacatctgcgtgaaacgcatcttgcagtatctcgtcaagacacctgccttccgtaactataaatacaccaacaagcctgacctgaaagcccatgctgaggtgacgcgccgtagtgcgactgagggtatggtgctcctgaagaacgaaggacagacactgccttttgacggttcgaagaccatctccgtgtttggtgtcacagcctacgacttcatcgctggcggtacaggttccggcgacgtgaacaaagcctataccatcgacctgatgcagggacttacggaggcaggattgaaggtgaatcctaaactcgctgatgtctacaagagttatcagaagtaccaagagagtctcactgctgctggtcctgcacgaggcggctggttctggggtaaggcacttcttcctgaaatggctgtcagtcgcacgatcatcaacgcccaggctcaggagtccgacctcgctatcatcaccttaggtcgtcaggctggcgaaggctctgaccgtcaggtggaaggcgacttcaccctcacggatgtggagcgccagcttatcacagacgtctgcaatgctttccatctggccagcaaacccgtagtagtggtgctcaatatgggtaatgtcatcgagacggcttcgtggaaggcgatgcccgatgccatcctccttgcctggcaaccaggacaggaaggcggttattctgtggctgacgtgctgacaggcaaggcctatccttctggcaagctcacgatgacctggcccaacaacctcatcgacctgccctccagcgccagcttcccaaatgtccgcccagtagcagctccccgaatgcgtggaaataatcgtggaaacaacaaggtagagtttcaggattacaccaagcacacagaaggtatcaacgtgggttaccgttatttcaccacgactcaggcatcagtgtcttatcccttcgggttcggcttaggctataccactttctcctatagcaaacccgtagtcaaggccacaaaagacggtctcacagcctcgattaccgtcaccaacacaggtaagagagcaggcaaagaggtcgttcagctttatgtcagtgcgcccgctggtggtctcgaaaagcctgctcgcgaactgaaggcctttgccaagacacgtgaactccagcccaaccagagtgagacactcaccatgaagctctcgctctacgatctggcatcctataatgagactacccaggcatgggagacagctgcgggcaaatacaccatcggctttggcgccaacgtggaggacatccgcgtcacagcgccatacagtctctccaaacagaagacggtaaagtgtcacgacgtgatgaaacccaatatgtagcctatcgcgactgccgttcagggggcatccttgtaacaactggttattctggaagggaaatacccttacgatagccaagaccagtgacgtggcagatgagtcggtcttcctgattggtgacgcgtacttcaacggaggggattttgtgatgatcgcagacgctgacggcttctgcgcgaagacggtcaccctctttggcactcgacacaaacatgatgctgttgctaatgccaacggtgagttgcccttgggcgttcatcaaggctgcgatggccaggtcagctaatgtaaacagggcgcctccctgacagacgtttgccccattcaggtgagttgtcgtcaccaccatttctgccacagcatgctctgtgtccacttccgtaatcttacaacccgcattggctgcaaaacgatccgtacgattcaatagttcttgtatgttcattgtgttgatgattattgtcttgtcagtttgtcagcgtgatgacgacatactccgagcgagtaccgatgcggaacttaccgccccagaggccaataccgctggtaatataatagtgggtgcgacctcgctggtgagggccgaaagcgcactcatagacatgttccgtgatccacgaaatgggccaaacctgtccgtgatgggtatgaccactgagttggaggtcaacctgctgacgctcagcctgatccaaatgatatggctgatgatcgagcaggatgcagtattttgaacggtcggccttcttcatcaggacacccaacgaatcacgtcggaagtttgtacggtcatcgcgtcctatgatgcagagatcgccaatagtgacacaggaatcctgcaacaaccggataccagcatcttgatagaactgtcgcgcacgaggctctccgctataatactcatggttgccaatgcaggcatagaccggtgctttcagtcgtcggaactcctcatgcatttgctgttcgactacaggtcgcatgctaccatcgatgatgtcgcctgcgatgaggatcaggtccggctgctcagcattgaccagatccacccaacggcccaactcgttccgacgattgtgatagccgatatgcaggtcgctcatcgccacaatcttcaagggcttgctgagttgtttttctgtggtcagatgcagctcctcgcgatgcttgtgctgataatgcaggtagccatataggaacaatgcgaacatgccaagggcgatgccaccagctgtccaccagttatgataaagtacgctacgaggcaccaaacggactagtcttccgaggtcgagcaccagaaacagcatgaacagatagagcagaataatgagactcgacgtgccgatctcgtaaacagcaatcgccaaaggcatgggcatacggtcggttgtgcgcataaaacctgcgaacaatagcataaaggcgcctatcataaggagcagaatcaggactttccaaatccaactaagcggcagcaggcaccagacgtgccagccgatataggcgagtgccattaaaggcaagaatgtaaaagtcagcatccacatattgttcttgtgtcaaatattacttcactacaattttcttggccgccgttccctgacggacgacatagatgccaggaggcagattgtcgacactgctgccataaggctgaccagagagtaagaacacctgataaggctgagccatatcgaggcgtaactcattgataccgtttggtttataagtatagccaagttttttgcccatccaggcgatgcgctccttcatgaaagtcttcaccacgtcaacctcagcctggaaactgcctttggcgacaacattctgatgaactttctgattcaagatgggccaacgcaggaaattcaggtgctgcgattgctgaaggacggttgcccaatggtcgatataagtcaacagattctcctcggtgagtcctgactgacgagcctcatcccagatttccagcatctttcgctttgcagcagcatccttgacgacgatattatcgacaaagttcctcatgttaccagcacaactgccaccactccgatatatataatcacttttggtgttgacaggatagatgcgcttgtcgttgtggaaagccagatcgaaatcccacacaggtcccacatgcatcagattctcatcgcgctgcttatacataaacacactccaataggtatctgtgttgccagacaattctcctacgagaaaatgcctgaggaaactgttgaggtcgagataggcagcccaattgttctccatctggttgaagaaattacggatgtactgcttctgattggcagtaatctcatcttcatcaggcgacttgatggtaacgggattacccttgttggaattgaaccacgacttctcctggttcgcataggcatccacctcgatcagatagccacccgtcaaggcactaccctgattgtcttcaggcgtcatctctgtgatagccacacggttcttgtcaatctccacttgatcgcacaattggtagcagcctttatactcgccattgagcaacacatcgacagctgtaccgtagggggtataggacaatcccatgcgtctgctcagttcaaaggctaacaggttgcgcatcaaggtcttatcgccataattattaatcagcgtccatttctttgctttagcaggagcgtcatgcacattctgcttcttatcgaacttgattctataaggcttcttggggaagtcgcgtgaggcattgcctcgctcacgcgtcgctccaggctctgacaacaggttcgtgccgtcgtcggaaatgattgtcagttgggaaacaacctggttcaccttgtcattgggaatctcattgttcaacgtgtggatgctgacggtaggcaggttcgtcacctgatagagatggctatcgtcgcctgcaccaggatggccatagaactcgagttccgcaatgttacaacgagcatcagcaggacctatatatcgaacatagcggaaaccccgtgaacactggacatcagcatacgacatcataccgatcttaccattctcagggatgacatacagcggtagggcatccatgaaatctccgcggttggcaccttcgaagacacccaaaaccacgcgctgttcccccaccccatcgttgcgaggagaccaacccacacgggtaataacatgtgctgaacccaagtcgagtcctgtccaagtgtaactcctgtcataggaggcaaagaaggtatttaagtcgccatcgaaggcattttcacgggtattgacggtgttagacctgtcggagctattctgataattaacggtttctatcgtaccgatgactgtacctttcagcagatcatcaccatagactggcgacagaagcaacatccatgcaatttgtgtacacaacagtttcttaatcatgcgttatcactttcaataaacatcgactcgtccatttcagtcaatgatttcttcttcttattctctctggcaccagccttcagcaagttcttggcagcagtgatgatactggggccactgtcgccagtggtaatcttcagcttcttcatcttcttgacggtgtcgttcatgctcgactccacttccataaagcgtaagccaaagtcctgcacacgatcaatcacggtattggcagcatccatcatagcctgctggttttccaactgtcgcacctgtgtccacatcatctccaacacacgcaggttcatatacatggtctggggaccgagaatcatcacaccctcatcgtaagcctcacgccaaagggtggcatcattcaataaagccaagttcagcgccccctcgattggaacatacatgatggcgaagttcagacggttgtagccctcaggtaagaatttggtatattccttcttggccagacgacgaacctgagccctgacactatcgatatgagctttcaggtaaccgctcttctcgggcgtcccgtcttctgcattcatataacgttcgtaatccgtcagcgacatcttggagtcgaccaccacatggcgattgttggggaagtgcaggatgaagtcaggaaccaaacccttgccgtcatcacccttagcccccttgccggccttatctcttagtgtttcctgagtatcaaactgctcgccctctttcaattccaagtcttcgagcaactgtttgagtttcagttcaccgaagtttccttgtatcttcacctcacccgtcaaagcgcgcgtcagacggtcggccgtctctccaatctccgcacttttctgcatattaattttgatagtctcatccagccgcgtgagggcttccgtctgctgttccttggtcttgtcaagcgcctcctgcatatccttcaagctcttctggagaggatcgataatcttcgacacctgttccttgttttcctcgccgagctcggcctgacgctgcttgagcaccttttccgaagtggtctgcatctgctccctgataagttcgagctggtttttaatttgctgctcgttcatctctttcagagccttgatctgcccctcatgaacagttttctcttgcaggagttgttgggtgaatgtttctttcaactcttgcatctgactgtcgtaagcaatttttcgttcgttcatctgctcttcgtaggaagccttctgcgtctcgatctgtttcgtaaggttctctacattcgtcttctgaacgtctcgctccgccgtcagtttgatgacgttgtcgattaagcccttctttccacggtttccgacaaaatagccgaggaccgtcatcacaatgatggctatgatggttataatcagatatatttccataattctataattatcaggtggcaaaggtacgatttttaattgatttttcttcacttttcactttttttcgtacttttgtagccgaatgaaaaaagtcaagaacagcgaattgctgctctcctatatccgagaggggaaaatgatgacacagagtgaaaagctttggctcatcatcagtcttagtattccctcgattctagcgcagatttcagcaacagtgatgttcttcattgatgcctctatggtgggacatttgggcgcgaaggcttcagcagctatcggactggtagagaccacaggctggctggtgggcggactg

SEQ ID NO: 3405 - DNA, 10128 bp, synthetic construct
  source 1..10128: mol_type = other DNA
  misc_feature 1..10128: note = Synthetic
cagcgaattggaaactatccaaaggatgcttgacagcgagaaccatttggtgcttatcagcccgcgtaggtttggcaaatcaagccttgtggctaaggctgtgaaagcatcagggcgtccttccatatcgctcaatctgcaaaacatgctcagtattgaggattttgcatcaaaaatcctgcgtgggcttttccgtctgtatccattagagcgtatcaagcatttaatgacgcatttcaggattgtcccaacaatatctaccaatcccattactaatggtattgatgtgtcattccagcctgttattaatggtatggtccttttggaagatgcaatggctctgctcgaaaaggtgagtacggaggacaagaagttgattgttgtcttcgatgaatttcaggagattatgaatattcgcaagggactggataagcagctacgctccatcatgcaagagcagcagcacttgaactatattctgttgggtagccaagagtctatgatgacagagattttcgagcgaaaaaaatctcctttctatcattttggaaagttgatgcatctgaataaaatcccttatgaggacttcagagcctacgtcgcagagcgattgcccttgaagaaagaagaacctttgaacaccattgtcgatgagattctctcttttacaggtcttcatccttattacacccagcaattgagcgctcaggtttgggagataatgacctatgaccagcatttcgacaatgttgtcgatgaagctatcagtgccatcgtacagactcacgatttggactttgaacgtctttggctcagttttaatcgaacggaccgcttcaaatcgtcaaatggccacaagtacaacattcagcgccatcaaacgtctgatgaaggctggttatgtgatacgcgtagaggattatgagatagaagatccattcttcaaggcttggattataaagatgtgcatatagaaaatgaataacgatatgaacaacaaagaaccaggttacgtttatatactgactcgcttgacctcaggtcgcttgcatacttgcaagaaccccagctttcgcgaggattgggtgaagattggcaaaagcagttctcacagtgataggggtgtagtgagctaatgggcatacaaaagggcgagttgccccgccctaaatgttttcacaacggaataatccttattgtgaatagctgactaaatcagtatctgggtgcaaagatagataataaaaatgaaacggacaaataaatcgagataaaatgaagaaagttcttggtttggatcttggtgtaggtagcatcggatggtgcctcatagagaaagatgataataatgttccaaagcgtattttgcgaattggaagccgtattgtgccaattagttcagacgaggaaacgggttataccaaaggaaatgcgattagcaagaatgccgaccgtacagccaaaagaacagcaaggaagtgctatgacagataccaactcaggcgccaggctcttgttaatctgctcaaacggcttagaatggagccaaacaagaatctcatgcttgaacagacaccaatggagctatggcagaaacgtgctgatgcagcatcgaaggaaatatcattagaagaacttggcagggtgcttcttcatatcaaccagaagcgtggttacaagcattcacgtctcagtaattcagacagcaaagaaacagcttacgttcaagaagtcaacagtcgttacgatgatctgaaagcagaagggctgacaataggtcaacattttgcagccaaactaaaggagaatgagcaagaatctactgacggaaaaaagtattataactatcgaatcaaggaacaggtttatcctcgacatcatattgacgccagacgtttgtaaggaaatgatggatattatattctatcagcgcgacctgaaatcctgtaagaatcttgtttcattctgcgaatttgagtcttacgccatcacaaaagatgggaaacaaataactatcggtcctaaagtggcaccaagaacctctccattggctcaattatccagcattctagagacggcaaataatatcacaattcgtaacaaaagaaacgatgaactgtatatttcgccagagcaaagaaaggcaatcgctgattttcttgataatcacgacataatgaagctgacagacctctataagattctgaacatcggcaggaaagatggatggtgggcaggaaaggctataggcaaaggtctgaaagggaacataaccaaatgtcagattcgtgaagctctaagtgcccttcctaaagaacaagtagattcactcatagcgttccagttggaatttgacgagtatgtggatgaagaaactggtgaggtacgcaagagaatcaataatactctagcagaacaacaacctttgtacaagttgtggcacatgctttattctataaaagataatacagagctgtctggagctttacaccatttaggaatagaagataatgagagcatagaaaaactctgcaaacttgatttccgtactgctgggtatgccagcaagtcggcaaaggctataggccgtatcctaccatatttgatggagggtgtgatgtatagtgaagcatgtgaaagggcaggtttagaccactctagaagaatagatcccaatcgccctctgctcaaacaccttccccaaatccagaagaacgagcttaggcagccagtggttgaaaagatactcaatcaattggtcaatattgttaatgcactccttgagaaagagggggctattgatgaaattcgtgtagagctcgccagagagctgaagcaaagcaaagatgagcgcaacgaaacgttcaaacgtaataatcagaacgaaaagcagaataaagaatatgcagaacgtatcaagaaatatggccttactcctacgcgaaatcgtatcatgaaactgaagatgtgggaagagagtgaacatgcttgtatgtactgtgaacaacctgttgatcccatagaattcctgaagggagctgatgttgaacgagagcacattatccccagaggtcttctcttcgataatagttttactaatcaggtttgttcatgtcgccgttgcaacagcaagaaaggtatgcgaactgcttatgactttattgctgacgataaaggtcaggaaggactgaatgcctatatagagcatatcaatgacctattcgacaaaaagaagatcagtcgcagcaaattgaatcgtctattggtctctcataaagcctatatcagcagaaaagctcaaggcaaggaaacagaagaagacaaagaactatgggaaaactttatagaccgtcaactgcgcctaagccagtatattgctaaaaaatctgtagagatgcttcagcaggtatgcaaaaatgtctttgccacaagtggtagcgtaaccgattttgtacgccatcagtggggatatgatgaacttctgcacgatttgaactttgaacgctttaagaaagcagggcttactgagatggtaaaacaattgcattcaggagaagaggtagaggtggaacgcatcgcaaattggacaaagcgacttgataatcggcatcatgctgtggatgcacttgccatagcttgcactactcaaagcatgatacaacgccttaacacactcaatgccagtcgagatgacatgctcgaagaactaaatagcaaagatcagcgtttagttgatacagagcgaagtatgctggagaaatgggtatttatccagcctcacatcacttatgctgatgcgaaaaaagagattgataagatcgtaatctctcaacgaccaaatactcgcatcactgttcctggcaaacgctatgttgccaaaaacggcaaacggactttggcgcagacgggcattattgttccacgaggagccttgcatgccgaatttgtttatggtcgtattatgaaacaagaaactgacggtgtgacgatgacaccccaatacgtaagaaaatacaaattaggcatcggtgctcagggtttcctattcaatggaaaggagttttataaggaagaattaaagaaagattccaagactggactttcaaagattgttgtaacagacaagataaaggatgttttagagaaaattgtggatggtggaatacggcagcgtatcttgaagcgactgaatagaggatttgaagagggcacagattatcgggcaaacgtagcgcaagcccttgctaatctcaaaaaccttgataaggatcctatctattctgatgatgccaagactcgccccatccgcaccgttcgcaaatatgtcagttcttccacaatggtagcggtacgcaaagacgataatgggaaacccgttgctttcgtggaaccagatggaaatcatcatgtagcattttataaagacgaaaatggtgtgataacggaaacaattgtcaccaaatggcaagctgtacaacgcaagctgcatcacatacctattattattgataatccatctcagacatggagtgaagtcttgggaaggaaagacgttcctgaagaactgcttcaatcacttcccaaggacagttccacattcctacttagtttgcagattggagaagctttcatcatggggatggaagatgcagactatggaagagccttagagggaaaggatgtgcagtcattagcagaacatctgtattttgtgcagaacatatcatcaaataactatcgccttcgtcgtcatgtggagtcttcatttgatactactgatatgaataaagaagatcaaagattcttgaatatcaaaagtattggctcattctttaatagcaacccgcacaaagtaaaaataactattttaggtgatattatcgcagatgtatagaaacaagaaatcccgccttttgagcgggatttcgtctatcataatacaactttcttttgtgaatcatcgtttattgagctgtaaaacagaggcttaatagtcacctgttgtatatgatatgattttgtcagctattcacaacgcaatcactccatcgatttggtattatgggttgtatatgatatgattttgtcagctattcacaacctaatcaggttggataggttttttacgtcgttgtatatgatatgattttgccagctattcacaacatggtcttgccacgtccgcagtcgccgatagttgtatatgatatgattttgtcagctattcacaacacaggcttttgtacccagcgaggcggttttgttgtatattatatgattttgtcagctatttcaaagaacgatggtgcaaagataagggaaaaacacataattaccaaattttaagtgaaaatagtcttctcttatcatcttttttgtgtatatttgcaaccacagaacattgattaatgttttgaatatgaatgaagaagggaagttgaattataagcaacagcgtgctaagattgatgcaaactattcaattttggtgtcttttgacattagccaaaacaaagaaattctacttggtgacaaaaaaacacaaaaatgtcgattctgtggcaagtcttatcctatagtaagttttaattctgatgctcatacaataccccatttcattgggaatagaatccttaaatcgttatacgagtgtgataagtgtaatcattacttctcaaaaatggaagagcaatttgatgcttatatgagattcttccatgtattctgtcatgtaagtaagaatggcaaaacagtaaattcttatagatgtaattcaaaatccaatgcaaatattagcgtatcagaagaatggactgacctaaagctttgtgcaggagaagatttgtcagttttagtaaacgaacaagataagactattactgtcaacggtgtgagaagttataatcctttagctgtatataaagctttagtaaaaatggctttaactatcataccagactctgtaacatatgtttttgaagatgctataagatggttaatgcaaccttcaattcctttgtcacatcttaatttgtcaattcgattgtatgagggagtgcatgattttaatggggaatgcatgatttacaaacgtaaggaagatcatattgataatgtaccttgctatttgtttgggctaaagtataacaatttgtttatccagatatctatccccttatgcaaggaggataattctataaaaccaccaatccatgtaccattaattccatgtcaaatggatgcagacaactataggtatttgtatttcttagaagatatgtcttcaaatacaaaagtctctaaggaaaaggtgtcaataacatttgattacgggagttttacatgggataaagaagctcttcaagatttaatggagaacaacaactcgccaataattattctataaaatgtgtcaattaaagattcgtgactgatatagcaaatgtaaaatcgtaaacaatggaaacaaaaatacctcaaacaaagcaagaagcctttgctcagttagacgagatgctgagtgaaaaggtggatgaccctaagaccttccgcgccaagaagcacatccgcggtgtccgcctccattttctcccggaaagctacgaaggcactcaggccctctacgacggcatcacctttgagcgcgacaagtcctctgagtgattactttgtaataactataaatgtatattttatggagcagatagaaagaatcaaagcgatggagcaacatctgaatcgagtttcgcaagctgtgatgagactgtcggcagcactcgatgagtatgccgaagcgcagacggctctccatgaattggagacttattataatagtgatgagtggaaacacgactatgacgacgacgaggcaggtctgatacccaaggacttgaaacgtggcgtgctcagcgaagacgctatctggaatgtgttggaagatagccgcaatctcaattcacgcatggaagaggtgttaaatccatgcggcgacagaggctgactgagaccagcgcctgctcttacaacagattaaggaagagggtaatcattcctgtgttgatgagatcggcaaacatggcaccgatgatggggacgataaggaagggcttgacggtatagcggtatttatagcagacggcactcatgttggccattgcattgggggttgcacctaaaccgaaaccacacattccagcacacaggacggcagcatcataattgcgacctaacaatgggaaggcgacgaaatatgcaaagagtgccatcaacagcacctgagacaccaaaatgacaatcaatgggagcgccaagctctgaagttcccatagcttaagggatatcatggccataccgaggaacatggacaaacagatgttaccaacactgatgattcgctccatatcaagcagtttctctgccttttcccattttccgttttccttgtagttgatgaatcctaatgtgttacgaacgacagcagctaagatcaaggcaccgaaataggtcggaaatgtaacgccagtcttcgcaaacaaccaactcaacagggtgccaccccccatgaccaggagaatgcaataagtagccctcgcatactgctggaactcctgttcgttcgtgctgacacgcttagtacggcctgctggtgaagcctcgggctatcagaccaaaggtggcagcagccatacctaccgttcctgcaccttccagtcccataccttcaagaacgctggcaaatccgcctgccgttccgtgtccgcccgtcatggaaatactgccagctgccatccctatcaaaggatcaacacccatgagcctggtaattcccatcggcattatgttctgcatagcaataatgaacaacagcagaataagcatgatgaccagcagtttgccgcctcgctttaatactttcaggtcgctttggaaaccgacgctggtaaagaatgccagcataaaaacagccttcaatgtatcattgaacgagatttcgatatcaaaccaaccaaataatattaaggtaatcagtgaaaagatgagaccaccgcttacaggcgacggcacacagaatttctgcaggaaagcaacctttcgcgtcaaacccataccgacgagaagtgccagtgcacccactccggcagcttgtatcatatcgagatctatacttgtcatacgttctattttttagttattagaatctatattgcaacttgatattggcagaatgtcggttgatgacggctccgcttaagaagtcgtcaaacatatcatgccattcggctcctacgagccaatgcctgccaaacaatttgttgaccgacaaactgccatacatcgtcgtgccaagccactcacgacggagggttctcttggtgaaatataccagttgcataccaatctcccactggtagggaagatagaaggtgggagcagtgcgaagggtagcatataccttatccttagcgaaatacaggtgagcaccacccgtgagagagaggcatccggttttccaatacgccgaggcattcacttgggcatagttgtcttcaccctcaacaacataatagctggcgtccgtctgcaaagtgaagttcggtttgctataggtatagcccagcttaaactgattgatattccactcttccaactggccctcaataaggagccagtcttgataggagagcgtaatggtgttcaagaacagaatctcgtaagagggattatagtatttacgatagtagcccaactgcaactggttgcgactatttggcacatagatggcacaggcattggtgttatggcgagtgtcggtaaattttctggtattgccctcacccattaacttataaccatagaacatcgtgcggtggccagccgtaaacctccattgtggcagcgtataagtaaactgcaggtagatgtcgttattgaagatactccaactccattctctgtccttttgcgtgctcgtaagatagtcgccctcattgcccaccatcatagacagtcgcttggtaaacaagggggtgttcagttcaacgatatacaatggcagtgtgttggacacccttgggtcgctggaatactgatatccgcccaccaacagcaattccgtccccatatcattaaacgtgtggaaatatcgcgccctgcccatcactttccgggtcatattataaggctgttcaataaattgctgagtgaaaaaagtcagcagtctgttgcggtcgtcaaaccgattggtcatgtgaaacgtcacatagtccttattgccctcctgataacgataagtggcattggcatagatgtcagtactcttgctgccatacagcacattcacagtgccattaccctctttcatcctaccgaatattccctggccctccacgaatccggagagcttgtcgggcatcttcattgtgatatccagcacattaagagtgccgatggtacccttcgccacaccagtgttattacacacttgaatcttgtcgatatccttggccttcatctgagtgagaatcagtctttcgtcgccattcactggtacattgtcgatgcggaggttgtaatcggagatgacatcttcataacccgccatcaggaggtcgggcaccatttgcagcacatccatcagcgtttcttcgccattcagttccatgcgttgcggatagataatggtcctatcggccttcacctcaacgatgggcaacccgtcgtctgcaaacacagcgacagataaaagcaaacaggttatcaatatcatcaactgccgattctttgacatcactagattttactctattaatctaacaaaattaccttagctgctgcattatccattttgggcatagtcatacccacatttgcattgatgtaggtaggatcacatacaacaaatttatgcccatccagcataatatagtcacctttcacctgttcagtgaactcaactgccattgccaagtgccctgggtaatagatgagaattgcctttaatcccaataagtcgcgaaccaatcgtgaaagaagaatagaacgatcttcgcaatcagcataagggtaataaagcgactcttctgcaaagaattcacgatctccaccccacaccttatcatcatattcata

SEQ ID NO: 3406 - DNA, 23135 bp, synthetic construct
  source 1..23135: mol_type = other DNA
  misc_feature 1..23135: note = Synthetic
ttcagagaaacagcattaaatttgtttttgtggtttaaccataaagctgtttttgcgatattcgatcagtccggctttttgcattttggaaagctcgttcgatagtgcgctgcgttctaccatcagataatccgccagttgttggcgattgaaggggatgtcaaacgagtattttccttgtttttgtgcttcatagcatagataagacagcacacgttcacgaatgccttttggcgtgatatgttcgattttcctgactaggctgatgtttttttcggcaatgatgaaaagcagatttttaactagcgactggtgaaatacacagccggcagaacaaactgttaaaatcttgtttacatcaataaaaaggatttcgcttttttgtgcggcgatgacattgacttgcgagtatgaactttgctggcaagcgtatgcttcagcgaaaagttcgccagcttcggcgttttggaggatatggacattgcccagcatgtcgttcttggtaatatgcacacaacccgataaaacgatgccgatggacttgatctcgtcgccaatgcggtagacgtccttgtctttttcataaacagtatgcctagcctttaggcaccctaaaatgctttctatctcggctcttgtcatgcccttaaacaaagggtttactgctaaaatatcatatttattcattattttcactttcgttgtcaaaacaacatatttttcataagttatgatataggctattgaaagtcaataagtaaggggatgaaaatgagcagaaagattattcagatagatgaagaaaaatgcgtcggttgcgggttgtgcgccaatgcctgccaacaaggcgctattgaaatcatcgacggcaaggcgaaactggtgcgggatgactattgtgatgggcttggtaaatgcatgcccaaatgtccggtgggtgctatcagtttttcagaaaaagatgtaattgaaaagaagccgttagcttgtggttgtccggggcaaaatgcccgaccgatagaaagagcggaacagcccccggtgcacgcctgcgaaaatcaggtgtccgagttaaggcaatggccggtgcagattaaactggtgccgacaaatgcgccgtattttcaggacgccgatttgctgattgcggctgattgcactgcttatgcgtatgctaattttcatcataaattcattaaaaacaaaataaccattatcggttgtccaaagttggatatgacggactacaccgaaaaactaacttctatcattgctgagaatgacataaaaagtattacgattgtcagaatggaagttccctgttgtgggggaattgagcaagcagcaacgcaggcactaaagaacagtggcaaatttttgccctggcaggttgtaaccatctctgttgatggccatatattataaatatacaaagaaaggagataactatgttttgttttcaatgtgagcaaactgctcaaggtaaaggctgtacttttgcacaaggtgtctgtggtaaaaaagcagaaactgccgatctgcaagatgatttgacaagtgcgttgattgagttggcagtggctggcaaaaaatcaccggagataaccaatattttggtcgatggcttatttacaaccatcacaaatgtaaactttgatgataatcgtattataaaactagtagaagaagcccgttcactcactccaaaatctgattttaaaatatctgaggtttggaacactgatgaggatatccgcagtctcaaatcccttatcctgttcggtcttaaaggcatggcagcctatgcgcaccatgctcgtattcttggttatcaggatgagaaagtgaataactttttctacgaagcattgcaggcggttgcaagtaagaactccgtagacgagcttttgcctttggttcttaagactggagagattaacttggtttgtatggaattgttggataaagccaataccgaaacttacggtcatccagtgccaaccaaggttacgaccaatatcgaaaaaggcccatttattgtagttaccggacatgatctgcacgatttggaactactgttgaagcaaaccgaaggcaaaggtgtcaatatctacactcatggcgaaatgctgccttgtcacgcttatccgaagctaaaagcctatgcccatttgaagggcaacttcggcacggcttggcagaaccagcagaaagagttcgccgatgttccgggtgcgtttttgttcaccacaaactgtattatgccggtgaaggaaagctatgctgatcgcgtattcacaacctctgttgtggcttatcctaacatggttcatatcggtgcggacaaagatttcacgccggttatcaataaggctctggaattgggcggatattcggaagagcataaaatgaccggaattaacggcggcgatgaattaaccgtcggcttcggacaccacaccgtgctttctgttgctggaactgttattgacgccgttaaaggcggagcattaaggcatatcttcctggttggtggctgtgacggcgccaaacctggccgtaattactacaccgatttcgtaaaacaaaccccgcaggatactatagttctgacacttgcatgcggcaaataccgcttcaacgacttgaacttgggcacactcggcggtttgccaagattgcttgatatggggcaatgtaatgatgcctacagcgcaattaaagtggcggttgaactggctaaagcctttgattgcggcgtaaatgatctgcctctttcattggtgttgtcctggtacgagcaaaaggcagtttgtatccttttgacgctgctgcacttgggtatcaagaatatgcgccttggcccaacactgcctgcttttgttagtccgaacgtgctgaagattctggttgataattatggtatcgctccgattacaacgccggaagaagacttgaaagcgattttgggttaaaaggaaaaattctttcttattatctctattcaagttgacttctctccttttgtaagcgttagtgtgcttacgaaaggagagaaatatggcaataagaaagtatcgtaaaaagatgccagggtcactggaggcgattaaacggatgggagaggcggagctgcaggaattatggggttgttatttctcgggcggggtgccactagcaaaacccttgtggtacaagatcatgtgcgaacagtccagtgtggcgatagagcaaagacatgtcacgcgcctcaatacctacgccaagaccccggatgcatacatcgccaaatcctataaacagaaataccatctgaagcccggctcacagattgaaaagactttcaaaggcaaacagcatctggttatggtctgcccggatggacggtttcgatacaatgcaaaatactataaaactctgtcggcggtggcgtttgatatctgcggacataaggtctcaggcaacgacttcttcgggttaaacaataaaaacggaggactggtcaatgacgaacagaattaattgcgccgtttatacccgtaaatccacggaaaagggtctgggactagagttcaacagcctacataaccaagaagaagcctgtcgaaactacatcttatctcaagcctttaataactgggaatattataaaacctacagcgatggtggtatctcaggtggaatgactgaacgtccggctctgcaacagatgctgagcgacattaaggccggaaaaatacaaaccgtagttgtttacaaagttgaccgcctatcacgctcaatcatggattttcacaatatgatgacagaatttgataagtgtggatgtaattttgtatcaattactcaggcttttgataccagtacctccatgggtaaattaacattaaatatgctgctgtcgtttgcccaatttgagcgagaggtatcatcagaacgtgtccgcgataaacttcatgcccaaaaggctaaaggattatggaccggaggtatgcccaaacttggctatgatgcaatagataaaaaattggttgtaaatgaggcagaagcaagagatgtcaaagacatttttgaaaaatatctggaattttcctcgattcttgatttaacaaaatatctgcgtgacaaaaacatcactcataaaaagtgggaaacggcagatggcaaaaaaaaaggaggagcacccatcggttcatcagcattaagcagactgctccgtgaaaaggtttacatcggatatattgaaaataaaagaacaaaagaagcatttaaaggccagcatcaggcaattatctctaaagaattatttaatgctgtgcaagaaagactagccgccaacaacaatcgtggcgataccccttatacgcaagggacatcactcctccacaataaaattaccgatgcctccggaaacgtttttaccaaccaaaaaagttccaaaaatcagaaacagaaatatcgttattataagctgaaagggctgtatttgcccgccggagatatggagaaaataacctgtgaggtcgtgcggacgtttttagattctgatatgaaaggcttgccggaagccacaaagatgacattcaaacaagtccgatatgacgaaaagctaattcgaccaatgattgacaagatcatctaccacgaaaaccgcctgacatacttcatcaacattgcagatttatcttatctcgagtcattcaaacaagatgctctaaatactgtatcaaaggaactgtccagaagttacatcagcaacgacagtaaattctttatcatcgaaaaacctatattcatcagaaaaggcatagccaccaatcgatacaacggcggcgaaacatccatcctaaccaaaaccgaaaacgctcaaacattgataaaagctctagcatacggctggcggtataagaaattatacgaggccggaaccccagtcgaacatattatgaaacaagaaaaaatagcccaccgcacagtttacaaatacctgaatctagcatacctctccccagccatcatcaaccacatcatggacggcaaagaagaaatttgcttaggcctccaagacctcttcaaaatcgcatcatcctgcactacattcgctgaacaagaacaggcatttttcctcaatatctaagtgaggttgtcattgcagattttaatgtatgtttaatgtcgatttaatgtacccagtgactctgcaaaatagggcattgtatagaaagttcaaaaaatgggctattttggggtaaaaaagagggtataccaaagtcatcccccggtgaaccccgctgtctgcgcggaaaaatatcatgtaaaatcaatgacttagatatggcggagggagagggattcgaaccctcgttaagctttagacctaaacacactttccaggcgtgcgccttcaaccactcggccacccctccattttatagagatagatttttagcccattttctatcaaaggtcaatctttttttgaaaagatactttggtgggcgtagcagggattgaacctgcgaccccttcgatgtgaacgaagtgctctcccgctgagctatacgcccttttcaaaacacgagctaatttagtcttttttttgcctatgtcaattccttttgtttctttttgagaagacaagaaatagattctacttcaaaagaaggcgttatcatctgtgtttttgttatcgtttgatagatttttttataagcttctatttttgaggcacgtgtcaagataagctcttttggagtgtatcgatgtgtttgtttttctcgatttttaacgcgaataagggcttcctccacaggacaatcaataaaaagagcttgtgtttcatagccttgacaagtgagaattttaaaaagttctacatgagcttcattaacgccgctgtgttctaaaaggatgtcacacctcttagtaagagccctatttaggagctcatatcctaaaactctggcagggatttcccaaattttaaaagcctcagaactgcctttttctttgacgtctttttgatagtcagggagggattccataatcttatcaaagctaataaaaacagaattttcgtctttgtttttttggcaataagttgtttttcccgccccaggaatgccactgatttgaattaattttggatttttttgagcaggaatatcttttaaaaaattgtccaaaagagaatcgtattttgaatttttgatcaccgcataatcataaggaataagcgtataaagactaggaatttgttgataaatattcatttaatatcctcaaatagtgtcataaaaaagtacccttaaaggattttttcttccctcagggtatataaaatttttgtctaaaattcaatctttttttaaagaagaagacttgaaattaaaaataaaaccttttatacttccctctaaacttaggaaaagtaggaaaaaatgagtaagattcaagaagttcaaattgataaagctttaagcgaaagatacctagcttatgcgctttcaacaattgtgtcgcggtctcttcctgatgtcagagatggattaaagcctgttcatagacggcttttgtttgcgatgcgtcaattaaaattagaccccaaaggcgggtttaaaaaatgtgcacgtgttgttggagatgtgattggtaagtatcatcctcatggagacgcgtctgtgtatgaagctatggtgcgtttagctcaaagttttgctgtgcgttatcctttggttgaagggcaaggaaactttggaaatattgacggggataaggccgccgctatgcggtatacagaggctagattaacccctgttgcgatggctttaatgcaaggacttgaatccaatgccgttgattttgctttaacctatgatggtcaagaggaagagcctcttcttatgccagcttcttttccgaaccttttagcaaatggatcttcggggattgctgtggggatggcgacaaatattccgcctcataatttatcagaactctgtgatgccttaaaatatttgattaaacatccagaggcctctgtttcggatttggccaaatacattcaagggcctgatttcccaacaggaggaattctgattaattccaaagattcgattatcaagacctatgaaaagggaagaggggtttttcgtgttcgtgccaagtatgaggttgaagaactttctcacgggcaatatcaaattattattaccgaaattccgtatcaagtttcaaaatctgatttaattacaagaattgcaaaacttattttggataagaaaatccagcttctttctgatgttcgagacgaatcagatgaaaatattcggattgtgttagaaccgaaaaacagaacggttgatgtaaaggttttgatggcttatcttttccaacaaacggatctgcaaatcaatttcaacctcaatatgaatgtgattgataaggaaggcacgcctcaagtgatgagcttgaaggaagttttgaaagcctttttagaccactgctttgtccttttaaaacgcaaaagcctttaccggttagataaaattgaacacaggatggaggttcttaaaggctatatcattgcttatctaaatttagatagagtgattgagattatcagaactcaagatgagccaaagccgtttttgatgaaggaattttcccttacagatattcaagcggaagccattttgaatatgaagttgcgttctcttagaaaattggaggaaatggagcttaaaaatgaacataaagccttggaagaagaaaaaaattgcctccaaaagcttcttgcaacacctgatttaatgtggcaaaacattgcccttcaatttaatgaagtcaaaaagctcgcccctgcaaatagcacgcttggagcgcgacgaacacaagttcttgagaccgaatttaaacctattgaagttccgttagaggttcttattgaaaaagaacctatcaccgtgattttatctgaaaaagggtggattaaaacaataaaaggacataatgatgaccctgaaagcttaaaattcaaagaaggggatgagcttcaatgttctttgaaggctcaaacaacagataagattgttttctatggtgacaatggcgttttctatacggtgatggctgataaaattccgtcaggcagaggctatggcgaacctgtgcgtttgagtatggatttaccggaagaagttaatattcttaaaatgtttatttatgaggacgataaagttttctttgttgcctcggaaaaaggaaaaggattctgcgtcaactccaatgatattttggcccaaacccgtgttgggaaaaagattttgaaccttaaaaaaggcgataaagcctttaagattctagaggctgatggcgataccgttgctgttattgggcaaaacaggaaaatgttgatctttggattggatgaagtgccaacgctttccagaggacaaggggttatcttacaaaaatataaggacgggaaactttccgatgttaagattttcaaaaaagaggaaggattaagcttcccctttgggaacggcacgcgaattgaacgcgatttgacaatgtgggaaggccgcagagcaagcgttgggaaaattccccccgttggcttcccccgctccaataaattctcgtaagaaaataaacactttaaaaaataaaaaagaggttggaaacaacctcttttctttttggtagcggaggagggatttgaacccccgacacgcggattatgattccgctgctctaaccaactgagctactccgccacaaaacagaaatcttatacaaataattttttgctctgtcaatctttttttgaagtaaagcttgaaaatggacatccttttcctttatgataagaaaaaatactttttacgaaggagtgtatatgtctgaagtttttatttctagttttgattcaaggctagaagggcgttatcatcaaagttctatggagggagctcctcttgttattcttcttcacccagaaccaaaactgagggaaacgatgaataacaaagttgtttataccctttatcaaacttttgtttctttaggcttttctgttttgcggtttaattttagaggggttggtaagtcaaccggtgaggttaatcctgaggaaaactggcagctttcggatgcgattacggccttagattggattcaagccaagaacttagaatcaaccgtttgttgggttgcaggcgttggtcaaggaagttttgtggggatgcaacttttgatgcgccggccagagctttccggttttgtttcggtttctccgtattcgcatagtgcggattattctttccttgtgccgtgtccagcctcgggcattattgttcaagacgggaaaagcgggccagagattgaggctcaatcacgcactttagcagagcgcttaaatgctcaaaagcatgtgaaagtagactacctttcctttccagaagccgatattcaatatacacattatttgaagcctttgtatgacgcattgaaagaaaaaatcccagaggttttaaagcacaaagcctataaaaataggaagtcttctgttccttttatttaagagaattctcttaagagggttttcctttttaaaagccaaaattttaattgacgaaagattaaaaatagagtagaaaagggacactttgcaatggagagttggcagagtggtaatgcagcggattgctaatccgtcaccgtgaaagcggtgcacaggttcgagtcctgtactctccgccaataaaggcttttctttttgaaaggccttttttattttttaaacttaatttttagacataaaaaaaggggacaatgagaatctattaaagaaacccattggagccccactcaaactttatgattattatagcttcctttccaaatcagacatataaaaatcaaaaatttgattgtctccattctataatctgttaaagttgtagtcaagtatatttttaacaaaaaggagttgaatatgaaaagggtttttggatttgatttaggaatagcttccatcggttgggctgttgttgattttttgaaagaaaatgaagaattagtggacgtagaaacaggagaggtttttgaaggaaaaattgaagcgtcaggcgttcgtattttttcggaggcagaaaatccaaaaaatggggcttctcttgctcttccacgtagattaaaaaggctttctcgaagaataacgcgaagaaaagccagacggaaagaaagtcttaaaaatctttttattaaatgggaatgggctaaaagtattgaagaaatagaggacatttgtaaacaacaaaaaggcggggatgtttgggctcttcgtgttaaaggattaacagaaaagctttcaaaagaagaacttatgcgagttattttacatatggcaaagcatcgaggatatcaatcctatcgaaaagcggaagaagaaaaagatagtgaaagcggaaaaatcttaaaagccattaagcaaaataaagagagtcttggcgattcttcttatcagactttagcacaaatgttttatgaaaagaaaaaaacacctgatgaaaatgggcgattttttatccgaaattatgaaattattgatgaaaaaggaaaaaagaaacctgtttataaaaattcaatccctcggacagaaattaaatcagaatttgaaaaaatatttgaaaaacaaaaagagtttaaccttttaacagaagaaaaatatcgcattttagcaggatctggaaaatccgacacagatcctgaggaacaaggaattatgttccgctaccgggatatctctagcgttgaaaagatgataggaaagtgtccgtttgaaaaaggagaatttcgagctgccaaacaggcgccaagctctgagttttttgtggcatggaacaaattgaataatactaaaatttttgagcaaggaaaagaaagagaactaacaaaagatgaaaaaaattcaattttaacccttttaaaagcagttcaaaaagtgacgtataaatccattaaaaagaaagttttaaagaatgaagaaaccacctttaaagggctttactattctacaaaaacaggggcaaaaaatccagaagaaggtgttttttgtaaaatggaagggtggcatcagttgagaaaagcgttaggtgaaaagcgctttgaagaattggtagaaaaggatataaccttactagataaagctgtttttgtcatcgctgcgcaaaaaaatgataaagcaattgaagaaggattaacagaagttggttttgaacaaactgacattgatattttgaaaaaatgttcatttaaaaagtttttacatctgtcgtttaaggctatttacaatcttcttccacacctttcttcggggttattttattcggatgcttgcgaaaaatgtgggtatcatgaaattttaaaactcgttgataaaaaatcagaaaaacttcctgctcttccccctgaaagtttacctaaaaatcccgttgtttgtcgaacaattgcgcaatttagaaagttgtataatgcaatggttcgtgagtatggggttccagatcaaatcaatattgaatttgcaagagatttaaagcgaacatatgaagagaggatggaaatcaaaaagaaaaacgatgaaaatgctcaaaaaaatgaggcgcttgaagaagaacttaaagcatttaatatggaattgacaggaaagaatttcttaaagttaaaactttataaagagcaaggaggaaaatgcatttattccggaaagcctatagatattagtcgtttggatgaaatgggatattgtgaaattgatcacgctattccctattcccgttcttatgatgatagctataacaataaagttctttgcctgacaaaagaaaatcgtgaaaagacaaatcaaacgccttttgagtatttgtcttcaaaaggaatttgggaggagtttaagggacgaattttagcttcccattcaatcaatcggcgtaaaaaagaaaagattttaattgaagaatttaaagataaagagcaaggatttaagcttagaaatgcaaatgataattcttatatttcgaaatttatgaaaaagtatttagaagattctcttgatttttcaaaaagcgaacacacagaaattaaaaacaagattcaagtgagaagtggttctttaacggcatgtttgcggcatcaatggggacttaaaaaagacagaaaagcaggggataaacaccatgctcaagatgcgattgtgattgcctgcgcaacgcaaggaatggtgcagtatttatcaagaatgtcttccataattgaaaataaatatgctcttcaaaaggaaaaaggtcgcgcttggtgggaagggttaaagcataaaattggggaaccttggtctggttttcgaaatgaggttgaaaagacattagaaggcatctttgtttcacaatctccttcaaaaaaagcaacaggaccttttcatgatgaaacaattcgctctttgaatgaaaaccataaaaactactctgcaaaggatgtgaaatctgggataaaggttcgtggaggccttgcaaacaacggatcaattcttagaacagatgtttttgttaagaaaaacaaaaagggaaagaatcaattttatcttgttccgatttatttgtccgatatgggaaaagatcttccaaataaagctattgttgcatcaaaatcagaagatgaatgggtggaaatggatgaaacctatacctttatgtacagtttttatgcccatgatttaatttcggtaaaaaagaaagaaaaaaagaaaaaagaaaacaattcagaagaagagagagaaggaaataaagaggaacttaaagaaagagaaaaggaaacagaaattattgaaattttgggctattttaaaggaacagatagatctacagcctcaattacaatagaaaatcatgatagaacggaagaatatagaagtattggggttagaaatttagaggaaattaaaaaatatcaggtagatgcccttggaaattattatcctgttcgttttgaaaaaaggatttctttaaaacaaattaaaacccaaaaacaacgcaaaaaggatagatatgtaagcgatttttatcatcaacattcttgaaaaggagaaaaagatgggctggcgaattttacaaataacaaaaccctgtaagttaaacgttaaacaaaaccagttggtctatgagccctttgagggggaaggaacaacctttcccttagaggatatttccgtccttcttttggaatcaaaagctgttcaaataaacagtttttgtttatctgaaatggccaaaaataatattattttattttcctgtgatttttcacatatgccttcgggtattttttatccgtttcataattattgcagatattctttggtggcttggtgtcaaaaggatttatcagaaccctttaaaaagcagctttggcaaagtgtcgtgaaggcaaaaattcgaaatcaagcagaatccttaaaaatagcaggacgttcaaattctgataaattggaaaaattggctaaaactgttttatcaggagattcaaaaaatgtggaagcattggcggcttcaatttattggaaaagtttatgggatgattttaatcgacatgatgacgcggatttaaaaaatgcggccttaaattatggatatgcaattgttcggggatgtttggctaggtttttagttggggccgggttgcttccttgttttggtatacatcacgccaatcaacttaaccaatttaatttaatagacgatttaatggaaccgtttcgtccttttgtggatcaaaaagtttatgcattaaatcttgataaaaaaggggatctaacccccactttaaaacatcaattattagaagttctaacagaaaattgttttattgcagaagagcaaaattctttcttaaaaagctgtgaaatttgcgcaacagcttttgcaaaaacaacgcagactaaaaaaagaggggatttaaaagttccctttttaaaaaatacgcttatccttaattttaagggggaataatgtcagaaataggagagaaatttatgcgtgttttagtcctttttgatctacccactcaaacgaaaaaagaaagaaaaattgcgagtcgtctcaggcaattcctaaaaaaagatggatatattatgttgcagtattctgtatatgctcgaatttgtaaaggtcaagcggatatagaaaaacatgaaaaacggctaaaatgcttgcttccagaggtgggaagtgttagaatgttaactatcacagaaaaacaatacgtgacgatgaaaatccttgtcggacgagccaaaaaaatggaggaaatcggtgcagaacagcttgttttactgtaaaatttttttcaaaaaaacgataaaaatcgttgtaaatcaacaacttattcgaagcctagtatagcatatctaatttggaaaggaagctataacgacatttaatgttcaataaagaattaaataagtatagcatatctaatttggaaaggaagctataacatttgcaatttcacgcgctttattttcttcagtatagcatatctaatttggaaaggaagctataactaaaacaccttcgcagtgataccacccgtcagtatagcatatctaatttggaaaggaagctataaccgtttcaccagatacaggaatcacgcaaacagtatagcatatctaatttggaaaggaagctataacccccaattccatgatgtgttcgccagactaagtatagcatatctaatttggaaaggaagctataacggtatgttggcagttagaacgtctttgaaaagtatagcatatctaatttggaaaggaagctataacagcaatcaactcattaacgactttaaccgaagtatagcatatctaatttggaaaggaagctataactaagttaaaaggttagtgaagcggccttttagtatagcatatctaatttggaaaggaagctataacatctctaatgttcattaaaatcaccttattagtatagcatatctaatttggaaaggaagctataacgtgcgaaatcacttttatttctgtgccttcagtatagcatatctaatttggaaaggaagctataactaaaactgttggaagcatattattataacgagtatagcatatctaatttggaaaggaagctataactaatgcagttgtggaatatcaacttaatacagtatagcatatctaatttggaaaggaagctataacatgttgattttttttgttttcattgctgtgagtatagcatatctaatttggaaaggaagctataacttgtccatcgtcattccaaaacttcatatcagtatagcatatctaatttggaaaggaagctataacaagttgagagtaacgctccggatatccggtagtatagcatatctaatttggaaaggaagctataaccgttatgtctccaagtagattttgtccggtagtatagcatatctaatttggaaaggaagctataactaattcatattgtgtcattttacttcctttagtatagcatatctaatttggaaaggaagctataacatgtgatggacttctaaataagatgggagtagtatagcatatctaatttggaaaggaagctataactttgacaggattatctgttgctagttttggagtatagcatatctaatttggaaaggaagtatcctattttaggcataaaaaaagcctccgtttggaggctttcttcaataagataacttaaaatccctctgtaaagagttttttacgggcaagctttctagctcttctgattccttcagctttttctcttgcttttttctcagacggcttttcaaaattgcggcgtaatttcatttcacggaacaatccttcgcgttgcatttttttctttaatgctcttaaagcttgatccacattgttatcacgtacgacgacttgaactatgatacatccctcctttacaaagttctatcgaaatatcaacttaaggccgagtatacacaaaacattttaaaaatcaagggcttttcaagcgatgatgtcgggaagttccttttccagacggtctaattccttcttaagtgcatttttttctttccgaaggtctttgatttccaaaaagcttaaaataacaggttcacgaagtttttgtatactttcctctaaaagagtcattttttcatgaagcttttggagacgttctttaatttcctctgacataaaaataggctccttttgtaagattttttcttaaattatataaaaaataaagaaaagttcaattttaaactagaaaattttcccaaaaaaatgtattaaggggtatatttttattaaagttaaagttttatatgaggtttttatgtctgcaattaaaagaattggtatcctaacaagcggtggtgattgttccggtcttaatacagtgattcgcgctgttgttttcagagcgattttagaatataaatgggaagtttttggtattaaaaacgcaacagacggtttgattgcccgcccgatgaagtataaaaagttctccctttctgattttgatttcccgtttgctaaaatgggcggaacaatgcttgggacgaataattctgggaatgcaaatcttcaaatgacggacggaaagctcaccgaattgacaaatgatgaggttattagtcgctttaaagaagggattaagactcttggattagacgcgttagttgttattggtggagatggctctatggctattgtcagtaatttctgtcgtaaagcagacatttcaatgattggtattccaaaaacgattgataatgatgctcctgtgacagaatattctgttggatttgcaacggcaaaagatgttgtgatggaggctttagatagattggatacaacagcaacgtctcataatcgtgtgatgattttggaagttatgggaagaggggccggtcatttggctttagaatctgccattgcaggttttgctgatgtctgtttaattccggagattccttatacgtatgaagggattgttaataagttaaaagaagttaaagaatcgggcagaacccactctttggtcgtggtggcggaagggatttcaacaccagaagggggacattgttatgcggcaaatggtcgcactttctgtggggttgctcactccatttctgaaatgattaacgaaaaggcaagtgaatttaatgtcagaacaaccattttagggcatgttcaaagaggcggcgaaccttctgctgaagatagaattatggctagcgcttttggggtgcatgcggtggattgtttggcacaaggaaaaacagatcaaatggtggcctttaaagaaggcaaaatcgaatcctttgacctttcttatgtgcttcaagtggccaatcgtcctgttgataaagacagctatttggttaagacagctgaaggtcttggcatttatttaggtgaattagacgcctaaaagtcatttaagttttttaagcctagatatctttttttaaagctgatatacttatcttgtgtgacacaaacatcaagggaggacactatggataaacatattgaagcgttaaaacaaaaacacagtgctttagaattggctattttagaggaaaacactcgagtcgttcctgatgaaacgcgcttaacagaacttaaaaagaaaaaattaaaaatcaaagaagaattggaaactcttggaatcaaagactagctcttctttctgatataaaaaagctcctttaatacaaaggggcttttcttttgccaaaagagggaattaaaaaattaaaaaagcccgagggattttaaggatgtgttttcacttggcgaaataatgagatgatcatgaacggtaatgtccgccgctgaaagcgtttcgacaattttgcgggtcataacgatgtcggcttttgaaggatgagaatcgcccgaaggatgattgtgcgctaagataacggaagttgcgccaacctctaaagctttttttaaaatctcgcgcggataaacaggtgtttgattgacggttcctttttgaacttcctcatcaaggataagttggcaagcactgtttaaaaacaggcaatggaaagtttccatctctttaaaggccatcgttgctttgcaatattccaacagactatcccaatcctctaaaataggattttgcttaattttttctgaaagcattctttgagagaaagcctggataagcttgaaaagtgtgatggaactttccttaatataagggcattttttgagctgttgaggcgttgcatagatgatttgcgataaagatccaaactctttcaaaagggctttagcaaggggttttacatcaatccgagggagggtatgcattaaaagaagttctaaaagctcataattttcaaaattagaaatcggtaaagagcggaatttttcctttgccctttgccgatgtccttttacaaaatcatctttttccattgagttatcctatttataagggggaaaatccaatccttttggagagagagtaaaaatttcaatgcccgtctctgtgataccgatagaatgttcaaattgggcagaaagagatctatcttttgtgacaacagtccagtcatcttttaagactaaggtttcatctcctccaaaattaaccataggttcaaccgtgaaaatcatacctggtttgatttcaaggcctttatgttttgtgccataatttaaaacattgggggtatcgtggaaaacttgccccactccatggccacaataatcttttacggtggtaaatccttctttttcggctgtttggttaatagcatatccaatatcgccaaaggtatttcccgcttttgcttgttcaatacccgccatcattgaggcgtaagcatttgaaaccaaacgtttggctttaacagagattctatctcctacaaaaaacattcgactggtgtccccataccatccgtcgacaatcggcgtaatgtcaatattgataatgtctccgttataaaggcgtttatcactagggattccgtgacaaacaatatggttggctgaaatacagcttgcttttggataaccgtgataacctaaagtcgcaggaattcctccattatcacgcataaattcttctaatttttcatcgagtttccctgttgtcacgcctgggacaacaaaaggaataatataatctagtgtttcggccgccaaacgacccgccttcctcattcctgcaaaatcttcaagggaataggtagaatttttttgtttcatgatcctcttctttcgttattttttctcatcttataacgaaacgaaataatttccagcatttttatgaaaaaaagacccgaaaaacaccaaaaagcttttttttaatcttaaaaattgttagagtaaaaatatcaaagaaggagaaaaagaatgtttaagataaattcaggctatgtttattcggcaatcgttattctttttgtgttaagctggcttttgtggaattcccctttaagatatgggtatgactaaaagtagatttagattaaaaatgaatagagaaaacctcccttaagcaataaaggaggtttttttaagccctaactttaggtgaagattttttagaggagctcctcttctttaataaagtatttctttccgcaaaattggcaagaaatttccaaaacgccgtttttacaaagactttggagttcttcttttgaaagacttttaagcatagtttggactttttctaaagaacatttacaggcaaaagttaaatcctttgctggaaataaagtgaggtcgttttgatgaaataaacggaagagaagcttttctggagaaagccttttatctaaaagttcttcctttttcacagaagcaagaagggtggaggccgtttcccacttatcaatcgttgtctcttctaaagtttgattctttttttcgggcattttttgaagcataataccggcagctgaaatatgtcctgtttcaaaattggtttcgccataaagctctattttcgttaaaagctgttcggattgggcaaaatatttttctgcacatttggcaaggctttcgccctctaattccacaacgccttgataatcctcttgcccttttttatcggatttaaccataaaagccaaagagcccgttccaaagatttcttttaatgagaaggcacctgtcggaagagtatctggattataatgagcaaaagcacgcatttttccatcatgggttaaatcaacaagtaaaaggttgatggccccttcactttgaatttgaagggtaaacgtgccttcgtatttaattgaatccgaaagcattgcggttaaagccatagcttcggccaacatttgttccactaaaggcggatattcttttaaggtcctcatttgctctgttaaagagtcaattttaacagcacgcccccgaaaaaggccttcatcaatcataaatggtaaaattaaattcatagactttcctttcaagtttcgtataatatggagaagtttttaaggagtgtcaagatgaagaagatgtcttataaaagattgtataacaaagcccttttttatctttcaagatattcgagttcttctgaaaacttacgccaagttttggaaagaaatttgaaaaaagcctcttatgaagggcaagaattgcctcccgattcggctgaatggattgataaaattgtggcagatttcctttctttagggtatctagatgataaacgctatattgaagggaaagtgcgctctttggtcgattctggaaaatccacaaaaatcattttcttaaagctgattcaaaaaggctgttctgaagaagagattgaaaacgcctttaacttattagaatttgacaaagaaaaggtggatatgaaaaattccaaaaagcttgttttaaagcgaaagattggattttgccgttctttagaggagcaagacctcttttttcaaaaagacttggctgttttagcccgcgctggattttcctttaatattgcccagaaagccttaaaaggagaaatttagccatcttccttatgaagaagaagactaatgcaaagcggaagggtaatcaggatagggcctaaaatacttaaagataaaggcaacgtttgggaaagtccaaaagctgaaataacctttgatgtaaaaaagaataaaaacccacaaactacagcccccatcatataaaagagaatctttccttgtctttggtttggatttaacccaaaaacagcggcaataagaaccatacaaagcaaagagaatggataagctaacagcccataaaaatgagagcgatgttttacggaagaaaatcctgaggcttccaaaaaagaaatactttgaggaagattccagaaagaaaccgtctcaggggtttcaaaattttccaaaatttgctcgacagttagggtagtcggcaaagtcatataatctttcttttcggaggtttttcctggggtgataatccaaacatcataaaggtttaaaaaccctttttctaaaacggcataagagctttcgagttgttgctttaagatttcattttcagaaagttcaaaaatagaaagattttctaaagaaagcgttttgcctttttgttttaaggtggaggatcttaaaataacaggtttgttttccctgatttctcgcatccaaaatccccttggagaccaagaaagggaagaacctttcacaagcccaagtttttcttcttgtctactaaagcgttcaatcatagaaacagaaagcgggtttatagcgccaacgtccaaaacgccaattaaaaaggttgcaactaaaagtggggcaataaatccccaaacggaaaccccaattgcgcgaacaatcacaagttcgcttgtctttgtcagacgccaaaatacagataaagaggaaaataaaattgcaaaaggaagaagcaaatgtatcattcgcggggcttttaaaagagccatataaagcacattttgaaaggtgatattttcataaggggccgttcgccttaaaagatcaatcacatcaaataaagagatgatacccgttaaaactaacaggaaaaacaaaaaactaattagaaatgtttttgataggtattttgaaatcaatgaaaaaggcagcattcttttacaactttcttaaaaataatttgtctttagcataaattaaaaatgaaaagaaatcaaaaaattaaagagcaaataagaacttttttttaaacttagaaaaaataaggaggtttttgctttacatcatttgaaaatcggctatcatttctaagtctattgaatttatttttaaggagaatttttatgacagttcgtgtcgcaattaacggctttggtcggattggtagattggtttatcgtgcttacttggaatcgggacgcaaagatattgaatttgtggcgattaacgatttagctgatgctgatgccaatgcttaccttttaaaacatgattccgttcacggaattatcaatatggatatccacgcagaaggggactaccttattgctggagatcacaaagttagagttatctcagaaagagatccaaaacaactcccatggaaagaattgggtgttgacattgttatggaatgtacgggtatctttgctgcaaaagaaaaagctatggttcacattgaagcgggtgctaaaagagttcttgtttctgctccttctcaaggtgctgacaaaacaatcgtttacggggtaaatgaaggcactttaacaaaagaagatatcgttgtttcaaacgcttcttgcacaacaaactgtttggctcctgtttgctatgttcttgaaaaagaatttgggattcaccacggctatatgacaacagttcactctttcacaaacgatcaaaagattttggaccaagtccataaagatttacgtcgttctagagccgcttctatgagtatgatcccaacaaaaactggggcagcaaaggccattggtcttgttcttcctgaattagctggaaaattagatggcggtgctatccgtgttccaactccagatgtttctttagttgacttaaacgtcaccatgaaa

SEQ ID NO: 3407 - DNA, 15970 bp, synthetic construct
  misc_feature 1..15970: note = Synthetic
  source 1..15970: mol_type = other DNA
cctgaaccaaaggaggcgtcgaaaaagtgtgcgtagccaactgcgagcgatcggtcataggacattttcctaggctcttccgtcttgacttcgacgggctgaggttccgatgtcgcaggaaggctctcctgcgcatgaacagcgagagtcgaagaggcgatcacaacaagtgaggagagtgagagatatgacatgaaatttctccgaggcaatcaagcgcgcgcgtcaaggacgagcgtgtcgacgatgttctgaatgatttcttcgctcgtacgaccctccgcctccgcttcgaaattgagaaggatgcggtgccgaagtgcagggagcgcgttcgccttgatgtcgtcgaagctcactgcggttcggtcttgaagaagcgctttgactttcgcggcgagaatgagcgtttgcgcagcgcgcggactcgcgccaaagcgcaagaactgattggtcatcggcgtggcgaattgaccttgcggatgcgttgcgagcaccatgcgaactgcatagtcctggacatgtggcgccaccgcgacctgccgcacgagtttctgatgcgcgatgatcttcgccgcgtcgagcactcggttgagcaccggttcaacgcccgtggtggttcgatcaagaatggcggagagttcattgcgcgtggaatatcccacgacgagtttgaagaaaaagcggtcgaggtgcgcttctggaagcgggtaggggccttcctgctcaatcggattgtgcgtcgccatcaccaagaatggtcgatcgagttgctgggaaacgccgccgatcgtcacgcttcgctcttgcatggcctcgagcagcgatgactgcgtcttcggcgttgcgcgattgatttcgtccgcgagcacgatctgcgcgaagatcggtccctttcggaattgaaagtcgcgaccgtgctccgtttccaccacgatggttgtgcccgtgacatccgctggcatgaggtcgggcgtgaactgcacacggctgaactgcaagtcgagcgcttgcgcgagcgagcgaatgaggagggtctttccaagacctggaacaccctcaagcaagcagtgtccgccggcgaagaggcaagtgagcacgccatcgacggtctcttcgtgtccaacgattgcctttgcgatttccgcacgcgttcgagcgtagtcttcgcggaaagttgtcacgagcgagctgatctccgtcataggtgggaatactaccgacgatcgatcgagcggcgtatccttcgaggatgggtatgaggccgccatcacgacttcgcgtctgcgttcggcgcgcagtgaaatgcctcgcgctcgtactgtttgtgttgctcctcgcgggaatctggctttggaatgacccgccttcgctctaccgatgcctcgtgcgcgcgggtcagtggcgagcgggtttgactgagcgcaccgtcatgatccagggtttctcttggcgagtgcttgagacagacgatgctgtagcaaccgccgtttcctcccgcacggttcttgtgttgcacgggcttgggacaagtgcggaagcgatgcttcccatcgcgtccatggttccggcgggcgcgcgcgtcgtgattccagacttgccaggattcggcgatcacgactcacacggcgcgttggcgcacgatgcggcgttctatcttgacgcggtgcatgcactgcaagttcacgagcgactcggcgtcgttgacttggtcggcacttccatgggaggcgcgctcgcagctgcgtatgccgcacggtatcccgacctcgtgcattcgctagttctgctctcacctgcgggcgtcactgcgccggtgaccaataccttcatgaagcgagtgatcgcaggagagatcccgctcgacatcaaagacgaagcgagtctgcgcgaagtactgcgattgaactttgtacatcaaccgccgatgccgccgccgattcgcgaggcgttcattgcgcgagcgctagagcggcgggccaactacttgcggatcgtagaagatcttcgcccattcttgacaacaggacttgaggcagacctcgcgaatatccagacgccgacgcttgtgctctacggcgcgagcgatcaactcacggatccgtccatgcttgaggttttcttgcgcgaaatgccgcacgcgcagggggtcattatccccgacgcaggtcatgtgctttcgtatgacgcgccggacgctgtgcgtgaagcgatgcgcgtgttctatctcgcgttgccttgacttcacttctctagccgcgctgcgaggcaacgcgcaacgcgttcgacggacaacggcgcgcttccctcagctttgttgttgacgacgatccatgcacccagaccagcttgcagcgcagcggcggcgagcgcggcaagatcatctcgattgctgtcgtctggttcggcgagctgatcgaatggcgcgtacaggtccttcgcttctgcatacgcgaggttgccgcggagcatccatcgcataacgagtggacgcgatggatcgagcgcgagtgcttgcgactgctcgcgcagtggcggcatcgttggatgcaccgtcaagcacggtgtgactcgatgtgcggcgagcaactcaccaaactcagcgcacacgagattccgatcgcgtacctcgacggcgtaaaacgcactgccctgcgcatcaagtgtggggagcgcggcgaagaacccgcaaagccgctccatgtacgccgctttcgcgcgcgcacttgcgtagtttgacggcgaaaactgaaagagcaaaggccccgccttctcgccgagcccctcgatcgcgggcagaatgcagtcaatcgttgcgatgcgcgcatcgagtacagcgcttggggcatttggattcgcgcgcgagtcgtcatcgatgacgccgcgccacatcttcgtaagaaagcgaaagtccgcagggacctgactcgcgagccgttcgaactctgcacgcggcgccggtcggtagtaggttttatcgatgccgacggtgcgaaaaagtggatgcgccgcgtaggcccgtaagccatcgcgcgcaagagttgcttcgctcgcctctgattcccacacgatgccgcgccagcctggaaaactccaacttgatgtccccattcgcagcgcgggaggcatcttgctcgcaagcgtgtgcaactcgcttgcggcgcgagcaagcacgagctttccgcgcttgggcgattgatcgccgtcgtcgccctcaggaccaaagagacttggcgtttgggcggacatacatgtttgagttacgacgctttgggcgagagcttctcgagaatcttgtcgacaagcccgtactcgagcatctgttgcgaagagagccagaggttgcgctcgcaatcctccgcgatgcgctccttcttttgtccggtgacttccgcatacaacgcgtaaatctggtctcgcaaccggagaatgtggcgcgcctcgatttcaagatccgttgcttgcccctcgagccatccgctcaagagcggttggtgcatcaagttttcggcgttgggcagcgcgtatcgcttccccttggtgcctgcacatgcgatcactgatcccatgcttgcggcttgtccaatgacataggtcgcgacatcacacggcacgaaacgcattgtgtcgacgatgcctaatcccgcagtgacgctgccaccagggctgttcacatagatcgagatgtcggcctttggatcttcattggcgaggaacagcaattgcgccacaaccagattcgccatgccatcactcacagggcccgtgacaaagatgatgcgatcattgaggaggcgggagacgatgtcgtaggcgcgctcgccgcggccagttttctcaatgacgatcggaatgatgctcatcgcgtagtccttcgggctataggttctgtcgaggtcagcagaagtcgtgatctaggaggattgcaattgtggttgcggtcggttggagagcgggacacgatcgataatcgcatcgatcaatccatactcaagcatttcatcagcgttcagccagcggtcgcggtcgcaatcttgcgtgacttgctcgagcgacttcgaagtcacttcggcgtacagcaggttgcatcgcacttcgagtgcttgcatgtgtcgcgcttcgatttcgaggtcggtgacttgaccctcgatgacgccgccgatgcggccttggtgcatcatgtgccacgcgttgcgcgtcgcgaagcggcgccccttcgttccacaggccgcgatcatgcttgacatgctcggcgcgcatccgacgacataagtcgcgacgctgcacgggatcgctcgcatcgtgtcgatgatggccaaaccatcagtgacgctgccgcccacgccgttgacatagatcgagatttcagccttcggatcatccgaagcgagatagaggagttgcgcgcaaatcgagcttgccatctcctcctcgatttcgcctgaacacatcacgatgcgatccgctaggagtcgcgaccaaatgtcatactcgcgctccgttcgtccggagctgtcgatgacatgggggacgaggagcggtggatcttcttcactcacggcgagcaactcacgcttgctttgcgggggaacgcgacagggaatcggttagcgcttcgccttctcagggaacacacaaagttcatcgacgagcccgtatgccttcgcttccgcggccgagaaatacttgtcgcgctcgccatcgcgggcgaccgcatccacatcgcgaccgcaatgtcgtgcgagaatctcattgagcgtccgcttggccttgatgatttgttccgcttgaatctgaatgtcggtggtctgtccggtcacgccgccatgtggctgatggatcatgaccttcgcgtgcggcagaatgtggcgcttgcccggttgaccggccgcaagcagcaccgcaccgcctgaataggcgcgaccgatgcagaaagtggcgacttcgctcgtgatgaactgcatcgtgtcatagatagcgagcgtgtcatccaccgcgccgcctggactattgatgtagaagttgatgtcttggccctttttctggttctccagatagagcatttgcatcaagacacgcgccgcagaggcgtgattgatctcaccgatcagaaagatcacgcggttctcgagcagcagctcgtcgatcgtcatctcgcgtgtgcgctgatagctggtcgatgccaagatgtcgcgctgcatgtgcggaggaagtgcggtgagcacgccggcggacgattggttgttgaaatggagcatcggaggtaagggaccgttcggtcagttgaatcttgagaagggggaactacagccttggggcgcatcataggctcgacccttcttcggcaaatgggagcgctgcccccgcagcaatttcaatttcggcgcgagaaagttcgagacttccgcttcccgaacgattcgccaacttggcttacggcccgaaggtccacggcacatctcgacttgaggcagaacgcggggcacgcgttgcgtcaaggtcatcgagcgaactcgcgtcttcattcccaagccgtgatgcctgaatgatgagcgcgatctccgtcccgtgctcgtcgcttcgaaccagtcgcgcgctgccgccatgtcgatgggcaatcttgcgcgcgaccgcgagaccgagtccagtgcctcgttgccctttggttgacaagaacggttcaaagagccgacttcgtagggagagtggaatccccgcaccattgtcgatgaccgtgatgcacgcggcatcatcttgcgcgttgtagcgggtgcgaatcgtgaccacgccggttttctccggcgccgcttcaatggcgttcatcgcaaggttggtgatcgcttgatagatcgcgctgaggtctgcgtacacaggtggcagcgtcgattcgagttcgattccaaggcggaggcgttttcgagtcgcggcagcctgaagcagttctttcacctcggtgacgagcgcgttgagatcgatcatctctggttcgagtggccgttccttcgcccatgcaagcatgttgaggaccagcgactgaatgcgatcaagattgcgctgcaaaattggccagccttcgcgtgcttgggcaagatcgcctcgcgcgatcgtcatctccacggcatcggcgccactgcgaagcccttgcaagatgttcttgatggcgtgcgaaagcgtcgccatcgactccccgatcgccgcgagtcgaccatcgttctcgctgttcgcagcgcgagccgcaagaccaaggccgacgagttgcgcggaaagttgcagcgctgcaagcgtcgaggtgcttgtcagttccgcaccaccgcgcgcgatgagcacggttgccacggcgccatgcatgtgcgctgcgattggaatcgcgaccgcgtgatgattgccgcgttgttcatctcgcgcgagcatcggctcgccactcgcgagagcttgctcggcaagtgcgagaggcgcgtgctgcaccgttgttgggacgagaaaaccattggctcccccgcgcagcatcacgcaactctcaagacctgcactcgattgaatgagtcttgacgcttgctctaagaagtcatccgtgcgcgtgggctcggcactcaaccgagcgaggcggtacgcaagaatcgcatcacgcgactccgggagaggaagcgcggtttgtgtcgcagaggaaagctgcgttgtgagatcaggtgcagcagtgtgtatcgcgccttcatcgacgacgaggaactcactatcgccaagtcgcagtcgatctccgcgttggagtgcgacatgtcctgcggttcgcaggccattcaagaaagtcccatgactcgaaccaagatcgcgcacagtccagtgatcgccatcgggcgtgagttcggcgtgcaatcgcgagaccgtgcgatccgtcaatccaagggcttcggaggaacgacccaccaattgcggctcatccggcgggagcggaaacgctcgcccgcgatcggggccatgcacgacgaggagggtgggcacgatgtgaagtgtacgcagacgcgctgttgccttcgtacactccaagcatggccaaggcggatcctctcaatcacaccatgcgcgtggtggtgcttcatgggaaggacaactttcagcttgtcgagcggttgaagcgcctccaactcgcgcttgatgcccatgcgggcgaaccggtggcgcggtttgactttgacggcgcgtccgcgtcgctctcggacattctcgatgaacttcgcacgttcggcttgcttgcctcacacaagttgatcgtggtggatcgcgcggatcaattgcttgcggtggaagagcgtcgacgcgcgcttgagcgctacgccgaagaaccagcggaagggtcgacgctcgtcctccgcgcggagacttggcgaccaggcaacttcgacaagatcgtggttgcgaagggcggcgcggttgtgaagtgcgaagagccaaacgccgcagatgcagcggcgtggtgcatcaaacgagcagcgcatgtgcatcaagcggaattgctcccccaagcggccgacgcactcgtcgaccgtctcgggacaaacctctctcgactcgactcagagattgcgaagttggcctcgtttgttgcaggaacgggcgccgcgggctcgacacccaagatcgacgcaaaggtcgtctcgcaacttgtaggtcggacccgcgaggagcaagcgtgggagattcagtcggcagtgcttcgaggttcccccggcggcgtggtttcgaaggtgcgcgaactcgtggaaacttcgcaagcacccgaacagcttctcatctggtcgctggttgacctttcaagaaaactgcacgattgcgcgcgactcatggcgcaaggggagcccgagaactccgtctcaaggacggttcgactgtggggcgatgcgacggcgccgacgctgagaatggcgcgcaaacttggtcccgcacgcgccgcgcggctcttcgcggagtgcgtcgacctcgaccgccggtcgaagcagggggcagcgggagatctcccaagaacgattgaaggctttgcggcactctttgccgatagcgttcattgattctgtgtgaaagttcggttgccgccgcgccttctcatcagtccgcactgcactccgcctttgggttttccagaggcgagggcagtgtttcttgcgccgcgtgattcgttgatgcccggagggcgtcagacgcagcgcaagtcaccagtccgcccggcatgtccgccgaactgaatgaagacgcatggaggcgtcgccatggctcagtactcaaccaaagtgtgttcccgtcgactcatggctcgcgcgtttgcggaaaggcaaatgacagcggtgtgcatgatttcgaccttcctcggaactggtatcgcattcatgtttttcggcggatgcgcgagtgcgaaggagtcatcgcgacttgcgtacaacgatgaaggccttgccccagtcgaagtggagatgagtccacttccagaatccgcagccgcgccaagcgccgagttcacagggcccgcggacacgacgagttccgccacggtctctccaacttccgcgccaaccaaggcgacggtgtcggacttagcggcgacctatgaagcggatctcgcggcgcttgcttcgatgcaggcgtctgctgcggcaccttccgcgacagtcacggcatcaggtgagtcgtcgatgggttcccaaactgtttcgcagacattcgcgcgatccgtgacaccgacgactgcagacactgcaacgccacccacgatcgaatggagtgatggaacaaccggggctgctcccgatcgactcacttccatgcgctcgagtgctcagcgtgatctgcttgatcgcgcagctgcggcggcgaatgcatccatcgcgcgctcgaccgaggcacccatggtggcgggcgatgctgctgcgcctgcgctgcccgagcaaaccactgcaaatgagccactttctgctgcgcttccgactcctgcgacgaccacgctgcccatcgatgcgcaaggcatcgcgacgaaacttgcctcgacgctctcgagcgatgcgacgacgagtgccacgccgatgcggcaattgctcgcgctctctgccttagcagtgacggatccaacgattgagttgccgaaggatctctcgacgcatctcacggatgaagagcgcgcaacagcggagaagttccacgcagcatttgtacgcatcggtcgcgacttgcaagaaggcaaggacgacgcggcgctcgtgagcacgatcgagcaacttctcacggcactcaaaccagcgccgatgcttgcgttgccgcgagtggagttctgcacaagggtgcaggcgtttgggcagattgatccgattgacaatcgaagattcctcgcagcaacaagtccgcgcgtcatcgtgtatagcgaacttgaaaacttcgtcagcgcgatggccgatgcgaagtggacgacacgattggcgacgaagatttcgatcttgacggagcgcgatggcgtggaagtctggcgacgaagcccagagtggacggcggtcgttgatgcgagcgatgtgaagcgcgatgacttctttgtgggagagatcgtgacgctcagcccgcatctctcggtgggaagctatgtcctcaagatgacgatccgcgacgaagcaaccgcaaccgttgccgaaaagagcgtcgcgttccaagttgtcgcggaccccaccatggtcaccaacgcggggtagggggagtcggttgaatccggaaagcttcgaagtctcgcgctgaacggcagtcaggcgcttgaccgggcaaaaaaaaccccaactcggagttggggtcggggttgcgcaccgaacgcaagcggtcgggagcagagcctcgcgcaggtttccctacttatcatgacaagaaggagcacccgctcagttacactgcccatagtgtagaggatgatggctcggtgtcaagcgaagccatgctgagatgagaagatttccaggcagaccttttgtggagaaaaacaatgagcacttcgcgcacgactcagacggttcttggcctcgacatcggtgttgcttcagttggttggtgccttctggagtatcggaacgaagtcccgagtcggattcttggtaccggaagtcggatcttctctccaggagtcgatggcgatttcaagaatggtcgtgatgaaccaaagaatcagaagcggcgccaagcgaggcagatgcgtcgacaactctggcgccgtcgccgacgactgctgaagttacttcgggcgctcgtgcgactcgggttacttccagatccaggagcattcgatcctgcgtcgatcgatcgcatgctcaaggaactcgatgcccgccttggcgctcaggatcctctgatgggtgatcgtcgcggtgcacaggtgtttcactaccggcttcgagcacgcgccgcgcaaactgtggtccctgcgcatgaactcggacgcgcgctctaccacttggcgcagcatcgtgggtttctcagcaatcgccttgccaaaaagaaggacggcgaggaggacggcgtggtcgcggaaggcattcacgagttgcaggcgaagatgaatgcgtcgggcctcctgacgcttggcgcatacttcgcgtcgattgaccctgaggttgagcgcattcgcgcgcgctggctcggtcgcaacgagtttatcattcctgagttcaaggcaattcagagagcgcagagccgccatcagtcatctttgagcgaagccgattggcagctgattgaagacgcaatcttcaggcagcgaccattgcgcgatcagagtcatttgatcggtcggtgttcgatcgagcctgcagagatccgctgtccagtcgcgtacccagctgcgcagcgttttcgagtgcttcagaatgtgaatcaccttcgcgtgatggagatggatggtgagatcgagcgcgtgaatcgcgcactcacttccacggagcgcgacgcgctgatcaaggcacttgagctcgagagccatctcacttggacgcaagcgaagaagttgctcggtttcaagccgaaaggcgtcaagttctcgatagaacttggaggagagaaggatctgatcggcaatcgcacggctgccacaatgcgcgtggcgatcggagcctgttgggacgacatgagtgaagaggatcaagcacggctgattgatgatgttcttgagtatgaatcacaggaagcactagagacgcggtgtgttcgccgatgggggctgtcgaaggatgacgccaaaaatgttgcggccatcaaacttgaggccgctcggctgaatctctcagcgcgtgcgattcgtaatctgctccctcatcttgaggccggcctctttgtagcggaggcgaaggtcctcgcgtatccatcacagagcggggtcgacgcgccttgggaattcctccctccgatcaaacccgatcgcgtttggcaggagcacagttcaggaggtcgtccatatcgagggatagaaatccgaaatccagcagtggagaggtcgttgtcggaactgcgcaagatcataaacgctgtcattcgccgttggggtaagccggatcaagtgcgcatcgagttggcgcgcgatttgaaaaagccgcggaaggaacgggtggacgaaacgaaacggatgcgtgaacaggaggggcgacgggacagtgccctcgaccgaatggttaaggaagggttttcgcacatcgccgactcgaacaagaggtcggatgtcgaaaaggttctgctctgggaagagtgtggaggcgtgtgtccatacacgggcaaatccatcaacttcgaagacctgttcgggcaaagcccccgcttcgaggtcgagcacatcattccgtatgccctgtgccttgaggatggatttgggaacaaaacgctttgtgaggtcaatgagaatcgcaaccgcaagcgccgcaactcaccttacggggcgtaccacggcaccccgcaatgggattccatcatttcacgcgccaagctgtttcgaagcccgtctgcgcgaaaaaagttgcgccttttcgagagcgtcgccaacggtagcgaaatcttcggcgactttctcaagcgacaactgaatgacacgcgctatgcgtcgcggctcgccatggattatgtgggattgctctttggcggcggtatcgacctcacgaagcgccagcgtgttttcgtgagcgccggcggtgcaacggcaattgttcggcgcaaactcggcattgagggcgtgttgggtggtggtgggaagaaccgcagcgatcaccgtcatcacgccatcgacgccatagcaatcgctctcaccgggccagcagaggtcaaggcgatcgctgatgcatcagaagcagcagtcgtgcgcggtgaagcgtcacatcggctgaaactcgatgtgccttggcccaacttcattgacgatgtaaagcgctctatcgcgggcatcgtcgtatcgcatcgcgccgattgtcggctgagcggaccgctgcaccaagagaagaactacagtcgcccgattcgcgatgctcggggtgatgtgaggaggggggttgggaaaacgagcgccctgcgtcaccgtcgctatctcctcgttgagctcggcgagggcgatgtcaaatacattgtcgacccccgcgtgcgggaggctgtgcagcagaaactcgcggaactcaagcagccgaatccgaaggtcgcgttcaaggacaaggtgaatctcccctcgatgcgacatggggatgggcgtgatgttctgattcagaaggcgcgcattcaggtaaatgtcacgctcgatgaagtgggtcgaggcggcgcggcgcgacatgtcgtgcctggctcgaaccaccacatggaagtcattgagacgctggatgcagagggcaaggtgatcggctgtgaactcgaggtggtcacgcttctcgaagcatttcggcgcaagcagcgcggtgcgcccatcgtgcagacggattggggtacgggacggcggttggcgttcacacttcgcagcggggattccgtatcactgaaggatcgtgaaggcgtgagatgtatcgctcttgtgactgcggtgtccgacggcgatctgcatctcaagcgcgtgagcgatgcgcgcccgcgaggcgaagcgagagcggaatccaaggctgggcgggatactggactattgcgagttagctcggcgaaggcgttctttgccgctggagtcgaaaaactagtcgtgcatgcccttggcgatgttcgccgtagcaatgactgatcgcatcattgaacttacagaaaccccagttcgattgcgagttgatctcggtcgcctcgccatcgaagtcaacggtcaagcgcccgtctttgtcccgatgcgtgagatcgcggcgatcgttgtgtccaaccccgccgtgtcgctctcccaatcggtgctcgcggaacttgcaaaggagggaggaatcttcgtcgccatgtcggagcagtttcttcccatcgcgatgttgctgccactagattcgcattcgacccaaacagcacggatggcgaagcaggctgaggcgcccgagccgacaaaaaagcgcgcgtggcagtccatcgtgcgagcgaaagttcgtgcgcagtgggagctactcgaatacacaggtcgaccgcaagtaggtctagaggaactgctcaagagcgtgcagtcgggtgaccctagcaatgttgaagcgcaagccgcggcgcgctactggaaagcgctcttcggcgacgcattccgtcgcaatagggacgcacccgaccaaaaccggctgctcaattacggctacgcggtgttgcgcagtgttacggcgcgcgcgatctgtggagttgggcttcatccaagtctcggggtgcagcaccacaatcagtacaacccattctgcctcgcggacgacctcatggaaccctatcgtccattggtggatcgcgcggttctcaatgtcgtagcgcgcgagggcggtgatggagaaatgtctcgagaagttcgagcagagattgtgtctgcgcttcttggccgccacgctgcgcgcggtgaggagcgaacgctgtttgacctgctttcgcgcagcgcggttagttgtgcgcgtgtgttgaccggcgaagagcgcgaccttgaactttgggttccttcatgccgcgagcagacctgagacgctgtccaaattctggatacaaagccatgtggttgatggcgatgtttgatctcccagtgaagtcgaaggcgcagaagcggagttacacgcgatttcgaaagcacctgctcaatcaaggtttttgcaaattgcaatattcggtgtacgctcggcattgcccatccgaggattcagcgtcgcactatcgcgactctgtcgcgcgcgaactcccgagtgaggggcaggtgcgactcatgagcatcacggatagacagtttggcaagatgcaggtgttcgttggagaaatgagcgttgcgaccgaatcagcacccgttcaactcatgcttttctgaagcagaaaacaaagcaactcgcgtggagcacgcgagttgcaaagagaagagtgtaactgagcgggggctctcttctggccacagcagaaacatacatcgcccatgtagggcttggagtgtaactgagcgggggctctcttctggccacagccgcaccgacgagcgcgatgatcgcgtgctgagtgtaactgagcgggggctctcttctggccacagcatccgatgcacgatgcatcggtaggatcatagtgtaactgagcgggggctctcttctggccacagctgtcgccaacgacggagatcgcggtatgagagtgtaactgagcgggggctctcttctggccacagcacggaaaaccttctcatcttgctcgaaggcagtgtaactgagcgggggctctcttctggccacagccgagaacaatcgcaagagcgggtggtcgtcagtgtaactgagcgggggctctcttctggccacagcatacgcgatcaatcagtacatgccgacggcagtgtaactgagcgggggctctcttctggccacagcagatcgttcgcgatgagcgtgcacgctcgcagtgtaactgagcgggggctctcttctggccacagcctttgtcttcggcggcaatcttcttcgcgaagtgtaactgagcgggggctctcttctggccacagcgtgacgggtgcaggatgtcggtgatcggggagtgtaactgagcgggggctctcttctggccacagccaacgcgcatcgactcgggcatcatgtaggagtgtaactgagcgggggctctcttctggccacagcgggaactgaataccccgttgacggtcgaggaagtgtaactgagcgggggctctcttctggccacagctcgcattcgggagtcgcggaggatcgacgcagtgtaactgagcgggggctctcttctggccacagcataatccgtattcgcgagttgcacgccgctagtgtaactgagcgggggctctcttctggccacagcatccaacgcgacagcgttccacgatgcgccagtgtaactgagcgggggctctcttctggccacagcgtgtcagagtgtgaaatcctccaccgctccagtgtaactgagcgggggctctcttctggccacagccatcgatgcgctctacccctccaccacatgagtgtaactgagcgggggctctcttctggccacagcttcattcgcgcatacaagtacggcgtgccgagtgtaactgagcgggggctctcttctggccacagcgggtaatctcaatcccgcggcatttgcggcagtgtaactgagcgggggctctcttctggccacagcagatgagcatcgttggatttccagcgttcgagtgtaactgagcgggggctctcttctggccacagcgacgcggtgtaaatatagcgatcgagtttcagtgtaactgagcgggggctctcttctggccccagcctccacgctcaagggatcgagt

SEQ ID NO: 3408 - DNA, 4965 bp, synthetic construct
  source 1..4965: mol_type = other DNA
  misc_feature 1..4965: note = Synthetic
cggcctcaaagcattccgcacgctgtatcccaagggcaaaaacttcgtgatcggtccgaacgtcaccgagtcatacacgcgcaccgtcgacggacttgaactgaccttcggcacgccgtcggtgttggcgtgaggtagtgacttggcgagcgtcgcagcgatttccacgctgtgaattcccacacgcagcgacgccccgatgggatcaggaatgttcgcaacctactgaacacggcagccgccaattcgagagtccacaaacggggtctaggtcaaagtcaatgtgtcaaaggcaaaagaaaacccccacctgagtaggggtcaaggttgcgcatcgaacggcaagcgggcgagagcagagccttgcgcaggtattcctacttattgtgacaagaaggagcacccactcaattacactgcaagcaatgtagtccactaggtagtcttgtcaagacctagttgtgaaattgcttaaaaatcggcacatcaatctgaacgcaggagatgaacatgagcacatcgaaagaggcgcggacgatccttggacttgatatcggagtagcatcactcggctggtgtctgcttgcctgtgagggcaagcaaccagtgcggattcttggaaccggaagtcggatcttctcaccaggagtcgatggcgacttcgcgaatggtcgcgatgagcccaagaatcaagcgcgccgcgatgcgcggcagtcgcggagacaactctggaggcggcagcgccgcatgctcaagttgtttcgcgcgctcgtgcgcgcggagctcttgccagatcccggtgcttacggccccgacgacattgatcagtcactgaagacgctcgatgcccaactcactgcgcgcgacgaactcatgaaggatcgacgcggcgctcaagtgtttcacttccgacttcgcgcacgtgcggcgactgaatgtgtcgcggcacatgagttgggtcgagcgctctatcacctcgctcagcatcgcggatatctcagcaaccgtaaggcggcgaagaaagacggcgaggctgatggagaggttgctacgagcatcagcgaattgaaggagcgggtgctcgcgtcgggactgccaacactcggcgcctatttcgcgtcgattgatcctgaagaggagcgcattcgcaagcgctggctcggccggaacgagttcattgtgcctgagttcaatatgatcgccaccgagcaacgcaagcatcaccctcaagtgaccgaggatcaatggaaagagattagcgacgcgatttttcgtcagcggccgctgcgtgatcagagtcatctcatcggaaagtgttcgcttgaaccagccgaacgccgttgtccggtggcctaccccgaagcacagcggttccgaattctccaagcggtcaaccatctgcgtgtgctcgaaatggatggcgagattcagcgggaagcaagagctcttagtactcaagagcggagcattctgcttgaagcactttctcgcgagagtcatctgacttggacaaaggcaagaaaactgctgagtctcaagcccgccttggccaagttctcgattgagttgggtggacagaaggatctgatcggaagtcggaccgaggcgacgatgcgtgttgcgctcggcgcacgatgggatgagtgggataccaaagccaaggtgcgtgtgattgatgacatccttgagtacgaaacggccgagatgctcgccacacgttgcatgcgggcgtggatgctcaccaaagaggaggcgaatgaagtggcgcaactgacactggagagtgctcggctcgatcactctctcaaagcgattcgccgaatgttgccacatctcgaagcaggtctttcgtatgccgaagcaaagatcgctgcctatccgaggcgtgctggcgccgaagcaccgtgggatctacttccaccgatccggcctgatcatgtctggcaagaacattgctcgggtggccgcgagtatcgaggcatcgagattcgcaatcccgccgtcgagcgatcgctgtcggaggttcgcaaggtcgtgaatgcaatcatcagacgatggggaaagccagacgttgtcaggatcgagcttgcgcgcgatctcaagaagccgcgcaaggaacggaaggatgaaaccacgaggatgcgagaacaggaggaccgtcgaggtcgcgcgcttggacgaatggtgaaagagggattctcctcagtcgcagatcgcaaccatcgatccgacgtggaaaaagtcttgctgtgggaagagtgcaatggaatctgtccgtacacaggcaagtcgatcagcttcgaagacctgtttggttcacaaccacgattcgaagtagaacacatcattccctattcgctgtgcctcgaagatggtttcggaaataagacgctgtgcgaggtcaatgagaatcgcaacatcaagcgccgcttctcgccgttcgactcgtatcacggcacgacaaagtgggatgggattgccgcaagggtgaagttattcaagagccgttcagcagcaaaaaaactgaagctcttcttgagcgaaagcaacgggcaagatgtgtttggtgactttgttgagcggcagctcaacgacacgcgctacgcctcgcgtctcgctgctgattatgttggactcttgttcggcgggcggatcgatgttgcgcacacacagcgcgtgaatgtgagcgcgggtggtgcaaccgcaattgttcggcgcaagctgggtattgagggtgtgctcggtggaggagagaagaatcgcaaggatcatcgccatcacgctgttgatgcgatcgcgatcgccctcacgggtccgcgcgaggtgcaagccatcgcgcgcgcgtcggaggcggcgattgtgcgcggcgaaccctcgcatcgtctcaagctcgatccaccttgggtcgatttcgcgaacgatgtgcagcgctcgatcgatggcatcgtggtgtcgcatcgctgtgatcgacggttgagtggaccgatgcatcaagagacgaattacagtcgtccgattcgcaacatccgtcgcgaggtgagcgaccaagaggtgcgtcacattcgatgcggcatcgccgagctgaccgtgaaagatgtggatgcgattgtcgatcctcgagtgcgcgacgcagtgaagcgacaactgcgcgcgttggatgaggcagatcccaaaaaggcattcaaaggcgacgagaatctgccttcgatgcgacatggcgacggtcgcgacgtcgcgattcgaaaggtccgcatcaaggtgcgcaagaaactcgatgttgtgggaagcgggaacgccaagcgttatgtagcgccaggctcaaatcatcacatggcagttgtggaggtgcttggaccaagtggcaaagtcgttgcgcgagaactagcggtggtgacattgcttgaagcggttcgaaggaagcagcgccgtgagccgatcgtgcagactgaatgggggccaaatcggcgcttggcgtttacgctgagaagcggcgatgtcgtggaaatgatgtttgattcccaatgcgaactttgcgtggttggcggcatatcaaaaggctcgaccgaaatgaagctccatatggacgcgcgtccaacatctgagctcaagaaaggagggaaggctggtggacgactgaagttcgcgccgaatcaattgctgcgcgcattgcggcgaaaggttgatgtgcgaccactcggaacaacctgttgtgccaatgactaatcgaatcatcgagatttccgacacccccgcgcgcctccgcactgatctcggtcgccttgctatcgaggtcacgggtcagcagccagtattcattccgatgcgcgatgtcgcggcaatcgttgtctcgaatccagcggtgacattgagtcagagcgtgctcgtcgagctcgcgcgggaaggcggcgtgttcgttgcgatgtcggcgcaattcctaccgacagcaatgatgcttccgctcgattcgcactcaacgcagacagcgcgaatggcgaagcaggcgcaagcgagtgaaccgacgaagaaacgtgcctggcaagtcatagtgcgcgcgaaggttcgggcgcagtgggctttgttgcagactctcgggcgtccagagactggcctcgatgatctcttgcggcgtgtgcagtcgggagatccagaaaacattgaggcgcaagcggcctcgcgatattggagggcgctgttcggagccgcgttcagaagagaccgagatgcgtcagatcagaatcgactcctcaattacgggtacgccgtgcttcgcgcggcaacagcacgagcgatctgcggagtcgggctgcacccgagtctcggggttcagcaccacaatcaatacaacccattctgcctcgcggatgatctgatggaaccgtatcgaccgctggttgaccgcgtggtggtcgacatcatgctgcgtgcgggtccacatgttgaaatgtcgcagccaatacgcggcgaactgatctccgcgcttctggaccgtcattcggtgcgcggcgagaatcgcacgctcttcgacttgctcaccagaagtgcctcaagttgcgcacgagtgctcacgggtgaagagcgcgatctcgacctctgggttccatgatgtctcggcgttcacttcgatcaaatccaatatcggggtacaaagcaatgtggctatttgcgatgttcgacctacccgtgaaatcgaaagcgcagcgcaagcggtacacccagtttcgaaagcatcttttgtacgaaggtttttgcatgctgcaatattcgatatatgctcggcactgtccgtcagaagagtcggccgcgcattaccgcgacagggttgcagcagaactcccgagcgaagggcaagttcgattgctctcggtgtctgatcgacagtttggaaagatggaagtgttcacaggagaaacgagcgttgcaccagagtcagcaccagcacaactcatgcttttctgaaggcaaaag

SEQ ID NO: 3409 - DNA, 6387 bp, synthetic construct
  misc_feature 1..6387: note = Synthetic
  source 1..6387: mol_type = other DNA
tggccacccgcgagatggccttcaaccagggcttctacaacctcttcctggccgtcgtcaccgggctgggcgtggctctgtcggcctgcggcgcgcacggtgccggcgcggcgctcatgctggcgggggcggggtcgatgctcgccgcggccgtcgtgctgttcgccggctcgcccgacaagcgcccggcggcgctcaagcagggcgtgctgccgctgctggccgtcgtgtgcgtcgggatcgcgctcctgtgagagcggaggggcgcggacggacccgtgcgccgacccgggcggggtgagggcggccggaccgaggccggaccgaggatggctctttgggatgcagcacttcgtgggagcgatccttcgttcctgagccgaacgaccgctagtacttgacacgttgactgggcaacgctagccttgaagtgaactgatcctcagtaagagactcctcgattgagtcttcgaattctccactgcctatccctccttgtgggtaggcagtctttttaaggggccgtttcatggttgaaacgaaaaggtatcgactcggtatcgatgtgggtattaattccttgggtatctgcgcggtcgaattggatgatggcgatcatccggagcgtctgctcaattgccaagtcgttgtgcatgatggaggccttgaccccacggcacagaaaatttcagggacaaggctggccgtttctggtgtggctcggcgggcgcgtcatctagtgaagcagcggcggcgcaggctcgaagagctcgacaagtttattgtgtcacagggatggcctctcactgatctttctgacagtgacgacccattccttccatggcgggtgcgtgctgaactggcagatggccgtgttcccaccgaggagctcggcgagaaactgtcgatcgctttgcgtcacatcgcgcgacaccgaggatggcgaaattcattcacgcgtgttgagtcattgctttccgtggatgaaccttctaagttctttgaagattttcgatcccatgccgaggatgtcttgaattatgatctttccaatgatgatctcacgaccgcgcagattgtcatgctggttggtctcgttgacgtcaaaggcggccgcagattgcgcgcaaacggtgagaaggaggggcttctcagggggaagctccaccagagtgacaatgctcgagagatcagaaagatattcgagacgcaaggactcgatcaagacttggctgtgcaggcaatcaacaaggtgttcatggcgaagaggcctggtgcaaaggcagccgagaaggccggacgagatccccttcccggtcaggatgctccgcgcgcgctgcgggcaagtctggtcttcgaagaatatcgcgttgctgctgcacttgggaatgtgcgtgtggtcggacttggagagaagcgccgtctgacccctgaagagatgaagaaggccttcaagttcttgacatcacgtgtcgacaatgacgtcatgtgggcagatgttgctgagtacttgggtttgccctcggcctcgttgcgcggtgcggcggctgatcttgacggagagcgtctgtcggcgaagccgccagtgatggtcactgagtcgcgcgttcttgccgctaagatcaagccactgagccgatggtgggaaactgctgacaccgatgacagggacaacttggtcaaggttctcacgcacggcgaggagcttgatgaatcgctgggtggtcttcttgccgagcttgacgagaatgatctggcgaaacttgaccaaattaatttgtcacccgggcgtgcggcatatggagaggactccttgagacgtctgactgctcggatgctgaatgatggctgtgatctctatgctgcacggaaaacagaatttggggttgagaatgactggcagcccaaggctccgcccattggtgaacccatcgggaatccgtccacggacagagtgctcaaagagactgcgcgtgtgatcaatgcgctccgatctgtttacggcgacccgctgtcggtcaacattgagcatgttcgagaaggctttgccagcacgcagatggcaaagcagcgtgatgccgagaatcaaaaaaggtataagaggaaccgagagattctggaacaaatcatgaaggaggagcaattgtcttctcctccgcgcagggaagatgttcaacgctatcttgcatatcagaggcagggtggcgtgtgtgtttattgtggcgaacccatcactttccggactgctgagatggatcacatcgttcctcgtgcgggtgttggttctacgaatactcgaaacaacttggtggcagtttgccgacggtgtaatcagtccaagggaaagatgaattttgcccggtgggccgatgaatgtggtattccaggggtcagcttggcagaagctgttgcgagggtggagatgtgggaaggagattcctcggatggctcggcatcgaccaaacggttcaagagggatgtcatctcgcgactcaagcgtacggatgaggaccccgagatcgatggacgcagcatggagtcagttgcctggatggcgcgtgaactgcggcgccgagtggaccaagagatcaaaggtgcaacggttaatgtttaccggggcgagctcactgcagaggctcgtaaggcctcggggatcgaaaaaatgattccctacatcgggggcggcgggaagactcgtttcgatcgcaggcatcatgcagtggacgccgcagtgattgcgatgatgcggccagctgttgcaaaagtactggcggagcgtactgagctgcggagggagcagcgttattcaactggcgaggattcatctgtgtggaagcagtaccaggggagtagtccgattctgtatcaggactggaagcaggacatgaacgtactggctgatttgctgaaaactgcttttgcagaggatcggattcccatcaggcagaacttgaggctgcgcatggcgaacagcgctgcgcatgaggcaaatccttcatcgctggaaaatactgggagaaaaggggcgaaagcgcctcgctatcgattgggtgatgcacttccagtcgatgtcattgacagggctggtacgcctgcgctctggtgcgctttgacacgactcccagattttaacgagaataagggtttgcccgaagacccatcgcgtatcatcaaggtgaatggtagggttgttaccgccgacgaacttcttccgattgggccagacaaggcctttgtcctcgtgcgcggtggatatgcgtccattggtgatcgcatccaccatgcgagagtttatcggattcccggaaaaaagaatccagtctatggaatggttcgtgtcttcgcggaagatttacgacgtcatgccaaggaagatcttttcaatgtcaggttggcgcctcagtcgatttcacttcgaatggctgaccacaaggtgcgccaagccgtcttggagggttctgctgaatatttgggctggctggttgcgaacgacgagattcacttgaacatgtcacggctaaaaaatgacaaggtcggacgtttcatgaagattcttccgatgatatcaagatggcgtgttgtcggattcggtgatcctcggacgttgagcttgaagccgattcagcttgccgaagaaggctttgaaaaattaccccctgatagcgaaattgttagatccaaagatgtccatgacatcgtagctggacatggttggcgggtcaaggtgaatgttttgtttgggaatcatgccccaattatcattcggcgtgattctctggggcggcctcgactcgtgtctgctgctcatcttccagtctgctggaattctgatcatggcacaatggcgggtagttgatctcctcaattttgagggaaatatcttttatcggcgcgggaatttatttctgtctaaagatcgtggcgaggctggcagtattcctttggctgaaatagcggtgattcttcttgggttaaaggttaatctagggccggctgttttgcagcaatgctgtggttacgacgtgttgcttgttccctgtcagtgggcgggcgtgccgaccggggccgtggccccatggtccgaccatactcgagttggtgctcgtcaacaggctcaagcggcgctgagcgtgccccgtcgtaaaaacgcatgggctcaaattgttcgcgctaaaataactggtcaagccaagaccatggagctcttcgacgaaaaggttgcatctgatcttttcggaattgctcggtctgttcgatctggtgatcctcagaacctagaatcacaagcggcgcggaagtattgggcacgtctcttcagagggagtggtgttggacgaatagctgggtttggctcggggaaaaatggaatgcttgactacggttacactgtaatgcgtggttattgtcttcgggcaattgtcgctgcaggtctttggcctgggttgggaatatttcataaaggaagaaataatccgtttcaccttgcagatgatttgattgagcctttcaggcctgcactggacgcggctgtttggatgatgcgtcctgatgcttctctggagaatcgagctgtcaagcatgctgtcgttgctgcggcggatcaggtgttcagtgattcagggctgactatatcatcggaaatgatttcacttgcccaacgcttcggaagttacgtggaaggtgatgttaggaagcttgaggtccctacttggaagggagggctcttccaagcatggtgaaaatagatgaggatgacgcagtgtggtgcttggtcatgttcgatcttccggtcaaaactatcgagcaacgccgtgatgccactgcttttcgcaaccacctgaaggaccttgggctctcaatggtccagctgagtgtttactgtcagtacatgccgcggtttcatatggtcaagcgcacagttgcggagatcatcagggttcttcctgaccaagggcaagtccgtatcgtttacatcacggacaagcagtggtcgaaagcgcttcggttctccaacaccgtgagcatcggtcaagaggaagcacctgcccagctgacgatttttgagtcctgactaggggtaaaacccctagtcaggactcgcatctcctctaacctcaagtctagcagggggaatgtgaactgatccccagcaggacagacgggttgtcgcaggcgaaagcaagtctagcagggggaatgtgaactgatccccagcggccccgtcgttggtgagggtggagccggcaagtctagcagggggaatgtgaactgatccccagcggccggccgggcggggtttccactgacgcaagtctagcagggggaatgtgaactgatccccagctgacggctacgcggttctgctcggcgctcaagtctagcagggggaatgtgaactgatccccagctggtggttgtcatgtcagtcatcctctccaagtctagcagggggaatgtgaactgatccccagcacctgaagctgggcaagggtgtgccggtcaagtctagcagggggaatgtgaactgatccccagcgccccgagtcccacctggagaaggcggccaagtctagcagggggaatgtgaactgatccccagcacagccatctactacttcgtccgccacacaagtctagcagggggaatgtgaactgatccccagctggtcatgccagttactctctctctctccaagtctagcagggggaatgtgaactgatccccagctgagcatgctcggatggccgcggacgctcaagtctagcagggggaatgtgaactgatccccagcgtactgcttcctgcttcctgcctggccacaagtctagcagggggaatgtgaactgatccccagctcctgcactgccgggatatcgctgatcacaagtctagcagggggaatgtgaactgatccccagccggtacaagctgtactgccaccaggacgcaagtctagcagggggaatgtgaactgatccccagctgtcgctggcgggcgcgtccggcggtggcaagtctagcagggggaatgtgaactgatccccagcggatcatgaacgcccgtggctcaatcatcaagtctagcagggggaatgtgaactgatccccagcccggtggcatgcagcatgaggctgacggcaagtctagcagggggaatgtgaactgatccccagcgatcgtgcccgccaatcgcatgcttcgccaagtctagcagggggaatgtgaactgatccccagcccggtggcatgcagcatgaggctgacggcaagtctagcagggggaatgtgaactgatccccagcgatcgtgcccgccaatcgcatgcttcgccaagtctagcagggggaatgtgaactgatccccagcccggtggcatgcagcatga

SEQ ID NO: 3410 - DNA, 23306 bp, synthetic construct
  misc_feature 1..23306: note = Synthetic
  source 1..23306: mol_type = other DNA
cattgaatccgccagcaacaagctcacggtgcgcccaggtgacacactcaccctgaacctgacggtatcggccacccgcaaggtccgcgtcgataacggtaagcgggaacagatcgtcatcgatgatgacgtacccgaatggattggccacctgttggcccgccacgccggggtaacggtggatgatgcggtactggtcagtcgccagaactataccgtccgcaaacccaagatggcgttccgggtgcccgtggtgaaggtgcgggcagtggcaacggttcaggacgccccggcgtttgccaaagccttcctcaacggcgttggacgacagaagggctatggcaccgggttgatcgaagtggtggccacatgagcgccaccctgcacaccgaattgcgccagattttcggcccggacggctggctggtgcagcgcgggggccaccacctgcccgaacagttgcagtacgctctgagcgtggcggactggctgaccggcgatacagagaaacccatcggcatgatcgagggtgacaccggcaccggcaaaaccctgggctacctgttcccggtcctcctgtactgggtacacaccggcaaacgcacggttatcgccacgcacacgatcgccttgcagaaccagattctgacgggcgatctggccctggtggaaagctaccttgccgatgccggccaccctgtcccgcgtgtggtgcagcgcctgggcatgcgtcatttcgtggacccgttgcgtgtggctcggctggcggacattaacccgaccggcgacatggcgctgtttcaggactgggccgacgaaagtgcggttaacgggtccggtctgattgacgaatggctggaacagtttggcccgatgcccgaagggctatcctccgaccgggtgtgcatcaaccccggctcacccagcaatgccaatccggcgtaccaggcgcacaagcgcattggtgacattggcgatattgtgctgaccagtcacatgatggtgttgctggaagcccggaccacgcaaccgatcctgaacctgcccgagcaatttacggcggtcctgttcgatgaggccgaccaactgcctgcctcggccgaaaccctgagcaaccgccgtgtgcagccgcgagaaatcatccgggaactgcaaacgctgatcggccagggctccgcgcaactggatcgccatttgctgcaggccacgcaaacgctgtcgagcattgatcagcggattcaggccatgggcgaagatcagcgggtgaccgaagtctcactggacggcgacaccgcattgacgcacaccgccagcgaactggtggcagaactacagcgcgagtgtgcgcggattcatggcgccctgcgccgatcggccctgggccgcgcagccaccggccaaggccacctccatgatgtgtgcgagttgcttcagtgggtggacaacttcaacgccgagtccaacgcacaagccggttttggcattcatgcgctggcctggtcgccggttcgccgcattccctcgctggcattccagcatgccaacccggggatgtttgtcagcaccctgtggcgtcacctccatcagcgggtgtgcctgacctccgcaacgctgggcgctaccgcacaggatgcgccggacgaatcggggctgttcgtgcctctgaaagcggcgctggccatcggcaaaaccgcaacggcagtcgagcggcaatacgcgcccgctgccttcggggaactggcggtggtgctggcggattccgaccagccacgtccgatcctcgcgctggatgccgagcatgaggccggtacgcaactgaacccggcatggctctcctatgccgtggccatgatccgcgaggcggtacagaccggcccgacactggtgctgaccacctcctatgccgaggccaaagcactgggtcggaacctcaatgccattcagccgctggttcatacccccgggaccgacctcaccacgctcattcgccggttgcaggggggtgagtcgcaggtgctggtttccccggccgcctggcagggcacctcgattcggggcgagagtggcgaacaactcatttgtaacgtggtgattacgcgcatcccctttcagccacccaaccccacccgggagcgcctggccatggccctggcggacgccgatgactggctaacgccggcaaaggcgcaaatgtacgagatccagaaggtccgccaccagaccctgatcaagctgcgccagggcattggccgactgatccgaagcaaagaggacaccggcacactctggattgccgacccgcggtttccgtccgccagccagcgcaccaagcattcgttttttgtccgggccatcccacgccggttttatccggcctacgaccaggcccacctgtttgttcgtcgcgggcatctcaaacctgcccgggcaccgattcctgaatccatacaggagttcatcaatctatgacacaccaaccgattcgtatccgcgccccactacgctcatcactgcgtctcgggcgcattccggttcacctggacgccctgctctggcatgcgctgttcctgaaaacgggtgacccagacgcggccagtgaacgcctgcccactctgctggcgcaggatcagggggtctatcgggcctcggccatggcgttcggcatctatccgaaccaggccccggtgatcgccacacaaacggccaccgtgggcactatgcgcaaggacaccgacctgctgcccgaactgatgcaccccaacgggcgcaagggcaagtacagcaagctgcaggttgaaggtgggccatacaaaaaccggctcaccaaatacccgacccaccatgccccggaagtggtctgggacgcggtgggggacggtgacgccatctgccacctgctgaatttctacgtgctggcggtgggcctggaggccaaccggggctttggggccgtcggcacattccagtgggacgccatgaacgaggatcacagttggcgcaccgcagagggtgacctggcgcgagtgctgcccgagtccattgccgccgaggtgaccgggaccaccccggatgccacccgcaaactgctttcaacgctcaccccgccctaccagcgggacaacatgaccgaacccagcgtggccccggtgcgggtccgccgaattgaactgaccacaccactgctcaatcaaggagcctgacccatgacacagccatccaagcaaacctatcgcttctccggcgccattaccgctgttaccggcctgacggtgacccggcccgacgacacctttgccagcccgcccaacagcccgttccggctgtcccgcaaggccgggcgcctgccccggatgggcgcgttgcgcgaagactccccggtgtacttcccggccaccagcctgcgtggtgccattcgccgtgccggtcgtaatctggtacgacgtgcggtgatccaggcaaccggggaggaaaccccgtggtcggtggatacccattacatgctgacccagggcgtggacaccaccaaccagaccctgaacgaaaaggtagccggggccattggcgtggaaaacgatctgcgtgatgaaaacccgttcctgagcctgttcggtcgctggaagttgcccgggcacctgggcatcgacaacgccctgccccgccatcagaactgcgtgtacgtggaaggcaaaggcgcccggagcaacgatttcaatcgcgacccggatcaggtgaagtttctcagtgtggaggaagcgaagcgcctgaaggacgtactggaacaggacgccctggcggccgaggaagccggcgatatcgacggccagatccgccagcttaaaaaggacatcagcgccctgactgacaaggacgaaaaagccgaggttaacgagcagatcaaggctctggaagcaaagaaaaaggcggtcaagtcggccaaggccgggagccaggagagcattcagcgccccatcgaaggctttgaggcgatccagccgggtacgaccatggatcaccgcatgctggtccagaacgccacggacctggagctgggcctgttcctggcctgcctgcgcgagttggcccgaaatccggtagtaggcggtcaccgttcgctgaactgcggtgaaatccggggcgagtggaccgtgcgttactggccggaaaccgagacccagccgattgtcgccggtacggtatccttgtcgtccgaaggctttgaggtccaggacaacaccgacgacgccgtgctgaccggagccctgaacgcctgggacgcggccgccaaagatccggctggccacaaactcaactttgagcgttttctgctggtggcctgacggccaccgcattgttctttaaaaatcaagcacctgaaaatagagtgtttcccccacgtatgggggtaaaccgctgaaacgagagcacaagaacgtcagtcgggagtgtttcccccacgtatgggggtaaaccgtatgtggggcttggtggtgctgatgaaatcaggtgtttcccccacgtatgggggtaaaccgcacccgccccgaccctcattgcaaccggcacagtgtttcccccacgtatgggggtaaaccggtaaattgcggaaatcagacacaaaaaaacccgtgtttcccccacgtatgggggtaaaccgcacggccccgacccgttgccaccggatcagcggtgtttcccccacgtatgggggtaaaccgcgatgattccgagctggaatccgattccctgagtgtttcccccacgtatgggggtaaaccggtgtaacttgcctgcggcaagttctcacccgagtgtttcccccacgtatgggggtaaaccgaataacggggaacgatagccacgccgtcgcgggtgtttcccccacgtatgggggtaaaccgaggtcacggatcaccgcaccggtgaggtccacgtgtttcccccacgtatgggggtaaaccgtacaccagcggcgtgattgcattcgccggtgaagtgtttcccccacgtatgggggtaaaccggtgtaacttgcctgcggcaagttctcacccgagtgtttcccccacgtatgggggtaaaccgggattggacacctccgaccttttcatcactgtgtgcttcccccacgtatgggggtaaaccgttggaacgcaccgccatagacgatgtgagcgggtgtttcccccacataagggggtaaaccgttgtatcagatgctgaaggcggcggactttgtgtgcttcccccaagtctgggggtaagccggaatttcgaataaccccgtctcgcgcacgagagtgtttcccccaagcctgggagaggggtagaccttacacacggactatttcaacatccggtggcagcctccccccacgtatggggggtaagccgatctcggggttctacatggtgccgccaactcagtgcccccccccacatctgggggtaagccggcctggcaggaacacgaaaaccggcgcacggtgtgctccccctacgcaggggggtaaaccgcgaggaaaggatcgtaattttgaggttatcgggtgtttcccccaagtatgggggtaagccatttccggatactgcgaggattgaaaactccagcgccccacgtatgagggggtaaactgagtaacgtccgtttgagcatggccggcttcctgtgtttcccccccgcgcattggtgggggggtaaaccgcacccgtatgtctcttttgccttgagacgatagtgccccacgtatatggggtagaccgtgattcatagccctgcataaaacatgggccgcacatcccccacgcatgggggtaagccgtaagcgctgtccttgggattgaggtgataaattgtgtttcccccacgtatggggggtaaatcgtccaggagcgtgcctatctctgaaacgttctagtgcctcccccacgtatggggtaaaccgaacacagaacgagacaccctcaccacggacctgtgtttcccccacgtatgggggttaacctgttcgacaggctcccgaaagcctttcgatgttgcgtagcgtccctgcatccgcaggggtaaatctttaaccatgagatatgcccatttatctcgctcccctccctacttatatgggggtcacccaaagtacctgttgattaacagactctgttgcaaagcggaggtcctgaccgcgttattttatttccggtcaggcttgaaaatcgtaggcggtacgcctactataagtggtgcgccaagcgcactacccaaaaataaccggcatcgccgaccaggagacatctatgaacaatcaatctactgttatcaaataccccaccaaccccatgaccagcgatattagcagccgtggcatcaacgtctcgggcctgcaaatcaaacccactgtggcacacgatggtcgcgccaatgaacgcattgaggtggtcgaaatcttcccgatcaacagtcgcggagaaccgtcttcaaagttcttgcgcctgcccatggaaagtaccaccctgcgccagcttgctgcgaaatttaatgagctggcggaccaggccgaaggccgggactggagcagccgggtccagaaacacatcgacaccttgcgccatcagctaccggacgatgaaagtgtcacggaactgctggatgacctgattcacgatgtgatcactgatagccgcaaagcgtcgttcgtgaacaaccagggttgggacgcccaggtgtggcatctggtgaacaccggtcaggatcacttgatcaacactcgcctgaaggattaaggagaacgttatggccattaacagcggctggtttcgcattattggcgctcactttgtgggtgctgtgttcctgcttatttgcaccgtactaatgggtctgctgtttggttcgctaacagacttcattcaccaaataacgggcatcgacctctttgccgaggtgccagccttcaaaccgatcgggtatgccgggatcgttacgcttgtagggatcgtctcaccgctgttggtgcgtgatctgttggaggaacaccaaagctatttggcgttgtggccgctgacggtgatcgccctgtgcttagcgatttaccagatacttggcggcccactggatctatggtttgcctacgatgttgctttgagcgtgactgtggtggtgatagcgcggattgtggaccgtcgcaaagtccagacgtttaccagtgaataacacctaacccatcgtcgcctgtcctacgggccggcgaactacgatataatttaaccttcgcaggtttggtataaatgccctattacgatgtcgttttgtgccacactggagacaagcaggaggacgccatgacccaaaacgcatcaccattgccgccattgcgcgttatcgcgcagccgctccctaaagcccaactggacgcggtacgcgccgctgccgaagacattgccgccaacctgatcggagctggcaccgaaaccattgaggccgaggcggacgcctgggccgaactggccggtcacctgatccagcgggccgacccggaaacgctggccagcgtgctggaatttcagaaaaacgggttactgagcaaccgctacgacttcggaatgaatgaagatggtacgcagggccaggaaaccggcatagaagccctgaacgccattcaggacgccatggtggccctgacacagagccaaccggcgtccaccacatcaggagacgatcatgcgaccgtttgaagccgttaccactgttccgctgactctggaacagatcaccggcctgctggatgccaccgaaaccaaggaggcacgatcccctgccatggagcaggccatcgccgaactgcaacgggctcaacaacacctgctgcgcttcgcgcacccggatacggtaaaaggcaccatgccgaatctcgcccgtttcgggttttcagcactgccagacgaccagtacgccaagcgcgtgtgcgcgctgacccaaggggcctcgtttgaccctcattttgtatgcttcaacgatcgacaatatgcggtgctggacattgtgcgccacaacccggccacaaccgcgatcgccgctccggacctgcgcctgggtttcgacaccatgaccggagcggtgcaggcggcgaccagtgaggtgttctgcaaagcgatcatccgcctgctggcgcatcagattccgccagccatgcggaacacactgagcggttactgcgatgccgacccgaccaaacccgacaactgggacaaagctgcccaggacaactcattactggcgatgatgggcgcccagcgcctgccattgcccatcagtgaacccgacacggtgtaacgcttatgcctcgtcccgacatcacccgacaccagatcattaccttcaaggctcccgggattcccgagccaattactggattcgtggacaccatttcgcgtaccgaactggtgatcacctttgcccagggacagggcgtgagcgagcttcgcaatacccgcggcggcatgctgccggtggatctgctggcgcggatcgacgcacgaccgcacacgggcacccccattccacccgccctgcaggcgcacattgacagccggcgagccagtgtggcgtttaaaaaaggcgatgtggtgctctttaactacaaggggcaactgcgcaccggtcgcctgttggctggcggccgacgcccggaggtggtgttgtcactgaccgaaaccatccggattgatccaacccgcatcacccgttgcacaccgccagcgatagagccccccttcttcgactggtacatggtgtccctcaaaggtatccgtggcgaagtgggcaaggaaggcttcatcgccgtcgtgggctacaagggcctgaaaaccgtggaagccacttgttctgggggaaacccggatgcgccctacgattactgcccggccggtaaaggcacctggaacgatgttaaacgcttccagcgcatggtgcgcaactacctgaccgatcacggcctctacctgccctgccccgaggacgcctggattgactgggcatggacctaccagccatcgggcgtgagctttctggattacctgcaccgaaaaaccaacgtcagcctggctcggatggaggatgtttgccggtgggcgagtgcgtaagaccaaggagaaatcaatgagtcggaaaaagagcactttcaagcaacgtagagcccttctacagaacggagtctacaagaaaaatggtcgagggaaagcaccccaaaaagccatttggaaggcaaacgccaaagcaagcagtgaggccggcaaggccatcaaacagtcccagaaagagtcgcagattcgcgatctaatgaaaaaagaggggattacctatgctcaggcagctatcgcactgatggattaggattgcctggcgggctttggtgtcaccgcgccaggcatgcttggagcatcatgtagctgtgccatggcaacataccacaacgctgatgatgcgagccacataggccgtacttttgcctaagcgtagcttagaccaccacaaaacgaaaaaaccggctctcctttgggagaagccggtttcttcaccctaacggccaacgaactgaatcgtcgcgtacagggctgagcagtgtggctggtcggggttgcatcctgcaaatgaagccgggccagcacggaccatattatagcaccgctacctggatgccgagaatcacaatctgggagctaatttaggcgagacaagcgaatacagggatcttgaggcagcccagggctggacaaattcacaggtgtcgatacgcaattaggagcccgtaccgtcgagcgaaacaaaccagaaataagaagcccgagccaccgcaaagcggctcgggcgggaacaaagcaacctcattcagaggaagtctgttgttgtagcaacggtctctctccccggaaagctacaacacaatttatgttacacagcaggcagtgcattgcaaccccctttcagcaaacgatttggagatagccactaatggaacaaacatcgctagatttgtcccaagcaatgaagaaggttgcgcaaccgcagaagccttatcggcttggcgtggatgtcggggttgcgtcaattggggccgccgctgtcactgatacagaaattctggggattcatgttagaacgtttgaaaaaggtgagatcaacgggaaaagcgggcgaaagcctttgaacgctgattatcggcggcaaaagggccagcgcaagcgcctacgacgcaaaaagaaccgtctattgagtttgcgtcggcttttccgacgtgtcggaatgatcgaatccgctgcgattgaggcattccctatctccagtacgtctccctggcaattaagaaccgagggcctggatcggcgcctcacgaacgaggaatgggcgcaagtcctgtatcacattgccaagcaccgggggtttcaatcaaaccggcgcgtagacatggatgaggccactaagctgtcggatgcagcaggagattcaccagaaactacaactaacacggaaagtgattccgatacaaaaaaaatgctggccggtgtggctgacaataaacggctattagctgaaaagggttaccggacgataggtgaagcggttgcccgtgaccctaagttttcccatagaatccgcaacaaggaagagtcctatagccataccatcggccgcgacgaaattaacgctgaactgaactgcttatttcaagcgcaaaatcattacggaaatcctcatgccactgaggaattatcagaacagattatcgacttaatcaactggcgccgcaaaaccgtaaccggcgatgatataaagcgaatggtcggacgctgcacgttagagcccaaagaataccgtgcagcaatacacagcgtctcggcagaagaattccgctggctttcaacgttaagccgactgcgaattgtcacacaaggagaatcccgacccctgactaagtgcgaatgggataaggttgtggacctaccctggcgtcaggaggctatcacgtacacctctatacgcaatgctatcggcctccggcatgatattcggtcacgattcaatattcgttatgagactggaggcaaaaaaacaaagacggacacaaaaaacgaaactaccaaagggcaaagtgccgatgcggttacaagtgaagtaaaaaccgccgaaaaagagacggcttttaaggcaaaaggttatcacattctacgaaaagcgtataaagcattcggctacgatgagcaatgggatagagatagattcaatacagagctactggacacgctggcgacagccgtgacgttctataaagatgactcggaaatacaagcgcatctggagacaaacgatactccagagtatgcaattcaaattgcattacgcctgccgacccttactaagttcagtaaactttccaacaaggcaatactgaaaatcctacctcacatgagagagcgccaatcgtacagcaatgcatgcttgttggccggatataaaaatcatcacaaacaatacgacgacacaccacagaatgggaagattccacggtcagccattgaacatattaaaaacacagtcgtttacagatctcttaaccaagccaggcgagtgataaatgccatggtgaaggaatatggtgcgccacaagaggtacacattgaactcgcccgcgatatggaaaaatcagccaagaaaaaagatgaaattgacctctggatgaagaaaagaaaaaaaaagaacgatgaactacgagaacgtttcggtaagaatctaagcagagacgagttgcttaaatataagttgtacgaagagcaaaacgggcaatgcgcctacagcttgcaacctatacaactcggacgcctacttgagccaaactatgtagaggttgaccatgctctgcctcgcagcagaagcatggataacagttataacaataaggtgctggtgcttaccaaacaaaatcgtgataaaggcgaccgaacaccttttgaatactttggagaagaccaggaaagcgtggactggaagcgttttacaaactgggtagaaagcaatccacagatgccgcaggcaaaacgacgaaaactactcacaaagagtctgcaaaaaggcatattggataacttttccgccagaaatttatccgacacacgttatattgcccgcgaacttaaaacgctcatagagcactacatactgaatacacccgaacgagagaaaacaaagtatgagcgttgcgtggtcatttctgggaaactgacagcccagatgcgccagctatggggtatctcgaaggcgcgcgatgtcagcgatcgccaccatggcagcgatgctgctgtcattgcttgtattacgccgagcatggttaggagaattacccgttatctgcaactccaagaacgccgagcaatgccatccgctcctggcaagggagatgaacatcccgccgtagtagctcgcgccatcccacatgcaccggttccgtggccaaccttcgaacatgaccttgaggccgcgctggagaaagtgctggtttcaagaccgcaatctcgcaaatggtctggcccgatacatgctgacactatctacggagagcacaaagaccaagaaacaaacacggtcgcaccaacacaacgaattaagcttacgcaattaacaaagagcaattataaaaatatcgttggttatgacgaagaaagaaataaggatttcattgatcaaattgaagagcgactagaatgtcataactttaatgggaaacaagctttcggtacgtcccaatcacccatttatcgaataaagaaaaacggagagcttggcccagaggtcaaaaaggttacgataaaactgcctataaaaaactcagtattcagaattcgtcgtggatatgtgaaaaacgcaaaaaatagcaccatctatatcaatatttaccaaaacacaaaaactggcaagttcgagatgcatccggtatatgcgaaagatctaacatcaagcgccaatgcgagcaagagcttcgagtatagtccagatctacagcttgtagatacaattcgacggggcgactatatagagataacgcgaagaaacggtgaggtcattagcggctactatgccacacataacattagcaccagtgtactggaattacagcctcacgataccactgatagccgcaataacagaacgccagcaatcaaaacgtctctaaatattgagcggtttcatattgatattcttgggcgaaaacgaagagtagttaggagggcaaaaaatgggctggcggacgatcgtgataagtaagccgtgttatctatcaaagactaacaatcaggccaacattcatataaagcaatctaaatcgaatatacaggtaccaatagaggatatatcctgcataattattgactcgcaaaaagcgacggtaacaagcgcacttttaggtgcgttgtcgcaagaaggtgctggacttgtagttactaatcacgaccacaagccggtgggcacactgctaccaagtgggtcctactataagcctctttcccgtttaaatggacagatagcagctaccaaggcaatgcagaaaaggtggcatcaagagattgttaaacaaaaggttcttaaccaggccgcaaccctggaaatgcatgactccccgattgccgcggcacatttatatcggctctgtgagcgggttcgatctggcgacccagataacatagaggcacatgcagcgcgccgatattttgaatgtgtgttcggtacgccacttcaaaggcgaaacgagtgcttgctaaatgatgcgttaaattatggatatgcggtggttagatcggtaattgcgcaacacattgtagcctccggtcttgaaccatctatcggcctatttcaccataatatgctaaacccgtttaaccttgctgatgacctcatcgagccatatcgccctgctatagatgcctggacccatcgcatcatcctgggaacaactaagtcaaacaacgcaactctgacacctgagacaaaaggtaaaatcatcggaatacttcatgaagatgtgcctaataaggctaacgaacacagaatgtctatatcaaataatgcgcaagaagttgttaggtccttagccgatggatacgagaaccatcggtatagaccattgccactaccttcaatgtcagacagaaaagctccatgagcattcaaacacgacgttttatgagattgatcgtattttttgatttgcccgtaacgacgccggagaagaaacgagcgtacatagaatttcgtcgctttttactaaaagatggcttcgttatgcttcagtggtctgtttatacacgaattacgaacaattacgacgacacgaaaaagcatatgcgacgcctggagcgcaatgccccacccgagggatcagtacggtgccttgaggtaactgagaagcaattcacgagtatggccatattggttgggcaaatgagccagcaagagaaatacgtcaacagcaaccagatgactctactgtgacccactttttgggaaggaaaagagttaaaaggcctggcagatcaagaacctgccaggcagttattatagctttccggggagagagaggaaactacaactgttcacccaatcgcccatgggggtctcggattatagctttccggggagagagaggaaactacaacttcgattgctcggcttttttgagcttcgatattatagctttccggggagagagaggaaactacaaccgcgtaatcggctataatgttcatcgagtaattatagctttccggggagagagaggaaactacaactctcggtattcgatggtttgcacccatcggattatagctttccggggagagagaggaaactacaacggtcagtctcgcacatcggcacttgctgaaattatagctttccggggagagagaggaaactacaacggacccagcaccgacaattttttgagaaggattatagctttccggggagagagaggaaactacaacctttccacggccctggcgggcctatgacgcattatagctttccggggagagagaggaaactacaactcaggtgccttcaaccatagggcaatctgtattatagctttccggggagagagaggaaactacaacggctggccgtccagccgaacgtggaagtcgattatagctttccggggagagagaggaaactacaacttacccgaactggacggccagggctcgtgcattatagctttccggggagagagaggaaactgcaaccctgggcggaaccaatgatggcgtcgtattattatagcttcccggagagaagaagctatgccactgcggtccttgcatcacccacatgcaaattcaccaaaatcaccaccccctcttcgcgctactgtatagttgaacagactgaccaaacatacagatataggtgcgtagcactaacaacgcattatcaatcgcgaccccattccaaggacgacaaccaaaggtggatgatcgtgggcaattcaaatcaaacacccgaccccaacaagttgaggccccggcaaacccttcgatttgcagcgtttgactgcttgctttattgggagcggagcgttaacactcggttactagcggagtatctggccactccgcaggacacgataaaacaggcgttcacacagtatcgctcattttattcgccacacgatattatctatgactccgttgccaaacgattccacccatctgctacgttccacccaaagtttaccttgggcaccatccaggaatacgtggcgttaatagaacgataccaaaaacaccagagcgttctggctttgtcgcatcagccacttcaatggctggaccacgggcccagctatcaccatcagcctgaccccctaatttttgcaaacattatccgctgcatacgggaacaaaaaccgatccagataacatacgcctcctggcaacacccggaaggccagcagcgcgtcattcatccccatgcagtggcccaatcacacaaccggtggcattgccgagcattcgatgactttcatcaggaacaccgggatttcaatctggggcggatcagcaaccctatgatattacctgaccgcatctacgtcgatggagccaaggatcgcccctggaacacgattatcgccataaggctggcccctaatcctgacttgtcgccctcctgccaggccatgattgagcgcgaatacaacatggacggtgaccacgaattaaaactccggtgccgcctatccatggctcaatacgtcatccagtcactgccggtggtagatccccgagatccacggccagaaaaccccatgaagcaatacctagtggtaaagaaccctggggagatagaggccggcctgttttaaatgaatagagaaggaatcaagatgccatcgctatacaccccaacgttggagcaggtaagccaggtcgccgaacaaattaagcagcaaggcgggcgccccaatgttcgagaaatcaaaaaccgccttggaggcaacccatcggcgaacacaatactcaaacacctggcaacctggcgagaagataatttgccaaaccctatgccttactttgactcaaaagaatgggaagaagccacaaggcgaacagtcgaaaagatatggaacgaggcggtcaccgccgcgaaaaaggaggtcgccaaagaaatgcacgcactcaagcaggaaaacgaaagactgcgctcacgcattatcgatctcgaacttaacaaagcacaatgaaggatggctcaggcaatgtacgatttggatgagtttgaccaggctacagcatacaacacctcaacgattgccccacgagatttcggcctcaccgccatttatctggtagacagttaccccaaaggccgaatcgtcaaagtggaaacggatggccacaccttacttaccgggtcgaatggtgatggtaaaaccgctttcttgcgactccttcctgttttttacggtgaaacacccggcaccatggttcgcgggtcagcaagcgtgggcaacaagagctttgccaaattttactttcctcggccttgctcatacgttgtctatgaatacctgagtcatgggtcgcccaaaatggcgatcttttttgacgccaatggtaccgagaccgttgatcggattttcgctgattccgcgtttcgcgatgacctttttttgaataatgagaaagacaacttcgcaccgagcaacaccctgtatcagcgtttacgctctgcaaatatcggctaccacaggtgtggcagcgtagatgaattccgaagcactttactcaaggggcgcgctcaaaagtcagcgcaatttggcctgtgcgagagaattcaagacctctatcacatcacacctttgttcaaaagcatgttttcgcgatctgcctcttttgatgacctggcaattgtcattcaagactacgcaacagacaaactttcgccggaaggtcgcgacaacctgagaagctttccagtaaagccttctgactacgaggtgatccttgaggaatacgacgttctgcaagccctggaattcaacttacgacacctttcagacctgaaatcctctcgcgaagcctatttggccacattgaaatccattgctgccctgaaagaagccgcgaccataaaactggacgaacttcaaaaaacacagcatgagttaaacgaaagacgcgaagaaatcgtgacacagaagctcgatcgcttagaggaattgcaaactgagcacgaggccattcgcgaacggcaagaggcggccgagaggcgcctacaagaccccaaggctgaactgcaggagataaccagtcgcctgggccgctaccagcgccacaacatggacgccaaaaaagagttggttgaaacgctgccggatctgcaaaaaaaacgagaccagcttcagtccgaattacgggccctccaaaaccagattcaagatgtcagcgcccgaatccagtcgcaggttcaggacctccagaacctgaaagccgaaaacagcaattacgcacagaagcgggaaatagaactgggggagcaacgtggacaactcaaagatcaacatcaccagcatgtcgagcgcatccgagagagagcaagagccacagaggaacgcctgaaaacggagttcgagaaacaggcaagcgaactacggcagaaaatccacgatctggataagcaaatcgaaaggaagcgaggcgaaatggcctccccaagcgcacctcaagaactattgaagcagaacaaggcgctaaacactaatcgcctgacggccgaacaggaaagagatactgcagagcgtgagctgaacgcggcagaaacccgcctctccgaagcacgagaaaattatgaccacgcagagcgcgactaccgccgtcaggatcaagtcgaatctgatattggcgagcaaataggccgccttaaaaccttgattaatggtccagaagggtccctgatccaatttctgaatcgaaacaaaccgggatgggaagacacactggggaggctgttatccgatgacgtgctactgcacaaccagaacctcaaacctcgcattatccccggcagtcacgactcaaccatttgcggcatagagatagattttagtggcctaccgaacgccgacctcaatcctgagcgattgcagctaaccctaagcgagcttgaacgtaaatacgaaacagcactaaaggaaaccaaactggccgcggccaagttgtcgaattgtagtaaggcacacgaaagggcccacaaagaaaaagcagaagctctatcaaatcgtgacgccgcgaaacgaaaagtagaggaagcccggaagctctatgaagaaaataaccgggaaattgacaaagcgaagcgtgaggcccgcgaaagcatagaagccagcataactgagttgcaggaaaatgtagcaactctacggcaggaactggatagccacaaaatcaagcatgacacccaactcaatgaggccaataacaccgaacagcgggaaatcaacgaggcccaaaccgagacaaatcagcaggtcgccaagattgatgaagcaatccgaaatctgcagcgcgactgcagagccgaggaacagcgcctgaacggtctaatcagcaagatcaaacagggccaacccgataacgaaaaggaagttgaacagcttaacgagcggctatcaacaatagaaacggaaatagcaaaagccaaagaaagcgaatcggaggtgcaagtgtacctggcatttctgaacgaagaagtgccaaaaatcgaagggctccgagaaagcgtagaggcgattcagcgcgacataaaggcaacgaaagatgaactggtaactcatcgaaaagaaaaggatgccgaagagaagaactttgaccggtccattcgggagactgaacagaaaattgccggagtgcaggacaaccaaacccagctagagaaccgtgttattacgcacgatccgctggttggtgtagcaaccgtagctgacccggataccgtcgagctatacagccaacaatcgccagaagccatcgccaacaaatatcagcaaacggctggcccagggattcgcgaaaagcataatgcgctcaaagagaaaaccgagcgcttcctgcgagtattccacaacagccgcagggataactcgcccaattccgctctgaacgcaatcatagagtctttggaaaaagacgacgctctgggagatgaccgcaccttgattcacggtaccgcgatcgtccgatactttgaaggagatggaaaatcagatcacgacacaatcaagggtgcgctggcgcagagttttatgggactcgatgccattgtgaagtacgaatccgctttgaagcgcgttgagagcaatatcaagcgctttggcaaagaactaagtgaccacatcaaccaagcgcgagacttcccaagcatccagaacattcaggtgaacatcgacttcgatttaaccaagctgaactattggagttacattcgtagcctggcccgccaagttgaagaatggaagcgaaacaatggagggctcagtcgtgaactgccccacccgggtctcatacacgagctaaaaaactatcttcgaacgcaaaacagttcgatgccgaacgacacaggcctggacctgctttacaagcagataaacttctcatttcaagtggtcgaaaacggtcaactcagaaatgcaaacaacccccgagagcttgagagcatttcatcgaacggtttgtcctacatagtgctgatcgtggtcttccaggcattcctgcaaagcctgcgaggcgacagtgacattcatttcaattgggctatcgatgaattgagggcgcttgaccacaaaaatcgcagtgtattgctggaaatgcttgaggaaaacaacatccatttgatcacagcctgcccggactacgataaccgagacacccgtattttcgatgccgcatatcgaataaaccggccggataagcaatccgacgagcgcgacttcatgagaatcattcatgatcggaacgaagggaatgaaacagaaggcctggacaacccattcgcacacgccctggaaggagatctagccaatgaatgaaaagctccacaccgaagttcttgaaaagctgatccagggcaccgtgatctgcaaatggtcagatcgaaaatcgaacgactacctggacaacatagcgaatcgggacaacgtggatttttggctttcctccttggggatgcaggtagcccagaccccaaatgaggacggctactacaccacctacatgagcagtcacgccaaggcccgggaaacagcaaaagcgcaattcaaagaaatcatggaaaaaatgcgtttttatgtgctggcgttctcgaccctgatggatgccgttgatccagatcgcgccttgcacccaggcatggagatcctgcatagcaaattgctggatcgcctcaacgacgaccaggacatgcgcaatgatgtagccgcaaccctggccgaaatgccccgaaacaggcccaggagcactgccagcaacacgcacgaccaactggacgccatgctgaaagtgctcgtggatgacggactgctatttttagccaatccacagattcgcatgtatctggtcactgctaaatgggacatcattcaggagatgatcgagtttatcgccgaccatgaatccgtccccgtcgatgaccctgacggacaaggggagcaggaggcacttctgtgagccaaagcccaaaagacatcaagcaccccattgaaacattgattgaaaatatgtaccggtgccggtccctgattgctaacgcctatgaccagcaggaagtggacgtagtaagcggcgactggtcatctctggagcccctgatttcggcgaatctggtgcgctcacgcgggcgccacaccattcgattaaatcgacgccttgtaagcatcttggaccaggcgctccgaaaaaatcagattattgccatcaatgaaaacctcggcgcccttctgcatgcagcccaacttaacgtccgcaacatgcttgatgaaatggcggattacaattatgagcaggctgcagcctatcgcacagatgccgaaaaccggctcctggagatttacgatgtaaccgcggatgatgtaaacgccattcacgaacgggtcactcgaaattacggtgtaaaagtcagcacatcagccagaaaagccgagtacgaaatgtacgcccggcaacttgactccctgcaagaagcgctcaacaagattgacctcgcgttaaaagaagaaccattcatactagatgacagtatccaggattttattgccaaccttgacgctgaatccattggtaccgtcaccaagaagattcagtcaatcacaaagattatccgcgaacacctcttcaaaatccgccagcttgaacagaaggcgctgaaaatccgggccgtatccaggcatctgcgcaacaaccctgggttcctgggctccctgaaccttgaagactttgacgatacacccgacataaacagactcccctatcttcgcgcaatcaatcccgtgaaacttcgggcattgcccgatatccatgacgccgatattcgagccaaatgtgccgaattcatactcaaacaaagccagaaacaccgagggccaaaaactcaaaagccacgcgaaaattctgagttgaagtccacaacccagccaaccgacattaccgaaccaccagagatagatcgcgtgatttggaggctgtttgcccaatgcctttcccaaggtcaacctgtcagcgcggtagagttttggaaagccaaccgccccactctctccagagaactgcaggaatggaaggtcatggagtggctgtatatgctgtcaggatatctcgactcggaccctccaatcccccatggtcgcaaacgaacatctaaactgatccggccaaagtacgtcacctggccagcgccactcctatctggaaacaaagacctaaaagatattgcaattcaacccgtaaacaagcgagtaatagcaaaccatggacaaatttcagaaccccgacagaacgaccattctgcaagctctcaaggtggcgcaatgctcggcgaacaaccagcacctgaagctgaccaaagcccttcaaacattcgcaaacaacggcattgggtggacgatcggggcgaagacatttgcttttgatcgtgctggtcgtgaggctattcgacaatggctgggcagtcacggaattgactggcgcatagatccgatagattaccaaggcgactacaagcacatggccgccctatccagcctcgaaaagacaggcgggcaaccagttaccaaacattggataccctgcgtcccactggacgaccagctaaagattaacggcgccacagtagggccactgccctatgggacgcacctgacgattgacacaacaacggcattgctcgacaacctgaaggggatcgtcattatagagaacctttctttgatgactgaattggcagccattagaaacctcccccattttgccgataaggggtggctggcagtctttcgcggttcacctcagaacccgaaagggctcaagtgggcgcagagcgctgcccgaaaacgaaacattcccctggtgggctttttcgattttgatccagccggcttggaaaacggactaggcagccagtgcgatgctctcatactaccggatttaagtgatttaacggcctcagctcaaaggctgccagaagcaaagccttcggattttcaggatcaata

SEQ ID NO: 3411 - DNA, 24098 bp, synthetic construct
  variation 12922..13510: note = note, n is a, c, g, or t
  variation 17761..18372: note = note, n is a, c, g, or t
  variation 4766..5278: note = note, n is a, c, g, or t
  variation 14126..14730: note = note, n is a, c, g, or t
  source 1..24098: mol_type = other DNA
  variation 23327..23999: note = note, n is a, c, g, or t
  misc_feature 1..24098: note = Synthetic
  variation 22497..23122: note = note, n is a, c, g, or t
  variation 14868..15490: note = note, n is a, c, g, or t
  variation 16118..16715: note = note, n is a, c, g, or t
  variation 9283..9850: note = note, n is a, c, g, or t
  variation 5348..5962: note = note, n is a, c, g, or t
cttgcaaggctgctggcgttccatgcattgctgatggtggtattcactattctggcgatattgctaaggctttggtcgctggtgctgacaccgttatgctcggcggtactttggctggttgtgaggaagctcctggagagaaggttttgcttcacggcaagcagtacaagctttatcgtggcatgggttcgcttggcgcaatggctcctcgcggtaagaagtcttattcgaaggatcgttacttccaggcagacgttactagctccgacaaggtggttccagaaggcgtggaaggagaagttccatatcgcggtccacttaacgctgtgctttaccagttgcttggcggcttgcatcagtccatgttctacgttggtgcgcacaatattaaggaaatgcaagagcgcggtcgctttattcgcattacggatgctggtcttcgcgaatcgcatcctcacgatatcgtgatgactgcagaagcgccaaactacagcggtttccacaactaaatcgcaagttgtgtaagttgcgtaagttgcgtaagttgtgcgtataagtcgcaactattttaaacggcgaaaagttaatcaagtttcccacaacttgcatgcttttcgtcgtttttgttttgacaattcgtataaaattattatatagttagtgggatatcccactaaaaacgaggtgattttgtggaagtagtgaaagattatgacgttcgtcttgatagtaaaaagcgtgtaactctgcgcggcgctaaatatccttattacaatgttaaagaatgtgataatggttgtattttattagaacctcgtgagcttactattcctaagagtatctcttctaaaactcttaaaagtatggatgaagcaatccgcaattttaagattggcaaagtctctgaacctgttgatctttctgacttctaggagtaagtgaatgaacttcaatattagaatgggtattccagagatgtctaatatttgggagagattgaagaaagagtttctagaaggcagtataagtaaaaaagatctttctctttataagaaatggggaaaatctatgaaacttttatctgaaaatccaaggcatccaggattgcatactcatgatattgaagaattgacaaatagatatggtgttagagtttggcaatcctacttggagaataaaacaagtagtgcaatgagaatgtattgggtttatggtccagatcatatgtcaataactattatcggtttagagcctcaccctgaagataagaaaaatggatcatattctagaatttcactttctgatatgccagagatgtgattttagctgttagtcgtcgctgggaagatgtaggctgatgggttcgaaaaaatattaggaaaggaacgaaaatggctgaagctaaggaagatcttacgtttacgccggaagaatcgcgcttaatttggattgattgcgagatgacaggtctcgatattttccacgacgaattatgcgaagtatctgtagttccaactgattttaatttgaaagttttggacgacggaattgatttagtgattaagccgagcgatgctgctgtggctcatatgaacgatttcgtacgcaatatgcacacttcttccggacttgttgacgaatggaataaaaacggtttgcctttggaagaagcgcaaaagcaggtagttgagtacgtaaagcgttttttgccggcttgcggaaaagcgcatcttgcaggcaactccgttggctccgacaaaaagttcctcgaccgttacatgccagatttaatggcaaatctgcactatcgcgtaatagacgtaagcacgttgaaggagatttcgcgcagactttacccagatgtttaccgcaataagccggcaaaacatggcggtcaccgtgcgctcgcagatattattgagtcgattgacgagttgcgttactaccgcgatatgatgttcgtgccagctccaggaccaagcgaagcacaggcaaaagctggcgcacagcacattgagagcacgagcttgcttcgtgactatgagcgccgcggtgaagcattagaagacgtaaattccgcagaaaagcgcgactattaaacaaagcgcgactactaaacgcaataaaaggtactgccaatgaagcaatccgaagccctaaccataatcaacgctggtgcaagcgttttcattaccggcgctccgggtgcaggtaaaacctacgtattaaacgaagctattcgcgcaatgcgaaaaaacggtttaagcgtggctgtaacggcttctaccggaatcgcagcaacgcatttaaacggtcaaaccattcactcgtggagtggagttggagtttcaaacgcgcttagcgattcgcttcttaaaaccattagagctaggcgagggaaacgcataaaagccacggaagtgctcgtgttggacgaagtttcaatgattcacgcgtggctttttgacatggttgatgaagtatgccgtaaagtgcgcaaaaactctgctcccttcggcggacttcaagtagttatttcgggagatttcttccagctgcctcctgtgagtgcttctatgcgaaatcgcgatgtgttcgagccaagtccagagtttattgagtcgcgcgaaaagtatgctgctgctggcaagaatccagaaggctatattacggaatctttcgcctgggatgctttaaagcctgttgtgtgctatttaactgagcaacatcgtcaggatgacggcaaattgcttgaagttttgacggatattcgtggcggtcttgtaagcgacgaagataagcaagtgcttgccagtcgcctcggtgagtatccgcaaggcgatgaagtttcggttcatcttttccctacgaactcacaggcagatggcttaaataatgtgcagcttgcggcaattgatgctgagcctcacgaatttgtggcaacagaagccggccctaaaaatctcgtcgagcgtttaaaaaagaatatgcttgctccggaacggcttgtactaaaggctggagctgcagtgatggcgttgcgaaatgatcaagataagcaatatgtgaatggctctgttgggcgagttttgagattcgcacctgaatctaaaggtggatggccgattgttgagtttgaaaacggcaatattgtcactcttaagccagctgcatgggaaatgacggatggtgagactgttcttgctagcgtaaatcaagtgccacttagatgcgcgtggggaattacgattcataaatcgcaaggtatgacgcttgacagtgcggtaatggatttgcgtaaaacttttgctcccggaatgggatatgtggcgctttctcgcgtggaaaatcttggcgggctttatttggaaggtattaacgatcgcgcgtttagtgtttcggcggatgctgtactgttagacggattcttgcgtgaggcttctaaacgcgcgagtgagttgcttgctaacgacggtgctgctgctttcgtaacaaataatgcggaagatgattctgcaaatcagcaagagtttgatattttcgcctctagtgattacgcgtataatgacgaattttccttcgacgatgagttctagctttttgtagctctaatcgttgtttttagctacaaagtcgggaaaatcttccgctttttgtagctctaatcgtcgttttaagctacaaagtcgggaaagtgttattgctattgtttaatagtgtaaacaagtgtttatgtcctcatgcgcaaatagattggaacgcatgaattccaatgtacttcgtatgtctcagctgttccttcgtacgctgcgcgaggatccagcagacgcggacgtgacttccgcaaaacttatgcagcgcgcaggctatattcgtaaatccgctccaggtgtgtggacttggttgccgctcggactcaaggttttaaacaaggttcaggcgattattcgtgaagaaatcaacggtatcggtgcgcaggaggtccactttccagcgcttcttccacgcgagccttatgaggcgacaaaccgttgggaagaatacggcgacaacattttccgccttaaggatcgtcatgaggctgactatcttcttgctccaacgcacgaagaagttttcacgctccttgttaaggatatgtattcttcttacaaggatttgccagttactttgtatcagattcaaacgaagtatcgcgacgaattccgtcctcgcgcaggtcttattcgcggtcgcgagtttattatgcaggatggttattcgttctcgattgacgaagatggtttgaagtctgcttatgttgaagagcgcgctgcttacgctcgaatttttgaccgtttaggcattaaatatgtgattgttcacgctgtttctggccctatgggcggatcggattctgaggaattcttggctccaatggcaattggcgaagatacttttgcgcttgctccttctggaaaagcttggaatgttgaggctttgaccacaccagaaatgcaagatgttgactgctcggcaactcctaaaatggaagctcttgatactccagatgctaagacgattgaagctttggttaaagtttctaacgatttgcatccacgcaaagacggccgcgaatggcaagcagacgacactttgaagaatctgattattgctgttaagcacccggctgatgctgagggcggcgagcacgaggagccatggcgcgaaatcgtggctattggtattccaggtgatcgccaggtagatatgaagcgtcttgaagnnnnnnnnnnnnnnnnnnnnnnnnnnnnnnnnnnnnnnnnnnnnnnnnnnnnnnnnnnnnnnnnnnnnnnnnnnnnnnnnnnnnnnnnnnnnnnnnnnnnnnnnnnnnnnnnnnnnnnnnnnnnnnnnnnnnnnnnnnnnnnnnnnnnnnnnnnnnnnnnnnnnnnnnnnnnnnnnnnnnnnnnnnnnnnnnnnnnnnnnnnnnnnnnnnnnnnnnnnnnnnnnnnnnnnnnnnnnnnnnnnnnnnnnnnnnnnnnnnnnnnnnnnnnnnnnnnnnnnnnnnnnnnnnnnnnnnnnnnnnnnnnnnnnnnnnnnnnnnnnnnnnnnnnnnnnnnnnnnnnnnnnnnnnnnnnnnnnnnnnnnnnnnnnnnnnnnnnnnnnnnnnnnnnnnnnnnnnnnnnnnnnnnnnnnnnnnnnnnnnnnnnnnnnnnnnnnnnnnnnnnnnnnnnnnnnnnnnnnnnnnnnnnnnnnnnnnnnnnnnnnnnnnnnnnnnnnnnnnnnnnnnnnnnnnnnnctcagtttgctcctgcagaaattgaagaagcaactgaggatgattttaaggctcatcctgagtttgttannnnnnnnnnnnnnnnnnnnnnnnnnnnnnnnnnnnnnnnnnnnnnnnnnnnnnnnnnnnnnnnnnnnnnnnnnnnnnnnnnnnnnnnnnnnnnnnnnnnnnnnnnnnnnnnnnnnnnnnnnnnnnnnnnnnnnnnnnnnnnnnnnnnnnnnnnnnnnnnnnnnnnnnnnnnnnnnnnnnnnnnnnnnnnnnnnnnnnnnnnnnnnnnnnnnnnnnnnnnnnnnnnnnnnnnnnnnnnnnnnnnnnnnnnnnnnnnnnnnnnnnnnnnnnnnnnnnnnnnnnnnnnnnnnnnnnnnnnnnnnnnnnnnnnnnnnnnnnnnnnnnnnnnnnnnnnnnnnnnnnnnnnnnnnnnnnnnnnnnnnnnnnnnnnnnnnnnnnnnnnnnnnnnnnnnnnnnnnnnnnnnnnnnnnnnnnnnnnnnnnnnnnnnnnnnnnnnnnnnnnnnnnnnnnnnnnnnnnnnnnnnnnnnnnnnnnnnnnnnnnnnnnnnnnnnnnnnnnnnnnnnnnnnnnnnnnnnnnnnnnnnnnnnnnnnnnnnnnnnnnnnnnnnnnnnnnnnnnnnnnnnnnnnnnnnnnnnnnnnnnnnnnnnnnnnnnnnnnnnnnnnnnnnnnnnnnnagggctacattggctttagcgtattaggtcctcaagctcgcaaagagggtagtggaattgaaaatcctgtccgctacttgatggatgctcacgttgcaaagggtagcgcttggattacaggagctgacgaagacggaaagcatgtttataacgctgtttacggccgcgattttgaggctgatggtgttgttgaagcagctcaggttcgcgacggcgatatgagcccagatggttctggtccattgagcttcgaacgcggtgttgagattggtcaggtgttccagcttggtttaaagtattctaaggctttgggcttaagcgttcttaacgaaaacggtaaggctgtgccggtttggatgggctgctatggtattggcgttagccgcgtgattgcatgcttggcagaaacgcatcacgacgatgctggtcttgcatggcctatggcgattgctccagctcaagttcacgtcgttgctacaggcaaggatcaagttgctttcgatgctgctgagaaggttgttgaagagcttagtaagcagggaatcgaagtaatcttcgacgatcgtccaaaggtttctccaggcgtgaagttcaaggatgctgagcttgttggcgttccgctgattgctgtagccggccgcgatactgtgaacaatggaacgattgaaatccgcgatcgcaacggttcaaacgttgaggcagttccagtggatgaggctgctgctcgaattgtagagcgcgttcgcgaacagttgtaatcgcaataactgttaacaacgaatcagcgattaagcaattaaactattaaacaattaaacgactaagcaatattgccgttggtgtaatgctttgcatattatacgcattattttcagcggcaatattgctatgaatagtaaaaaattatataaattattagaatagaatgttaatgagttttaatgtttaattctattaaaactttctaaaaatcatttacacctccttcaatatcgtcatagtggttttcttcgacttgtgagccgaaatctattgtttcttttgctgaagattcagcatcataatggtattcttggctgtcgttttcttgcgaagaatccatagaataagtattagccatagggtttttcatcgccaagctcaaatcttgattggaataagtatcttgatttgcccgattttcttggtttatttgattagtgtgatatttactattgttactctgatcggttcttccacgattataagagtatttagtaaaagcactaattcctcgatttaggtcgtgtccaattgcggtggcttctagtacaactcgagaccggtcttctccatctttgtgccaggattccgtgtttaaatttccgcacacgactatcgcatctcccttatgcacgctttttagcacatttgcagctaaagacttgtatgcttttactgtcatccaagttgtcggtctatctttccactgtctttcctcgctatggtagtaagacgttgtgcttcctattctaagtgagcatgctggtgagttttcgttgcgactaaagttcacagggtcactacctacatagccgctgattgttagtgttgcttgttgttgtgccatattcttaacctttcaaaagtttggactgcgactaatttaaatctcaaaattcatcacgcaacacgtgttgattattgtgattttcaataaattcgccgcagtagaatcaactatgaagtatcaaaaatagttttgcaagttatttttatcaatgtggttaaagcctatgctttatgcacatcgtttaaaaactcttgacaaaatatgtaaaattgagtaggcgagtctaaaatgtgtaaaatatatgtagattgatatacttagcgaaagtagtttttgtttttcattagcattggaaggtgaagcttgagttttttgcctacttgtttgtgttatttgaatcagggattactgaaaagtagttattaatcacgtggagagaggtctacatttatgtggcataagtcgcacgtattttctgcaaagaaatgtttagctgctgcggcatcagctgttgcttgcgtagcaatgattggatctactgccgtatctgctagtgctttggttatagtgcaaaatcacagtgttgctaatgttaatactaattggcaagttaagaatcagtcggctgcaagctacattttaggtgcaattcgtgatgtgcgttcaaagtattatgacgatggcgttacccttatgaacggtatgactcttgcagattatgttacttctaagggtcttacaaaagaacagtatattaatgatattcgctacgatcgtgctaatgaagaggatgcttatcgtcgtgcaaatgagactgttcagcatggaaaacttggacattttgctgcggatggtgtgagccttccaaactacgatggtcgtaaggcttggggcgaaaacattgcttggggtgaaagctcagaagaatctatgtcggattggaccgctggagaggagtctgcgttacaccaatctaatggtgctgaaactacttacaatgctcatctttaccagattttgaatccagaaaacatttccttcggatatggtgaagtagctggtacctcatacggaagagtatctgttttaactctttcaactcaggttggagacactgactacccacaaggcaagttaggtgttgctcctcaccttgattttgcttggattatccgtaataacgatattgctgttggtgcaaatgcttacaccgacaagcagcttgagtatcgttggctttcttacaatttgaatactcagcagtgggctactattgctgattggggtactggaaactgggcttcttgggttacaaagccaggtgactattggctgcattgtgaagctcgtgatccttctactaagaaagttattttagaaaagacaattgctttccactacacagttccaagccaaacagttattactggaacttatgctggttggcaaggcaatagtgttcttcttggtgcatccactaataatcctaatggctctaccaagattaagatttatgattacaatgctaagcagtgggttgaaggatacgatggcccttgggctttgtggagcccacgcccaggcatttactggactcatttcgaagcttacgatgagaatggtaatttgtcggatgttaagacctacgcctttggcgtgtgaatctgattagtaaatctgattagtatcatttaaaaagcctgcaaacgttttaaacgcttgcaggcttttgtttacttatttactttatttgtgttttatttgcaacnnnnnnnnnnnnnnnnnnnnnnnnnnnnnnnnnnnnnnnnnnnnnnnnnnnnnnnnnnnnnnnnnnnnnnnnnnnnnnnnnnnnnnnnnnnnnnnnnnnnnnnnnnnnnnnnnnnnnnnnnnnnnnnnnnnnnnnnnnnnnnnnnnnnnnnnnnnnnnnnnnnnnnnnnnnnnnnnnnnnnnnnnnnnnnnnnnnnnnnnnnnnnnnnnnnnnnnnnnnnnnnnnnnnnnnnnnnnnnnnnnnnnnnnnnnnnnnnnnnnnnnnnnnnnnnnnnnnnnnnnnnnnnnnnnnnnnnnnnnnnnnnnnnnnnnnnnnnnnnnnnnnnnnnnnnnnnnnnnnnnnnnnnnnnnnnnnnnnnnnnnnnnnnnnnnnnnnnnnnnnnnnnnnnnnnnnnnnnnnnnnnnnnnnnnnnnnnnnnnnnnnnnnnnnnnnnnnnnnnnnnnnnnnnnnnnnnnnnnnnnnnnnnnnnnnnnnnnnnnnnnnnnnnnnnnnnnnnnnnnnnnnnnnnnnnnnnnnnnnnnnnnnnnnnnnnnnnnnnnnnnnnnnnnnnnnnnnnnnnnnnnnnnnngtctttaacgtcgaaagcatcgtagaacaagtcaacgttgcgcgcaatgccattagtgcggcactctcgttattaagttaatgctatgccatagatatttattacgcgaaaatctatagatatttattttatttatataaataattgattatgattttatatatggaaggcaatatttcttatgctatcggcattgacgtcggtttaaattcagtaggtcttgctgcaattcgcttagatgataatggggagcctataagaatacttaaagtaataagtgttattcacgatgctggtattgatccaaatggggcaaaagaatctgatacgcgtaaagcaatttctggtgtcgcgcggcgtgtgcgcaggttatatcgtcagcgcagacgtcgtttgcagaaacttgattttctattacaatcattgggttggccggttgttgaaaacaaggatttagagttttctaattcgtttattccatggatttttcgtgcaaaacttgctgatgaatatattgaggatgaagaacaacgtaaacaaatgttaagcgttgcaattcgtcatattgctagacatcgtggttggcgcaatccttatcagtcaataaaatcaatgatgcaagagactgagtattctgaattttacaatgagttgctaaaaaatattgaaaagtttgcgccaggagtaggttgtgaaggttctacgcctgcgcaattagtacgcgattatcttttatcacaacaaggtaaaccctcacgtcgtttacgtataactacagacgataaaaagaaaaatcatcccaactcattagatcctgttttaccacgtaagctaatgcaaagtgacagcatgcttgagattctcaatattttcaatgtgcaacatattgatgacaagtatgttagagagcagattattaatgctgttttttatgagaaatctccgcgtggctctgcagaaaatcgtgttggcaaagatgctataacaggaaagggtaagcgtgcgctaaaggcatcgttagcgtttcagaaatatcgaatcatatctactatttctaatcttagcataagagaaaattcaaaagaacgttgtttaacaatagaagaaaaacagaatgtttataaattattaacaacttcgactgatgagtcatcaaaaaagaaaagcgctgaagtaccattatacacttggattgatgtagctgattgcctcggaattgaacgctataagttgcgtggagtaggatcacaaataggagatggagaatctgttggtaatcgtcctccaatgttgaatagtgagttagctattatttatgcgaataataaatctttaagacaatcgttgctcacgtggtggttagatgctaatcgtacgcaagaagataaagaagctcttattgagatattgagcaacacggtagacatagaagcaattcatgataatcctgaatatcaagataagtacggttcagcaatagcatttattgattcaatggatgaaacagaaattgcggcattggaaaatatttcattgcctaatggtcgtgctgcttatagtttggaaacattagataaactcaataagcaaatgcttgaaactgatgatgatctatttaaagcgcgcaaaaagttatttaatttaccaaataattggcgtccatctgaagctcctattgcagagccaacaggtaatccttcagttgatcgagtattgaaaattgtgcatcgattccttataagtgctaaaaatcgttggggtaatcctgtacgtattaatattgagcatgttcgttctggattccaatctaaaaaaatggcgaattcatataaggaattattagataaacgaaccaaaggtaaagaaaatcttaaagcaatgatgcggaattctttgcatttaggcatgagtgattctatttcagatgcagatatacgccgttatgaggctgttcaacgtcagaatgggcaatgtttgtattgtggctatgagattacttatcatacatgtgagctagaccatattgttccgcgtaaggggccaggttctacgaatactcgtgagaatttagttgctacttgcttatcgtgtaacgctcaaaagtgtaatactccttttgcaacttggtgcgagcagtctacatattgcaagaatcatgatattagtgtagattccgctattaatcgggttcgtgcttttattttcccgcctaaatcatacgataaacgcggtgctaatcaattcaaaaaagaagttatatctcgcttgaaacaaaaagttggtgatgaagcgtttgataatcgttctatcgaatcggttgcatggatggcaaacgaattgcatcgtagaattgattggtattataactcgcagaattatcaaacaaacaatggtatttccgatataagtaataaagctcaaacaaatgttggagtttatgctggattgcttactgctatagcaagaagaatgtctggaattgacggaaaactggagttctttgatggtagaaggaaaactcgttttgatagacgacatcatgcagttgatgcatcagtaattgcaatgatgactccaggaatggctcgaatacttgcaattaaatgcaatctgcgtgaaacacagttattgcaaggcaataaagtggttcctggtggtattgattggagagaatatccaacggctaatgatcaaggatatcagcaatatgctaattggtctgttcgtatgaatgcgttattgaaacttcttaatgaagaaatgagagctgatcgtattgctgtggttaattctattcgtttgagatacagtaattcttctgttcacaaagatgatgtacatgcattattaaagttgcacgtcggcgatgaaatcgacagtgaaacaatccgacgtgcttctactcctgcgctttattgtgcgttgacacggaatcctgattatgatgtaaacaatggtcttcctgaaaatccagatagaactattctgttgcataataagaagttaaatgcatacgattcaattacttttttcaaggcacaagcagcacagcttttcgtacgagaaggttcnnnnnnnnnnnnnnnnnnnnnnnnnnnnnnnnnnnnnnnnnnnnnnnnnnnnnnnnnnnnnnnnnnnnnnnnnnnnnnnnnnnnnnnnnnnnnnnnnnnnnnnnnnnnnnnnnnnnnnnnnnnnnnnnnnnnnnnnnnnnnnnnnnnnnnnnnnnnnnnnnnnnnnnnnnnnnnnnnnnnnnnnnnnnnnnnnnnnnnnnnnnnnnnnnnnnnnnnnnnnnnnnnnnnnnnnnnnnnnnnnnnnnnnnnnnnnnnnnnnnnnnnnnnnnnnnnnnnnnnnnnnnnnnnnnnnnnnnnnnnnnnnnnnnnnnnnnnnnnnnnnnnnnnnnnnnnnnnnnnnnnnnnnnnnnnnnnnnnnnnnnnnnnnnnnnnnnnnnnnnnnnnnnnnnnnnnnnnnnnnnnnnnnnnnnnnnnnnnnnnnnnnnnnnnnnnnnnnnnnnnnnnnnnnnnnnnnnnnnnnnnnnnnnnnnnnnnnnnnnnnnnnnnnnnnnnnnnnnnnnnnnnnnnnnnnnnnnnnnnnnnnnnnnnnnnnnnnnnnnnnnnnnnnnnnnnnnnnnnnnnnnnnnnnnnnnnnnnnnnnnnnnnnnnnggaaaaattaaaaaatcttatggaatgattcgtgtatttcaaaatgatttgcataaacatattcatgaagatttattctcgtgtgatttgcctgaacaatctatctcaatgagatatgctgatacagaagtcactcatgctgtgcaaacaggtaatgctaattatctcggatatcttgtgcctggcgatgagattatcgttgattttagtcatgctaaattatcaggatatattggtgactttgtagaattcctaaacaagataggtgcagattgtacagcatataagcattgggtggttgtgggtacggacgataaaacaactttgatacttaaaccatcgatgatttcttctgaaggaattgacaagttgtattcgaattgcaagcgcaataacttcgattatacttcttatgaagaatctattaataagattctagctggtaaaggttggcgtgtttcggttaatgtgttggccaagtataacgtagcaactattcgacgtaatgcgttaggtgaagttcgttgggtatcacgttcgcatttacctatttcttggcgttgggatactggagaaaatagagaatagaggaattatgcagaatgcttggcgtgtnnnnnnnnnnnnnnnnnnnnnnnnnnnnnnnnnnnnnnnnnnnnnnnnnnnnnnnnnnnnnnnnnnnnnnnnnnnnnnnnnnnnnnnnnnnnnnnnnnnnnnnnnnnnnnnnnnnnnnnnnnnnnnnnnnnnnnnnnnnnnnnnnnnnnnnnnnnnnnnnnnnnnnnnnnnnnnnnnnnnnnnnnnnnnnnnnnnnnnnnnnnnnnnnnnnnnnnnnnnnnnnnnnnnnnnnnnnnnnnnnnnnnnnnnnnnnnnnnnnnnnnnnnnnnnnnnnnnnnnnnnnnnnnnnnnnnnnnnnnnnnnnnnnnnnnnnnnnnnnnnnnnnnnnnnnnnnnnnnnnnnnnnnnnnnnnnnnnnnnnnnnnnnnnnnnnnnnnnnnnnnnnnnnnnnnnnnnnnnnnnnnnnnnnnnnnnnnnnnnnnnnnnnnnnnnnnnnnnnnnnnnnnnnnnnnnnnnnnnnnnnnnnnnnnnnnnnnnnnnnnnnnnnnnnnnnnnnnnnnnnnnnnnnnnnnnnnnnnnnnnnnnnnnnnnnnnnnnnnnnnnnnnnnnnnnnnnnnnnnnnnnnnnnnnnnnnnnnnnnnnnnnnnnnnnnnnnnnnnnnnnnnncacgcattagagcagaaagttgaaattccgctagcggaaacggcaatattgcttattggtttgcattgtaactgttctacaggtctgcttcatcagtgtgctgaatatggtacttgcgtaatgacctgtgattggcgnnnnnnnnnnnnnnnnnnnnnnnnnnnnnnnnnnnnnnnnnnnnnnnnnnnnnnnnnnnnnnnnnnnnnnnnnnnnnnnnnnnnnnnnnnnnnnnnnnnnnnnnnnnnnnnnnnnnnnnnnnnnnnnnnnnnnnnnnnnnnnnnnnnnnnnnnnnnnnnnnnnnnnnnnnnnnnnnnnnnnnnnnnnnnnnnnnnnnnnnnnnnnnnnnnnnnnnnnnnnnnnnnnnnnnnnnnnnnnnnnnnnnnnnnnnnnnnnnnnnnnnnnnnnnnnnnnnnnnnnnnnnnnnnnnnnnnnnnnnnnnnnnnnnnnnnnnnnnnnnnnnnnnnnnnnnnnnnnnnnnnnnnnnnnnnnnnnnnnnnnnnnnnnnnnnnnnnnnnnnnnnnnnnnnnnnnnnnnnnnnnnnnnnnnnnnnnnnnnnnnnnnnnnnnnnnnnnnnnnnnnnnnnnnnnnnnnnnnnnnnnnnnnnnnnnnnnnnnnnnnnnnnnnnnnnnnnnnnnnnnnnnnnnnnnnnnnnnnnnnnnnnnnnnnnnnnnnnnnnnnnnnnnnnnnnnnnnnnnnnnnnnnnnnnnnnnnnnnnnnnnnnnnnnnnnnnnnnnnnnnnnnnnnnnnnnnnnnnnnnnnnttgtctcaggcaacaatgagtgtgcctcgaagaaaagcagcgtgggctcagattgttcgcgcgaaaatacgtggacaagcagcttgtcttgatttattaaataaagaagggggtggattattacgcggactatctaatactgttcgttctggagatgtaacgaatagagaaggccaagctgctcgtgaatattggaaacgtatttttcccgaggaagaagattttcatcgtaaaccagggtctggtcaagataggaatgctttacttgactatgcttatatggtgttgcgtggtttttccattcgtgcagttttatctgctggtcttaatccaacaatgggtatgaatcatcataatggtactaattatttctgcttagcagatgacataattgagccgtttagaccagctgttgattacgctgtttcaaaattatcattctcagatactccaaatgataaagcagttaaaaagtatttgatcgacagtgttaatcaacagtttaatggttctggacatacaattcctagcgctttatctgatttagctcaatcatatggtatttatgtggaaaaagacatggaagactttcgagtaccacaatttgtaaggagtgaattatgaaagnnnnnnnnnnnnnnnnnnnnnnnnnnnnnnnnnnnnnnnnnnnnnnnnnnnnnnnnnnnnnnnnnnnnnnnnnnnnnnnnnnnnnnnnnnnnnnnnnnnnnnnnnnnnnnnnnnnnnnnnnnnnnnnnnnnnnnnnnnnnnnnnnnnnnnnnnnnnnnnnnnnnnnnnnnnnnnnnnnnnnnnnnnnnnnnnnnnnnnnnnnnnnnnnnnnnnnnnnnnnnnnnnnnnnnnnnnnnnnnnnnnnnnnnnnnnnnnnnnnnnnnnnnnnnnnnnnnnnnnnnnnnnnnnnnnnnnnnnnnnnnnnnnnnnnnnnnnnnnnnnnnnnnnnnnnnnnnnnnnnnnnnnnnnnnnnnnnnnnnnnnnnnnnnnnnnnnnnnnnnnnnnnnnnnnnnnnnnnnnnnnnnnnnnnnnnnnnnnnnnnnnnnnnnnnnnnnnnnnnnnnnnnnnnnnnnnnnnnnnnnnnnnnnnnnnnnnnnnnnnnnnnnnnnnnnnnnnnnnnnnnnnnnnnnnnnnnnnnnnnnnnnnnnnnnnnnnnnnnnnnnnnnnnnnnnnnnnnnnnnnnnnnnnnnnnnnnnnnnnnnnnnnnnnnnnnnnnnnnagagcgtcacgctgcaactgtatttcgcaatatgctgcttgatatggggtatgcaatggtacaattttctgtgtatgtccgttatagccccactcaaacaggaaatagaacttcagtaaaaataattaaggataatcttcctccacgtggatcaatacgcattttacatgtcagtgatcatcaatggtcatctgcacaacgttattacaatgccaggcaagaaaagaaagaggaggctcccgatattgctatgcttttttaatcataaaatgtcttataatggttggaattctaccattcttgatgatataccaattatatcaagaatggtagaagctaattttcaacgctgaagctaaacagtcgcggcatgtatcaattatatcaagaatggtagaagctaattttcaactatatattggacgggcggcacaggcgtacaattatatcaagaatggtagaagctaattttcaactagcgtgtgtggtggttttgatggttctcaattatatcaagaatggtagaagctaattttcaacccagccaggcaacggctcaaaactagatcaattatatcaagaatggtagaagctaattttcaacattgcgataggcttctggcactaacgtagcaattatatcaagaatggtagaagctaattttcaacaaataaataaaaacggggaagctagaaagcttcccctgcagtgataatcatcaaaactgctgagcaatcaaactggataacaagtccagtcttattgaaaattagcacttcaaatatatcatttttaagaaacaaaagacaagtgaatttttttaagttttgttaaaagatttgaaaagttaacatatcgatatattcaatgaatgacacagttggagatattactattattatgtttaacatatatgcgttttttaaaaagtgcattcttagaatgtatgtatgtacatagatagcatccatatattcataatgggaacgttactaatgcagcgttcccattatgttttttataatatgcgactttatatgcgatnnnnnnnnnnnnnnnnnnnnnnnnnnnnnnnnnnnnnnnnnnnnnnnnnnnnnnnnnnnnnnnnnnnnnnnnnnnnnnnnnnnnnnnnnnnnnnnnnnnnnnnnnnnnnnnnnnnnnnnnnnnnnnnnnnnnnnnnnnnnnnnnnnnnnnnnnnnnnnnnnnnnnnnnnnnnnnnnnnnnnnnnnnnnnnnnnnnnnnnnnnnnnnnnnnnnnnnnnnnnnnnnnnnnnnnnnnnnnnnnnnnnnnnnnnnnnnnnnnnnnnnnnnnnnnnnnnnnnnnnnnnnnnnnnnnnnnnnnnnnnnnnnnnnnnnnnnnnnnnnnnnnnnnnnnnnnnnnnnnnnnnnnnnnnnnnnnnnnnnnnnnnnnnnnnnnnnnnnnnnnnnnnnnnnnnnnnnnnnnnnnnnnnnnnnnnnnnnnnnnnnnnnnnnnnnnnnnnnnnnnnnnnnnnnnnnnnnnnnnnnnnnnnnnnnnnnnnnnnnnnnnnnnnnnnnnnnnnnnnnnnnnnnnnnnnnnnnnnnnnnnnnnnnnnnnnnnnnnnnnnnnnnnnnnnnnnnnnnnnnnnnnnnnnnnnnnnnnnnnnnnnnnnnnnnnnnnnnnnnnnnnnnnnnnnnngtctttaacgtcgaaagcatcgtagaacaagtcaacgttgcgcgcaatgccattagtgcggcattctgcaggggagtgtgggtcgatttgaaggtattgctccgcaatctcgttacgagcctttgaacgccacacaagtgcgtagcttaagaagaatcgttgcaaagcagtgaaaccatcaatcttaggagcgttcagcaaagtttcgcgaatcgcatcgtcacttccgtcgacttcttgtcccttgctcttttgcaaagcaaaagcgtaggctttaagagcaatagttacgccgcttaaatcaccaatgttttcgccgattgttaaagcaccatttacgtgaggcattgcatcgcgctcctctttgctctttaagtgagagtatttaacaataagctgcgttggtgtaaaagcattgtattgctcaataagcgttttagtgcgctcagtgaagttggttttgtcttcttcagtccaccaattgttaagcacgccgtcgccatcatattcgcaaccttgatcgtcaaaaccgtggccgatttcgtggccaattactgcaccaatagcaccgtagtttgctgcgtctggagcactagggctaaagaatggcggctgcaaaatcgcagctgggaacactattacgttaagcagcggatcgtagtaagcgtttacggtttgcggagtcatctgccactcttcgcgatccacaggttctccagcttttgcagtatacctaccaaacacgaatcgagaaacttcgcgcatattctcaattaagccagcgtcttccttaatatttagcacagagtagtcaatccaatgattcgtgtaaccaatatttggctcaaacttgctaagcttttccaaagccttcgccttagtctcctcgccaagccagctgctgtgagaaatcgactcgcggtaagcgttaataagattgtcaactaagccttccatatactttttagaagactcagggaagtgcaagcgcacgtattctttaccgacttcctcgccgcaagcatcgtcaacaactccgattgcgcgcttccagcggtcgcgtggcttggtggcgccagaaagcactttgccgtagaagtcgaatcgcgcttgtgcaaagtcctcgcttaacatgcttgcccagcacaaaatcacatgcacgcgtgcccaaagctttagatcttctaagtcggcttcttgccaaatcttattcaatccttctataaagcttggctcgtgaactactactttgctaaaagctttacgaaaatctattggctgattctttgcttcttcggaatcgtcgtaagatttttgagcagcatccaagaatgcgtcaagattcagcgcttcaagcgtttttgccaaatctgcataatcgtaaggattataagttttttgagaatcgcgtgttgctacgttatcccagtggttgcttgcgatttgtgtttcaaccttcaagaaacgttccgattgctctcttgtagtagtggcatcaccgtatccagctaagcgcaacaatgaagccaccatttttacgtattcagcgcgaatcggagcgtaattatcttcgcgatagtatgcttcgtctggcaagcccaatccagcctgctcaatgtgcataatattcgtcttagggtctttagggtctccgtagacgccaaaagcaaacattgcattaggtccgccatatggagtaagagaagcaatagtgcgaactaagtcttctttgctgctagctgcatcaacagcgtctaaatcgctcttaattggcgtaattccagctttttcaatagatgcagtatctaaatagttgcggtataggattcgcgactttttggctgggcaatcttcgttttctaaaatatctcgaatttgcgtctctgcatcttctgcaagcttgtagaaagcaccatacattggcttatcttctggaagagtgtaagtgtcaatccaaggaccgtttacgtaacggaataaatcgtcttgtggtcgagtaaccgatgagaaggaagctgggtcaaaatttacagcagaaatttccttctgcgattcctcattgttgttattattttcattgttattaggcatgtgcctagattacaagtattaagcgacatcattagctagtattttcgccatattttgcgctattttcgtgcctgcgagttagtcttaaatcatgattgaacttaaaactccatccgaaattgaagctatgaagcctgcaggtcgcttcgttggtagtattcttaaagacttgaaagcaatgacaaaagttggcacaaatcttcttgagattgatgactttgttcgccaacgcattatgagccgtaaaggtgcgtcttcttgctatgttgactacgctcctgattttggaactggtccttttgctcactacatttgcacttctgtaaacgatgctgttcttcacggagttccttttgattacaaccttaaagacggcgatttactaacgcttgacttagcgattaacgttgacggatgggttggagattctgctattagtttcgtggttggaaagcatgcggatcctgaagatttgcgcttaattaagtgcactgaggaagcacttgaggctggaattaacatggctcagcctggaaaccgtcttggagacatttctgcagctgttggatgcgttgctcacgagtatggttacagcgtaaaccttgagtttggcggtcacggagtcggtcatattatgcatggtgatccgcacgttcctaacgatggcactgctcaccacggctacaagcttcgtccaggtcttgtaattgcaattgagccatggttcttaaagactactgacgaaatttaccaggatcctaaggatggttggactcttcgctctgctgatggttctcgcggtgcacacactgagcatacgattgcaattacggaaaacggtcctgagattttgaccgtgcgctaaacttataaatagttgattttgtaagtattttgcgagtagtaattgcgtaaaacaggtatgtaaagaggtactttaagtaaatggcggaatttgatttttcccaagcattaaatgatgttgaagcaaagtattcttcgatttctaaagcactagatgtcgattcgttgaaagttacgattgcagatttagaaaagcaggcttcggagcctggactttgggatgattctgagcatgcgcagcaggttacgagtaagctttcggcagctcagtctcaattaaagcgtttacaagccgttgagcaacgcattgaagatactaagactttgattgaacttggtcaggaagaagaggatgctgattctatgagcgaggctcaagaggagcttggctctattgctcacgagttggacgatatggaagttcaaactcttcttgacggcgaatatgatgctcgtgcagcggtggtgacaatccgttctggtgcgggtggtgtggatgctgccgattttgctcaaatgcttcttagaatgtacttgcgttgggcagagcgaaacggctataaaactaagatgatggatacgtcttacgcagaagaagctggtattaaatccgccactttccaagtagatgccccatatgcgtatggtcgcctttctgtagaaggaggcactcacagaatggttcgtatttctccattcgacaatcaaggcaggcgtcaaactggctttagtgccgtggaagtaattcctcttgttgaagctacagatcatattgacattccagattctgacattcgtgtggatactttccaggcgtctggccctggcggacaaggcgtaaacactacgtattccgctgtgcgcatcacgcatttgccaactggtttggttgtttcaatgcaagatgagcgcagccagattcagaaccgagctgctgcaatggcggttttgcaatcgcgtttacttgtgttaaagcatgccgaagaagctgctaaaaagaaggagcttgctggagatattaaggcaagttggggagaccaaatgcgctcatacgtgcttcacccataccagatggttaaggatttgcgcactggctacgaaacttcgcaaactcaggctgtttttgacggcgatattgacggttttattgaagctggaattcgatggagnnnnnnnnnnnnnnnnnnnnnnnnnnnnnnnnnnnnnnnnnnnnnnnnnnnnnnnnnnnnnnnnnnnnnnnnnnnnnnnnnnnnnnnnnnnnnnnnnnnnnnnnnnnnnnnnnnnnnnnnnnnnnnnnnnnnnnnnnnnnnnnnnnnnnnnnnnnnnnnnnnnnnnnnnnnnnnnnnnnnnnnnnnnnnnnnnnnnnnnnnnnnnnnnnnnnnnnnnnnnnnnnnnnnnnnnnnnnnnnnnnnnnnnnnnnnnnnnnnnnnnnnnnnnnnnnnnnnnnnnnnnnnnnnnnnnnnnnnnnnnnnnnnnnnnnnnnnnnnnnnnnnnnnnnnnnnnnnnnnnnnnnnnnnnnnnnnnnnnnnnnnnnnnnnnnnnnnnnnnnnnnnnnnnnnnnnnnnnnnnnnnnnnnnnnnnnnnnnnnnnnnnnnnnnnnnnnnnnnnnnnnnnnnnnnnnnnnnnnnnnnnnnnnnnnnnnnnnnnnnnnnnnnnnnnnnnnnnnnnnnnnnnnnnnnnnnnnnnnnnnnnnnnnnnnnnnnnnnnnnnnnnnnnnnnnnnnnnnnnnnnnnnnnnnnnnnnnnnnnnnnnnnnnnnnnnnnnnnnnnnnnnnnnnnnnnnnnnnnnnnnnnnnggtaaaattcaagataaaagtcagaataaaaatcaaaaataaaatataaaatagttaaaaacaaaattaaagtatatcgttcaatagttcgtaaaggaaactgcagaatatgtctctgatttcactagaacatgtgtcgaagatttatcctaagggtacgcgccctgctttggacgatatttctttagacgttaatcgtggcgannnnnnnnnnnnnnnnnnnnnnnnnnnnnnnnnnnnnnnnnnnnnnnnnnnnnnnnnnnnnnnnnnnnnnnnnnnnnnnnnnnnnnnnnnnnnnnnnnnnnnnnnnnnnnnnnnnnnnnnnnnnnnnnnnnnnnnnnnnnnnnnnnnnnnnnnnnnnnnnnnnnnnnnnnnnnnnnnnnnnnnnnnnnnnnnnnnnnnnnnnnnnnnnnnnnnnnnnnnnnnnnnnnnnnnnnnnnnnnnnnnnnnnnnnnnnnnnnnnnnnnnnnnnnnnnnnnnnnnnnnnnnnnnnnnnnnnnnnnnnnnnnnnnnnnnnnnnnnnnnnnnnnnnnnnnnnnnnnnnnnnnnnnnnnnnnnnnnnnnnnnnnnnnnnnnnnnnnnnnnnnnnnnnnnnnnnnnnnnnnnnnnnnnnnnnnnnnnnnnnnnnnnnnnnnnnnnnnnnnnnnnnnnnnnnnnnnnnnnnnnnnnnnnnnnnnnnnnnnnnnnnnnnnnnnnnnnnnnnnnnnnnnnnnnnnnnnnnnnnnnnnnnnnnnnnnnnnnnnnnnnnnnnnnnnnnnnnnnnnnnnnnnnnnnnnnnnnnnnnnnnnnnnnnnnnnnnnnnnnnnnnnnnnnnnnnnnnnnnnnnnnnnnnnnnnnnnnnnnnnnnnnnnnnnnnnnnnnnnnnnnnnnnnnnnnncttcgtgtttctcgttggtgcttccgggtccggtaaaacaacgcttttgagcttgcttttgcgagaagaagaagccacaaagggcgagattcacgttgc

SEQ ID NO: 3412 - DNA, 23573 bp, synthetic construct
  misc_feature 1..23573: note = Synthetic
  source 1..23573: mol_type = other DNA
ccgattgcgcgtgcgaagaaggattcagttgcttcaaatcttgcaacgctgtgcaaaacgaatgaaactgatgctcaaaacgatgcgaaaactcaagcaactcaaggcgtgcgcgtgccggattgccctgaattaatgcaaattttgcgagtcaccggtccactggctgcttctagcgcgaatcgcagcggtaacgaaagtgcagacagtgtagaagaagcatttgcagctttcggcaacgaaattccgctgtatttgaacgcaggcccgactcgctcgcacgtggcaagcacggtagttggcgcggattcaagcgataaagacggtattgtgattttgcgcgaaggcgtgatttcggagagtgaaattcgtaatgcgttaagtgagtaagtttattaacttatttctggtactaaatttctggtactaacaaatcgctacaatcaagataagcaagtgaaaaatttaacaaacgctgctaaacccaacgaagtaatcgcatagcaaaggacgcatttatgagggtatacctgtttattgcagcaattgcaggcggtgctacgtggcttattatgcctcttgttcgtcaccttgcaattcgtatgggtgctgttggcaaagttcgcgctcgcgacgtgcatactattccaacgccacgtatgggtggtgtaggtatgctttttggtttcgcagttgcgatggcgttcgctagttctatgccatttatttccgggctttttgcaggaacgcaccagccgtgggttgtgctagcaggagccgttatgatatgcctgcttggggtatgcgacgacatttgggatctagattggatgctaaagcttgccggtcagctgcttatagctgtttttgtagcgtggggagggttgcaaatcgtaactttgccgctaggatcgctcgtaacggcatctccaagcgtgtcaatcgcaataactgcaatactaatcgttgcttcaattaatgcagtaaattttgtagatgggctggacggactggcttctggaatcgttgcaatcggcggcattgccttcgcaacatactcatacatgcttgcgcgcacgtcgccatcctacgcttcaatggcaactcttattgacgttgcaatggtaggtatgtgcgttggatttattatgcacaattggcatccagcaaaactttttatgggtgactcaggctccatgttaatcggctacttaattacttgcgcgtcgattattatgaccggccatttggatccttccgccgttcatacgagtatttatttgcctgtatttatgccgattttgttgccgattcttgtgctgtttttgccggttcttgacatgtgcttggctatttttaggcgtgttgctaaagggcagtcgccaatgcatccggatcgcatgcacttgcatcatcgcatgctgcgcattgggcattctgtgcagggtgctgtgctgattttgtggggatgggctgcgctaattgcgtttggctctattatgattttgttctttaaagctgtgtatgtgcttgttggaatgattcttgctgctgcgctacttactgtgctcacaatgatgccgtacttgcgttgtcgcctgcccgaacttcgcaattcgtaacaactgcttaattttgtttttcttaatgtggcgtggcgctcaaaacgtgcgagtacgctcgcgctataagcgctcgctacgaaactcgcgttggaagtccactggacttccaacttgagcgagtttccgctccgaattgctttcgcgcgcgctgtgctgcgctcaagcatgtcgtcgcgcccgcgtttggagggtgcgtttcggcaaacgtcatagcaaaaacgtatagtaaccctatggctacaactgatatgaacacggaatccgtgtatgctcctgttccaccaattttcgagaagctcggtctcgcttatgacgatgtccttttgcttccaaacgaaactgatgttattccgtccgaagtggatacttccactcgtctgactcgcgaaattaccatgaaagtgccgactatttcggcagctatggatactgttaccgagtccgatatggctattgccatggcgcgtaacggtggcattggagtacttcaccgcaatctttctattgatgatcaagctgcgcaggttgatattgttaagcgcagtgaatccggtatgattaccgacccgcttactgttcacccagatgctacgctcgccgatttagataaattgtgcgggcgtttccatatttctggtcttccggtagtggatagcgaaaatcgtttagttggtattattaccaaccgcgatatgcgtttcattgcttccgaagactacgatcgcttgaaagttaaggatgtgatgacgcgcgaaaatctcgtcaccggtccttcaaatatttctaaggaagatgctcaccgcttgcttgcggataacaagattgaaaagttgcctttggttgatgctgaaggtaagcttacaggcttgattactgttaaggactttgtgaagactgaacagtatccggatgctactaaggatgatcagggtcgcttgcgcgttgctgctggcattggcttcttgggtgatgcttggcagcgtgcgtgcgctcttatggaagctggagttgacgtgcttgtggtcgataccgcaaacggcgaggctcgcttggctctcgacatgattcgtcgcattaaggcagataaggctttcgacggcgtgcaaattattggcggaaatattgcaactcgccagggcgcacaggctatgattgacgctggtgttgatgctgtaaaggttggcgttggtccaggctctatttgcactacgcgtgttgttgcaggcgttggtgtacctcagcttactgcagtttacgatgcggctcaggcttgcaaggctgctggaattccatgcattgcagacggtggtattcactattccggcgatattgctaaggctttggttgctggcgcggacaccgttatgctcggcggcactttggccggctgtgaggaagctccaggcgagaaggttcttcttcacggcaagcagtacaagctttaccgcggcatgggctcgcttggtgcaatggctcctcgtggtaagaagtcttattcgaaggatcgttacttccaggcagacgttaccagctccgataaggtggttccagaaggcgttgaaggcgaagttccatatcgcggtccgcttaacgctgtgctttaccagcttctcggcggcttgcaccagtcaatgttctacgttggtgcgcacaatattaaggaaatgcaagagcgcggccgctttattcgcattactgatgctggtcttcgtgaatcacatcctcacgatattgtgatgactgcagaagcaccaaactacagcggtttccacaactaaatcgcaagttgcgcaagttgcgcaagttgcgcgtattacgtaagttgcgcgtgtaagtcgcaactatttttgcattaaacggcgaaaagttacgcaagttatctacaacttgcctgcttttcgtcgtttttaatacgcgtctcgtcggtaggaagatgtaggctgatgggttcgaaaaaatattaggaaaggaacgaaaatggctgaagctaaggaagatcttacgtttacgccggaagagtcgcgcttaatttggattgattgcgagatgacgggacttgatattttccacgacgaattatgcgaagtatctgtagttccaaccgactttaatctgaaagttttggacgacggtattgatttagtgattaagccgagcgatgctgctgtggctcatatgaacgattttgtacgcaatatgcacacttcttctggacttgttgacgagtggaataagaacggtttgtctttggaagaagcgcaaaagcaggtagttgaatatgtaaagcgcttcctgccggctcgcggaaaagcgcatcttgctggaaactcagttggttctgacaaaaagttcctcgaccgttacatgccagatttaatggcaaatctgcactatcgtgtaatcgacgtaagtacgttgaaggaaatttcgcgcaggctttacccggacgtttaccgcaataagccggcaaaacacggcggtcaccgtgcgctcgcggatattattgagtcgattgacgagcttcgttactaccgcgatatgatgttcgttccagcaccaggcccaagcgagtctcaagcaaaagccggtgcgcaacacattgaaagcacgagcttgcttcgtgactatgagcgtcgcggagaggcattagaagacgcaaattccgcagaaaagcgcgactactaaacacaacgctactattaaataaagcgcgactactaaacgcaataaaaggtactgccaatgaagcaatccgaagccttaaccataatcaacgctggcgcgagcgcgttcattaccggcgctccgggtgcaggtaaaacctacgtattaaacgaagctattcgcgcaatgcgaaagaacggtttaagcgttgctgtaactgcctctaccggtattgcggcaacgcacttaaacggtcaaaccattcactcgtggagtggagttggagtttcaaacgcgcttacggatacgcttcttaaaacaattagagctaggcgaggaaagcgcataaaggccacggacgtgctcgtgttggacgaagtttccatgattcacgcgtggctttttgacatggttgatgaagtttgccggaaggtgcgcaaaaatcccgctcctttcggcgggcttcaagtagttatttcgggcgacttcttccaattgccgcctgttagcacttctatgcgaaatcgtgatgtgttcgagccgagctcggagtttatttcgtcgcgcgaaaagtatgctggagctggaaaaaatccggaaggctatattacggaatcgtttgcatgggacgctttgaaacctgttgtgtgctacttaactgagcaacatcgtcaggatgacggcaagttgctagaagttttgacggatattcgtagcggtctcgtgagtgacgacgataagcaagtgcttgctagccgccttggtgagtatccgcaagatgacgaagttgcagtacatcttttcccaacgaacgcgcaagcagacggattaaataatatgcagcttgcagcaattgatgcagagtctcacgagttcgtagcaacggaagctgggcctaaaaatcttgttgagcgcttaaaaaagaatatgcttgctccggaacgtttagttttgaaggctggagctgctgtgatggcattgcgaaacgatcaggaaaagcagtacgtaaatggctctgttgggcgcgtgttgcgttttgcgcctgaatctaagggcggctggccgattgttgagtttgaaaacggcaatattgtgactcttaagcctgctgcttgggagatgacggacggcgaaactgtgcttgctagcgtaaatcaagtgccgcttcgttgcgcgtggggaattacgattcataagtcgcaaggtatgacgctcgatgctgcggtaatggatttgcgtagaactttcgctcccggaatgggttatgttgcgctttctcgcgtggaaaatctgaaaggtctttatttaaagggtattaacgagcgcgcttttagcgtttcagttgatgccgttctactagatggatctttgcgcgatgcttccaaacatgcgagtgagatgcttgctagcgatggtgcttctgtatttttgacagataagtttgaaggcgattctgcaaatcagcaagagtttagtttttttgaaaatgctggagacagtgttgcggacgagttttctttcgacgatgagttttagtgtgatacgcgtttttactggcgcgcggctttttctttacatagctgcttagtttatgtcgctttggcagatttgcgcgccccatgacctaattgacattactaatcgagtattacttttgttgatgcgtgtaaacaagtgtttatgtcctcatgcgcaaatagattggaacgcatgaattccaatgtacttcgtatgtctcagctattccttcgtacgctgcgcgaggatcctgcagacgcggacgtgacttccgcaaaacttatgcagcgcgcaggctatattcgtaaatctgcaccaggtgtgtggacttggcttccgctaggacttaaggttttgaacaaggttcaggcgattattcgcgacgaaatcaacggtatcggtgcgcaggaagttcacttcccggcacttcttccgcgtgagccttacgaggctaccaaccgttgggaagaatatggcgacaatatcttccgtcttaaggatcgccaccaagctgactatcttcttgctccaacgcacgaagaagttttcacgcttctcgttaaggatatgtattcttcgtacaaggatttgcctgttactttgtatcagattcaaacgaagtatcgcgacgagttccgtccgcgcgctggtcttattcgcggtcgcgagtttattatgcaggatgcttattcgttctcgattgacgaagatggtttgaaatctgcttacgttgaggagcgcgctgcttacgctcgaattttcgaccgtttgggcattaaatacgtgattgttcacgctgtttccggcccaatgggtggctctgattccgaagagttcttggctccaatgccaattggtgaagatacttttgcgctcgcaccttcaggaaaagcttggaatgttgaggctcttaccactccagaaatgcaagatgttgattattcggcaactcctgcagcgcaatctctcgaaactccagacgctaagacgattgaagctttggttaaggtttctaacgacttgcatccgcgtaaagatggtcgcgaatggcaagcagacgacactttgaagaacttgattattgctgttaagcatccggcagatgctgaaggcggcgagcatgaggagccatggcgcgaaatcgtggcgattggtattccaggggatcgccaagtagatatgaagcgtcttgaagctcagtttgctcctgcagaaatcgaagaagcaactgaggatgatttgaagtctcatcctgagtttgttaagggctacattggctttagcgtattaggtcctcaagctcgcaaagagggtaggggtattgcaaatcctgttcgctacttgatggatgctcacgttgcaaagggaagtgcttggattacaggagctgacgaagacggaaagcacgtttacgacgctgtttacggccgcgattttgaggcggacggtgttgttgaagcagcccaggttcgtgacggtgatatgagcccagatggttccggtccgttgagcttcgaacgcggtgtggaaatcggccaggtgttccagcttggcttaaagtattctaaggctttgggcttaagcgttcttaacgaaaacggtaaggctgtgccggtttggatgggttgctacggtattggtgttagccgcgtgatcgcatgtttggcagaaacacatcacgacgacgctggtctcgcatggcctatggcgattgctccagctcaagttcacgtggttgcaacaggcaaagatcaagttgctttcgacgctgctgaaaagattgttgaagagcttagcaagcaaggcatcgaagtaatctttgacgaccgtccaaaggtttctccaggcgtaaagttcaaggatgctgagcttgttggcgtgccgctgattgctgttgctggtcgcgatacagtgaacaatggaactattgaaatccgcaatcgcgatggctcaaacgttgaggcagttccagttgacgaagctgccgctcgaatcgtatctcgcgtaaacgatttgcttaagtaatgacctgttttacaatttgccgccaggaatactactattcttggcggcattattttattgtattcatattaatttattgtggtgtgagtttagtggatttctcgaattgcgattttattttccttaaatatcagtttcgcctccaaattcgtcattcgaaatgtttgcgttagagttattttgttgtgcattgttcttctgctgtacttgattactttctttcgtatgatcatttttagcggaatcagcgtttcgctttgtaaattgtgtagttccacgatttaaatcgtgaccaatagcagaagcttccaaaattacgcgattataatcgtttccatctttcgtccagttttctgtactcaagttgccgtatacaacgattgcatcgcctttatgaacgctttttagcacgtttgaagccaaagtcctatacgctttcacagtcatccaagtagttggacgctcatgccattgctgctcgtcgttgcggtaatatgattgcgtgctcgcgattcgtagcgaacaagccggagaattttcacttcgcccaaagcttacaggttcagcacctacgtatccactaatagtcacggttgactgttgttgtgccatatttcatagtcctttcacaaattggactgcagccatttcagccccgaaatacagagccatcattgcctctgagcttcgcagccacgaggaaatgccgcagtaataacaactatgaactttgcgcaacaactttgccagcaaacttttctattgtggttaaaacctaggttttatccacaatgtaattaatctcttgactacagcaaaatatgtagtaaacgctcaacaattaactgtacatgcgtaataatttctcattgcagggtagtattgagcaaacgtattaaaaatgttgaatgtagtgaagaagatatttatggtgggaagtaatcagcaatatgcgaagcataaatctaatatgcgcataagttgggttagtatccttgttatttctgctgtatgcctagctgcatgcgcaatatcgcaaaattttgctgattttactttagaaaattctaatgcgtatcatcaggcgtatcatcaggcgtataatcgcgaatatcatcacgaatatcatcaaaatccaataattcaaacaactaattctgcttctgctgcagcttttattcagtcaagtaatgtagcgcgttacgttctttcttctattcgaaacgcaagatctaggctttacgatgattgcagcacgtattttaatggcgctcctttgcaagattacgtgagccgctacggtcttactaaagaagcgtatgttaataatattcagtacgattctgcaaatgaagatgatgctttccgtcgcgcgcaagaaaccgctcagcatgagcagtttggccattttggcccagatggtgtgagcgagcctgattacactggccgaaaggcgtgaggtgaaaatttaagttggggtgtggatcttgctggttctatgcaattgtggattcaagatgaagagtcggctttgcgtgcaaccggcggaagttttaacgaagataatggacatttgtatcagattttgaatcctagcaatatttctttcgattacggagaggcttcgggcggcccttatggtgttgttggagcgttgacactatcggaatataacggtgatattgattatccggatggaaagattggcccagaatctcccgaagagcaaaaaagcgtgctgaagaggagcgaaagaagaaggaagagcagaagcgtaaagacgaggaagctaagaagaaaaaagctttggctaaaaagaagcatttgaagcataagcatcataaaaagttagcgaaagctatgaagaaaaatgcttcaacgtataaatttattgtgattatttctgcggttttaagcgtgcttgttttgtgcgcaattgcagcggtagcttggattttcttaagacgaaggctgatttctaaaaatagtttgcacgtgaagcatattgcgcgtagcaaaacaagtctacatttagagcaacgccgttagtttggcattctcgtgattaagctcattctatgttatagatatttattacatgaaaatttatagatagttattttatttatacaaatagatagttattttatttatacaaataattgcttatgattctgtatatggaaggtaatatttcttatgctatcggcattgacgtcggtttaaattcagtaggtcttgctgcgattcgtttggataataatggtgaacctataagaatacttaaagcaatgagtgttattcatgatgctggtattgatccaaatggggcaaaagaatctgatacgcgtaaagcaatttctggtgtcgcgcggcgcgtgcgcaggctgtatcgtcagcgcagacgtcgtttgcagaaacttgattttctattgcattcattgggttttcctgttgttgaaaacaaggatttagatttttctgattcgtttactccatggatttttcgtgcaaaacttgctgatgaatatattgcggatgaaaaacaacgtaaacaaatgttaagcgttgcaattcgtcatattgctagacatcgtggttggcgcaatccttatcagtcaataaaatcaatgacacaagagactgagtattctgaattttacaatgagttgctaaaaaatattgaaaagtttgcgccgggagtaagttgtgaaggttctacgcctgcgcaattagtgcgtgattatcttttatcacaacaaggtaaagcctcgcgtcgcttacgtataactacggacgatagaaggaaaaatcatccaaactcattagatcctgttttaccacgtaagctaatgcaaagtgataacatgcttgagattctcaatattttcaatgtgcaacatattgataacaagtatgttagagagcagattattaatgctgttttttatgcgaaatctccgcgtggatctgcagaaaatcgtgttggcaaggatgctataacaggaaagggtaagcgtgcactaaaggcatcgttagcgtttcagaaatatcgaatcatatctactatttctaatctgcgcataagagaaaattcaaaagagcgttgtttaacaatagaagaaaagcaaagtgtttataaattattaacaacttcgactgatgagtcttcaaaagagaaaagcgctgaagcgccattatatacttggattgatgtagctgattgcctcggaattgaacgctataagttgcgtggagtaggatcgcaaatagaagatggagaatctgttggtaatcgtcctccaatgttgaatagtgagttagctattctttatgcgaatgctaaatctttaaagcaatcgttgattacttggtggttagctgctaatcgtacgcaagaagataaagaagcttttattgagatattgagcaacacggtagacatagaagcaattcatgataatcctgaatatcaagataagtacggttcagtaatagcgtttattgattcaatggatgaaacagaaattgcggcattagaaaatatttcattacctgatggtcgtgctgcttatagtttggaaacattagataaactcaataaacaaatgcttgaaactgatgatgatttatttgaagcgcgtaaaaagttatttaatttaccaaataattggcgcccatctgaagctcctattgcagagccaacaggtaatccttcagttgatcgagtattgaaaattgtgcatcgattccttataagtgctaaaaatcgttggggtaatcctgaacgtattaatattgaacatgttcgttctggattccaatctaaaaaaatggcgaattcatataagaaattattagataaacgaacagaaggtaaagaaaatcttaaagcaatgatgcggaattctttgcatttaggcacgagtgattctatttcagatgcagatatacgtcgttatgaggctgttcaacgtcagaatgggcaatgtttgtattgtggctctgagattacttatcatacttgtgagctagatcatattgttccgcgtaagggaccaggttctacgaatactcgtgagaatttagttgctacttgctcatcgtgtaacgctcaaaagtgtaatactccttttgcaacttggtgcgaggagtctacatattgcaagaatcatgatattagtgtagattccgctattaatcgggttcgtgcttttattttccctcctaactcatacgacaaacgcggtgctagccaattcaaaaaagaagttatagctcgcctgaaacaaaaagttggtgatgaagcgttcgataatcgctctattgaatcggttgcatggatggcaaacgaattgcatcgtagaattgattggtattataattcgcagaattatcaaacaaacaatggtatttccgatataactaataaagctcaaacaaatgttggagtttatgctggatcgcttactgctatagcaagaagaatgtctggaattgacggaaaactagagttctttgatggtagaagaaaaactcgttttgatagacgacatcatgcagttgatgcatcagtaattgcaatgatgactccaggaatagctcaaatacttgcaattaaatgcaatctgcgtgaaacacagttattgcaaggtaataaagtggttcccggtggtattgattggaaagaatatccaacggcgaatgatcaaggatatcagcaatatgctaattggtctgttcgtatgaatgcgttattggaacttcttaatgaagaaatgagagctgatcgtattgctgtggttaattctattcgtttgagatacagtaattcttctgttcacaaagatgatgtacatgcattattaaagttgcacgtcggcgatgaaatcgacagtgaaacaatccgacgtgcttctactcctgcactttattgtgctttgacaaggaatcctgattatgatgtaaataatggtcttcctgaaaatacagatagaactatcctgttgcatgataagaagttaaatgcagacgattcaattacttttttcaaatcaaaagcagcacaacttttcgtacgagaaggttctgtagagattggtaattctatccatcatctacgcatttatgaatactttgaaaagttaaaaagtgggaaagttaaaaaatcctatggaatgattcgtgtatttcaagatgatttgcatagatatattcatgaagatttattctcgtgtgatttgcctgagcaatctatctcaatgagatatgctgatacgaaagtcgctcatgctgtgcaaacaggtaatgctaattatctcggatatcttgtgcctggtgatgagattatcgttgattttagtcatgttaaattatcaggatatattggtgaatttgtagaattcttaaacaagataggagcaaattgtgcagcatataagcattgggtggttgcgggtacggatgataaaacaactttgatacttaaaccatcgatgatttcttctgaaggaattgacaagttgtattcgaattgcgagcgaaataacttcgattatgcttcttatgaaaaatctattgataagattctagttgataaaggttggcgtgtttcggttaatgtattggatcagtataaagcagcgactattcgacgtaatgcgttaggtgagcctcgttgggcatcgcgttctcatttacctatttcttggagttgggatactggagaaaatagagaatagaggaattatgcagaatgcttggcgtgtgattgattgtactaatttgcaaggtgaattacggtatattcgcggtaggattttagtgtgtgatcatgcattagagcagaaagtcgaaattccgctagctgaaacggcaatattgcttattggtttgcattgtaattgttctgcaggtcttcttcatcagtgtgctgaatatggtacttgtgtaatgacctgtgattggcgatgcgttcctgtcagtgctatgcattcgtggacaaatgttcctacgagaattacagttcgtcaattgtctcaggcaacaatgagtgttcctcgaagaaaagcagcgtgggctcagattgttcgcgcgaaaatacgtggacaagcggcttgccttgatttattaaataaagagggaggtggattattacgaggattatctaatactgttcgttctggggatgtaacgaatagggaaggtcaagctgctcgtgaatattggaaacgtatttttcccgaggaagaagattttcatcgtaaacccgggtctggtcaagataggaatgctttacttgactatgcttacatggtgttgcgtggtttctccattcgtgcagttctatctgccggtcttaatccaacaatgggtatgaatcatcataatggtactaattatttctgcttagtagatgacataattgaaccgtttagaccagctgttgattacgctgtttcaaaattatcattctcagatactccaaatgataaagcagttaaaaagtatttaatcgacagtgttaatcaacagtttaatggttctggacatacgattcctagtgccttatctgatttagctcaatcatatggtatttatgtggaaaaaggcgtggaagaatttcaagtaccacaattcgtaaggagtggattatgaaagtcgatgaggacagtggtggcatgtggtgtttagtaatgtttgatttaccagtgaaaacaaaagtggagcgtcatgctgcaactgtatttcgcaatatgctgcttgatatgggatatgcaatggtgcaattttctgtatatgttcgttatagtcccactcaaacaggaaatagaacttcagtaaaaataattaaggataatcttccgccgcgtggatctatacgcattttacatgtcagtgatcatcaatggtcatctgcgcaacgttattacaatgccaggcaagaaaagaaagaagaaaccccagatatcgctatgcttttttaatcgtaaaaagctttataatagttgaaattctaccattcttgacgatataccaattatatcaagaatggtagaagctaattttcaactattaatattgctgttcgtcttcctaaacaattatatcaagaatggtagaagctaattttcaacatgagtgagtacgattttagagctaagacaattatatcaagaatggtagaagctaattttcaaccatctgctgggatggcgacggtaaaaaccaattatatcaagaatggtagaagctaattttcaactgacatatcatggtatcagcgcggcattcaattatatcaagaatggtagaagctaattttcaacataaataacggtgttaaaaatggtaaaacaattatatcaagaatggtagaagctaattttcaaccctatgagtcgtaaaatgcaacgacggaacaattatatcaagaatggtagaagctaattttcaacttgaagcatccggagagtgtagtcgatgcaattatatcaagaatggtagaagctaattttcaactaataaataaaaacggggaagctggaaagcttcccctgcagtgataatcatcaaaactgctgagcaatcaaactggataacaagtccagtcttattgaaaattagcatttctaatatatcatttttaagaaatagaaaacaagtgatttttttaagttttgttaaaagatttgaaaaagtaatatattgatataattagtgggtagcgtagttgaaaatattttcactttacgtatgtgtgcgttttctaaaaaatgtcttctaggaatgtatgtgtaggattataggctcaaaagtgtgtaaagctaagctgatgaatattctgtgcataaaccatagcttcagcaccgttactaactcagttatctaactgagaaagtaacggtaatcacccaaacactgttactaactcagtcagcaggctgagaaaacaacggtcatgcgttactagtgcagtaagtagactgcgttaataacgaataagcggggttatacgttactagtgcagtacaaaaactgcgccagtaacagcgtttgacgatttactgttaattcatctaatacatgcttcgaacgccacttagcataaggaataacccacattcggtatactgtgagccctactgcaataagggttatgagcttattttttacacacttttagcatataaccccatatatccataatgggaacgttactaatgtagcgttcccattatgttgctttatagtaagaaaattatttaagcgttacctgcgcgcgacaatcatttgcattatgcaacttaccaaatgtgtacgcgctcagcagggtcgagccacatttcgtcgccttctttaacgtcgaaagcatcgtagaacaagtctacgttacgagcaatgccgttagtgcggcattcggctggggagtgcgggtcgatttgaagcagctgttccgcaatttcattacgagccttggaacgccatactaacgcgtagcttaagaagaatcgctgcaaagcagtgaaaccatctacttcaggagcgttcagcaaagtttcgcgaatcgcatcttcacttccgtcaatttcatgcccttcactcttttgcaaagcgaaagcgtatgctttaagtgcaatagtcacgccgcttaaatcgccaatattttcgccgattgttaaagcaccgtttacgtgaggcatcgcattgcgctcttctttgctcttcaagtgagagtacttaacaataagctgcgttggtgtgaaagcattgtattgctcaataagcttcttagtgcgctcagtgaagttggttttgtcttcttcagtccaccaattgttaagcatgccgtcgccgtcgtattcgcaaccttggtcgtcaaaaccgtggccgatttcgtggccaatcactgcaccaatagcgccataatttgctgcgtctggagcgctcgggttaaagaatggtggttgcaaaattgcagcagggaatacgattacgttaagcaatggatcgtagtaagcgttcacagtttgcggagtcatctgccattcttcgcgatccacgggctttccagctttcgcagtattcttaccgaagccaaatcgataaacttcgcgcatattttcaactaaaccagcgtcttccttaatatttaacgcagagtagtcaacccaatggtttgtgtaaccaatatttggctcaaatttactaatcttttccaaagctttcgctttagtttcctcaccaagccagctgctgtgagaaatcgactcgcggtaagcgttaataagattgtcaactaagccttgcatatattccttagaagactcagggaaatgcaatcgcacgtattcgcgtccaacttcctcgccgcaggcatcgtcaacaactccgactgctcgcttccagcggtcgcgctgctttgtggcaccagaaagcactttgccgtagaagtcgaatcgcgcttgtgcaaaatcttcactaagtaagcttgcccagcgcaaaatcacgtgcacgcgcgcccaaagctttaaatcttctaagtcggcttcttgccaaatcttattcaaaccttccataaagcttggctcgtgaactacaactttgttaaaagcttcacgaaggttgattggctgatttgttgcttcttcgcaattatcgtacgctttttgagtagcgtctaagaaagcgtcgagattaagcgcttcaagagtttttgctaaatcggcataattgtaaggattataggttttttgagaatcgcgagttgctacgttatcccaatggtagctcgctattttagtttcaacattcaagaaacgctcggcttgcgcttgtgtagtagttgcgtctccgtagcctgctaagcgcagcaaagaagctaccatttttacatattcagtgcgaattggagcgtagttatcttcgcgatagtatgcttcgtctggcaagcccaatcccgattgctcaatatgcataatattcgtcttaggatctttagggtctccgtaaacgccaaaataaaacattgcatctggaccgccgtacggattaagcgcgccaatagtgcgaaccaaatcttccttagtttctgctgaatccacagcgtctaaatcgcccttaattggcgtaattccagctttttcaatagatgcggtatccaaatagttacggtataaggtttgcgactttttggctgggcaattttcgttttctaaaatatctcgaatttgcttttctgcatcttccgcaagcttgtggaaagcaccatacattggtttgtcttctgggagagtgtaagtgtcaatccaaggaccgtttatgtaacggaataaatcgtcttgtggtcgagtaaccgaagagaaggatgcagggtcgaaatctacagcagaaatttccttctgtgattccttattattactattattttcattgttgttagacatgtgcctagattacatgtattaagcgacatcatttagctagtattttcgctatattttgctttattttcgtgcctgcgcgttagtcttgaagcatgattgaacttaaaactccatctgaaattgaagcgatgaagcctgcaggtcgcttcgtcggtagtattcttaaagacttgaaagcaatgaccaaagttggcacgaatcttcttgagattgatgatttcgttcgccagcgtattatgagccgcaaaggtgcgtcttcttgctatgttgattacgctcctgattttggtacaggaccttttgcgcactatatttgcacgtctgtaaacgatgctgttcttcacggagttccttttgattataaccttaaagacggcgatttgttgactcttgatttggcaattaacgtagacggatgggttggtgattccgctattagttttgtggttggaaagcatgcagatcctgaggatttgcgcttgattaagtgcactgaggaagctttggaggctggcattaacatggctcagcctggcaaccgtcttggcgatatttctgcagctgttggttgcgttgctcacgagtacggctacagcgtaaatcttgagtttggcggtcacggagtcggtcatattatgcatggcgatccgcacgttcctaacgatggcactgctcaccacggctacaagcttcgcccaggtttagttattgcaattgagccatggttcttaaagactactgacgaaatttaccaggatcctaaggatggttggactcttcgctctgctgatggttctcgcggtgctcacagcgagcacacgattgcaattacggaaaacggtcctgagattttgaccgtgcgctaaacttatcaatagttgattttgtaagtattttgcgagtagtaattgcgtaaaacaggtatgtaaagaggtactttaagtaaatggcggaatttgatttttcccaagcattaaatgatgttgaagcaaagtattcttcgatttctaaagcactagacgtcgattcgttgaaggctacgattgctgatttagaaaagcaggctgcagagcctggactttgggatgattctgagcatgctcagcaggttacgagtaagctttccgcggctcagtctcagttgaagcgtttgcaagctgtagatcagcgcattgaagatactaagactttaattgagcttggccaagaagaaggcgatgctgattctatgagcgaggctcaagaagagcttggaaatattactcacgagttggacgatatggaagttcagactcttcttgacggcgaatatgatgctcgttctgcagttgttacgattcgctctggtgctggcggcgtggatgctgctgattttgctcaaatgcttcttcgtatgtacttgcgctgggctgagcgaaacggttacaaaactaagatgatggacacgtcttatgcggaagaagctggtattaaatccgctactttccaagtggatgctccgtacgcgtatggtcgtctttctgtagaaggcggtactcacagaatggttcgtatttcgccattcgataatcaaggccgtcgacagactggctttagcgcagtggaagtaatccctttggttgaagctacagatcatattgatattccagattcggatattcgcgtggatactttccaggcttcagggccaggaggtcagggcgtgaacactacgtattctgctgttcgtattacgcatttgccaaccggcttggttgtttctatgcaagatgagcgaagtcagattcagaaccgcgccgctgcaatggcagttttgcaatcgcgtttgcttgtgcttaagcatgctgaggaagctgcaaaaaagaaggaacttgctggagatattaaggcaagttggggagatcaaatgcgctcttacgtgcttcacccttatcagatggtgaaggatttgcgcactggttacgaaacttcacaaactcaagctgtttttgacggcgatattgacggttttattgaagctggcattcgttggcgtcacgagcagcgagttgcagctcaaaaagaagctgaagcagaatcttaaataaaactaaagctagaactaaaaaccaacaattacacataatcttcggaaggaattgaaacaatgtcgctgatttcattagatcatgtgtcaaaaatatatcctcgaggtacacgtcctgcattagacgatgtgtctttgcatgtagatcgcggagattttgtgtttcttgttggcgcttccggttctggtaaaactacattgcttagtttgctgcttcgtgaagaagaagcaaatggtggggaaattcacgtagctggtaacgatttgcgcagactttctaaccgacaagtgccgcagtatcgtagatctcttggctttattttccaggattataagctgcttaataataaaacagtttaccaaaatgttgcttttgctttggaagtgattggcacgagtcggtctacgattcgttcacttgttcctcgtgttcttgaaacggttggtttgactggtaaagaaaataattacccacacgagctttctggtggtgaggcgcagcgagttgcaattgctcgcgcatacgtcaatcaccctcaaattattcttgcagatgagcctactggtaatttggatccaactacttctcttggaattatggaagttttggatgctattaaccgaactggcacaacgattgttatggctacgcataatgaggaaattgtgaactcaatgcgtaagcgagttgtggagcttcatgctggaaaaattgtgcgtgatgagcgtgaaggatcatatgattctgcattgtatttcccagatagtgaagttgagcataattctaaagcacaacaaactgttgaaaattctcaagatcaatcagatcgcgatgctcaaaagtcaattgctcaatctgagcatactgaacgtcataagaggctttctaaaaaagctcaacgtgctgctcaggcgcgtgaagttgttgacatggtaacgcaatcgttgaagagtgacacttcagaaaatgaaggaatcgcacgtttggctcagtctgttcattctggcagaactggtcgttacggcgaagtgttccagtctttggaaacaacgatgacttggggacgaggattgatttcttcaaacgataatgaagatgttgaagagaatgattcagaagttgagatttcggaagataataaagaatcctctgaagttgccggaaattctgaaactgcagaaactgctaatactactgagactactgataatcacgaaactgcagaaactaatgaatctcacgaatctcacgaaactgctgaaactaatgaatctactgaatctactgaaaactctgaagtgagcgaagaatcacaatccgaaaccggcgatgagttgcagtcagaagcagaaagtaagttacaatccgatgttgaatctgagcgtaaatctcagcttcctcctatgcctccagctccgcctaagccacctgttgcagctgaaaatactaataatgagaacattagtgttgacgatagcaataatgacattaataaaactgaaggagcagagtaatgcgtttacgatttattttttccgaaacttgcattagtttgcgtcgtaatgtttcgatgattctttcggttatgcttgtaacgttcatttctttcctttttattggtgtttcagtgcttatgcaagcgcagattaccaaggcaaaaggtgactggtatgacaaagtagaagtggttgcctggctgtgcccggatggaactagccaatctccttcttgtgcttctggaaaagcacctactgatgccgaaattgtaaaattggagcatattattcaccaagaattaggcgatgatgtttcaaatatcacttatgttagccgcaatgaattttataaaaacacattcttaaagcaatatcctaacggaatgtatcaaggacgtactttaactgcggcagacatgcaagattcgttgcgcttgaagcttactaatcctatgaaatatcaggttgtctcagaagttctttctggacgcgatggtgtggaagaagttgttgatcagcgtcagatttttgatcctgttttcagtgtgcttaatcgcgctactgttgtgacaattgtgcttgcagcagttatggttgttgtagcgattatgcttactggcactacgattcgaatgtctgctgctagccgtcgtcaagaaaccgaaattatgcgcttagttggtgcctctaactggactattcgtatgccgtttcttcttgaaggagcgttcgcgtcgtttgtgggttctttacttgctggtgctgcgctaagtttagtagttaaagtttttgtaactgattggcttgcgcagaatgtgcgttggatgccatttgttactcaaacaactgtgtggctatgcgttccaatacttgtagctggtgcagtagtgttatctatagttgcttctgctattgctttgaggcgatacttaaaagcttaaaatgcaaaataataggtgcgtaattatttgcgttattttcgcatgagcattgtgaaagtactattttagaagatttgaagtagaaactcgcgtgattccttgcattacggtataattcgcaatagtgatgttgaaagggaagtgatatgagcgaagatcgacatagcatgtatgcaattcgacgcactcacactgtagtgagtttaatagttgctatttcaatgatgtttgctggtgttgctggtgcattatttaatgcgtctacagcaagtgctgtcaacatgaaggaatataggcgcaaaatacaacgaaacgagaatttgaagcgccaacttgctggtgtaagtaaacaacttgcaaataagatcattgaattgaatgatttaaatgagcataaaattccaaatcaaatacgagctgctcaacaagcagaagagcaagcttctcaggcgcgcagtcttgtagaatcaacgcagcagcgtctagagtctgcacaaaaagataagcgtgatttggaagagaaaattaaaaaaactggtgaagattttgatgatgctaaggctgctgtagcacagcttgctcgtaagagtttccatggttctcaggcatctaatgttatggatattgtgactaaatcaactactacagaacagtttgttggaaagttacaatccgaggctgctgttgctagaagtgaagcaaatgctgctaatgatgctgctattaagttgaatacttctatgaatcgtcgtcagcgtttggctgctattga

SEQ ID NO: 3413 - DNA, 23573 bp, synthetic construct
  source 1..23573: mol_type = other DNA
  misc_feature 1..23573: note = Synthetic
aagctttttatgggtgattctggctccatgctaatcgggtatttaataacttgtgcgtctattataatgacgggtcacttagatccatctgcagtgcacacaagcatatatttgccagtatttatgccgattttgcttccgattttagtgctgtttttgccagtgttagacatgtgtttagcaatatgcagaaggcttgcaaaagggcagtcgccaatgcatccagaccgcatgcatttgcatcacagaatgttgcgcattgggcattctgtgcaaggagcggtgcttattttatggggttgggcggcgcttatatctttcgggtcaataatgattctgttctttaaagcaatttacgtgcttgttggcatgattattgcggcagcgctgcttacagttcttacaatgatgccatatttgcgcaggcggcttccagagctacgaaattcgtaaaataatactcgaatactcgcgaatcatagtttatgaaacgcgatttttacaaacgtcatagcaaaaacgtatagtaaccctatggctacaactgatatgaacacggaatccgtgtatgctcctgttccaccaattttcgagaagctcggccttgcttatgatgatgtgctgttgcttccaaatgagactgatgttattccttccgaagtggatacaactactcatctaactcgcgaaatcactatgaaagttcctgcaatttctgcagcaatggacacagtaaccgagtccgatatggctattgcaatggctcgaaatggtggaattggtgttcttcatcgcaatctttctatagatgatcaggctgcgcaagtcgatattgttaagcgcagcgagtctggtatgattaccgacccactcactgttcacccagatgcaacgctcgcagatttagataaattgtgcgggcgttttcatatttctggtttgccagtggtagatagcgaaaatcgtctagttggtattattaccaatcgcgatatgcgtttcattgcttccgaagactatgatcgtttgaaagtcaaagacgtgatgactcgcgaaaatctcgtcactggtccttctaatatttctaaagaagacgcgcatcgtttgcttgcagacaacaaagttgaaaaattgcctttggttgatgcagaaggcaagcttactggtttgattactgttaaggattttgtgaagactgagcagtatccagatgctactaaggatgatcagggtcgcttgcgcgtggctgctggaattggcttccttggagatgcttggcagcgtgcgtgcgcgcttatggaagctggagttgacgtgcttgtggttgataccgcaaacggagaggctcgattggctctcgatatgattcgcagaattaaggcagataaggcgtttgacggagtacaaattattggcggaaatattgctactcgccaaggcgctcaggctatgattgatgccggcgtcgacgctgtaaaggttggcgttggaccaggctctatttgcactacgcgcgttgttgcaggcgttggtgtgcctcagcttactgctgtttatgatgcggctcaggcttgcaaggctgctggcgttccatgcattgctgatggtggtattcactattctggcgatattgctaaggctttggttgctggcgctgacaccgttatgctcggcggcactttggctggttgcgaggaagctccaggtgaaaaggttttgcttcacggcaagcagtataagctttatcgtggcatgggctcgcttggcgcaatggctcctcgcggtaagaagtcttattcgaaggatcgttacttccaggcagacgttactagctccgacaaggtggttccagaaggcgtggaaggagaagttccatatcgcggtccacttaacgctgtgctttaccagttgcttggcggcttgcatcagtcaatgttctacgttggtgcgcacaatattaaggaaatgcaagagcgcggtcgctttattcgcattacggatgctggtcttcgcgaatcgcatcctcacgatattgtgatgactgcagaagcgccaaactacagcggtttccacaactaaatcgtaagttgcgtaagttgcgcgtataagttgcgtataaatcgcaagtaattttgcattaaacggcgaagagttagctaagtcttttttgctactttctaacttttcgtcgtttttgttttgacaattcgtataaaattattgtatagttagtgggatatcccactaaaaatgaggtgttttgtggaagtagtgaaagattatgacgttcgtcttgatagtaaaaagcgtgtaactctgcgcggagctaaatacccttattacaatgttaaagaatgtgataatggttgtattttattagagccacgtgagcttactattcctaagagtatctcttctaaaactcttaaaagtatggatgaagcaatccgcaattttaagattggcaaagtctctgaacctgttgatctctctgacttctaggagtaagtgaatgaacttcaatattagaatgggtattccagagatgtctaatatttgggagagattgaagaaagagtttctagaaggcagtataagtaaaaaagatctttctctttataagaaatggggaaaatctatgaaacttttatctgaaaatccaaggcatccaggattgcatactcatgatattgaagaattgacaaatagatatggtgttagagtttggcaatcctacttggagaataaaacaagtagtgcaatgagaatgtattgggtttatggtccagatcatatgtcaataactattatcggtttagagcctcaccctgaagataagaaaaatggatcatattctagaatttcactttctgatatgccagagatgtgattttagctgttagtcgtcgctgggaagatgtaggctgatgggttcgaaaaaatattaggaaaggaacgaaaatggctgaagctaaggaagatcttacgtttacgccggaagaatcgcgcttaatttggattgattgcgagatgacgggactcgatattttccacgacgaattatgcgaagtatctgtagttccaactgattttaatttgaaagttctagacgacggtattgatttagtgattaagccgagcgatgctgctgtggctcatatgaacgatttcgtacgcaatatgcacacttcttctgggcttgttgacgaatggaataaaaacggtttgccgctagaagcagcgcaaaagcaggtagttgagtacgtaaagcgcttcctgccagagcgcggaaaagcgcatcttgctggaaactccgttggctccgacaaaaagttcctcgaccgttacatgccagatttaatggcaaatctgcactatcgcgtaatcgacgtaagcacgttgaaggagatttcgcgcagactttacccagacgtttaccgcaataagccggcaaaacatggcggccaccgcgcgctcgcggatattattgagtcgattgacgagttgagatattaccgtgacatgatgttcgttccagctccaggcccaagcgaagcacaggcaaaagctggcgcacagcacattgagagcacgagcttgcttcgtgactatgagcgccgcggtgaagcattagaagacgtaaattccgcagaaaagcgcgactattaaacaaagcgcgactactaaacgcaataaaaggtactgccaatgaagcaatccgaagccctaaccataatcaacgctggtgcaagcgttttcattaccggcgctccgggtgcaggtaaaacctacgtattaaacgaagctattcgcgcaatgagaaaaaacggtttaaacgtggctgtaacggcttctaccggaatcgcagcaacgcatttaaacggtcaaaccattcactcgtggagtggagttggagtttcaaacgcgcttagcgattcgcttcttaaaaccattagagctaggcgagggaaacgcataaaagccacggaagtgctcgtgttggacgaagtttcaatgattcacgcgtggctttttgacatggttgatgaagtatgccgtaaagtgcgcaaaaactctgctcccttcggcggacttcaagtagttatttcgggagatttcttccagctgcctcctgtgagtacttctatgcgaaatcgcgatgtattcgagccaagtccagagtttattgagtcgcgcgaaaagtatgctgctgctggcaagaatccagaaggatatattacggaatctttcgcctgggatgctttaaagcctgttgtgtgctatttaactgaacaacatcgtcaggatgacggcaaattgcttgaagttttgacggatattcgtggcggtcttgtaagcgacgaagataagcaagtgttggctagtcgccttggtgagtatccgcaagacgatgaagtttcagtgcatcttttccctacgaactcacaagcagatggcttaaataatgtgcagcttgcggcaattgatgctgagcctcacgaattcgtggcaacagaagccggccctaaaaatctcgtcgagcgtttaaaaaagaatatgctcgctccagaacggcttgtattaaaggttggagctgcagtgatggcgttgcgaaatgatcaagataagcaatatgtgaacggctcggttgggcgagttttgagattcgcacctgaatctaaaggcggatggccgattgttgagtttgaaaacggcaatattgtcactcttaagccggctgcttgggaaatgacggatggtgagactgttcttgctagcataaatcaagtgccacttagatgcgcgtggggaattacgattcataaatcgcaaggtatgacgcttgacagtgcggtaatggatttgcgtagaacttttgctcccggaatgggatatgtggcgctttctcgcgtggaaaatctgggcgggctttatttggaaggtattaacgatcgcgcgtttagtgtttcggcggatgctgtactgctagacggattcttgcgtgaggcttctaaacgcgcgagtgagttgcttgctagcgacggtgctgctgctttcgtaacaaataatgcggaagatgattctgcgaatcagcaagagtttgacatttttggcgctgtcaattacgcagataatgaagagttttctttcgataacgagttttagcattttgcgccatgacttgcctgagcgcttagagcgttttgcgactaatccgcgcgaacgacataatctatattccgctttttgtacgtgattcgggtcaaaattggtacaaaatgcggaggatgtttccagagtttgtagtccaacactccatttagagctacaaagtcggtaaagtgtttttgcttttgattagctgtgtaaacaagtgtttatgtcctcatgcgcaaatagattggaacgcatgaattccaatgtacttcgtatgtctcagctgttccttcgtacgctgcgcgaggatccagcagacgcggacgtaacttccgcaaaacttatgcagcgcgcaggctatattcgtaaatctgccccaggtgtgtggacttggttgccgcttggactcaaggttttaaacaaggttcaagcgattattcgtgaagaaatcaacggtatcggtgcgcaggaggtccacttcccagcgcttcttccacgcgagccatacgaggctacaaaccgttgggaagagtacggcgacaatattttccgccttaaagatcgccatgaggctgactatcttcttgctccaacgcacgaagaagtctttactcttcttgtaaaagatatgtattcttcttacaaggatttgccagttactttgtatcagattcaaacgaagtatcgcgatgaattccgtcctcgtgcaggtcttattcgcggacgcgagtttattatgcaagacgcttactcgttctcgattgacgaagatggtttgaagtctgcttatgttgaagagcgcgctgcttacgctcgaattttcgaccgtttaggcattaaatatgtgattgttcacgctgtttctggccctatgggtggttctgattctgaggaattcttggctccaatggcaattggcgaagatacttttgcgcttgctccttctggaaaagcttggaatgttgaggctttgaccacaccagaaatgcaagatgttgactgctcggcaactcctaaaatggaagctcttgatactccagatgctaagacgattgaagctttggttaaagtttctaacgatttgcatccacgcaaagacggccgcgaatggcaagcagacgacactttgaagaatctgatcattgctgttaagcatccggctgatgctgagggcggcgaacacgaggagccatggcgcgaaatcgtggctattggtattccaggtgaccgccaggtagatatgaagcgtcttgaagctcagtttgctcctgcagaaattgaagaagcaactgaggatgatttgaaggctcatcctgagtttgttaagggatacattggctttagcgtattaggtcctcaagctcgcaaagagggtagtggaattgaaaatcctgtccgctacttgatggatgctcacgttgcaaagggtagcgcttggattacaggagctgacgaagacggaaagcatgtttataacgctgtttacggccgcgattttgaggatgatggtgttgttgaagcagcccaggttcgcgatggcgatatgagcccagatggttccggtccattgagcttcgaacgcggtgttgagattggtcaggtgttccagcttggtttaaagtattctaaggctttgggcttaagcgttcttaacgaaaacggtaaagctgtaccagtttggatgggctgctatggtattggcgttagccgcgtgattgcatgcttggcagaaacgcatcacgatgatgctggtcttgcatggcctatggcgattgctccagctcaagttcacgtcgttgctacaggcaaggatcaagttgctttcgatgctgctgaaaaagttgttgaagagcttagtaagcagggaattgaagtaatcttcgacgaccgtccaaaggtttctccaggtgtgaagtttaaggatgctgagctcgttggcgttccgctgattgctgtagccggccgcgatactgtgaacaatggaacgattgaaatccgcgatcgcaacggttcaaacgttgaggcagttccagtggatgaggctgctgctcgaattgtagagcgcgttcgcgaacagttgtaatcgcaataactgttaacaacgaatcagcgattaagcaattaaactattaaacaattaaacgactaagcaatattgccgttggtgtaatgctttgcatattatacgcattattttcagcggcaatattgctatgaatagtaaaaaattatataaattattagaatagaatgttaatgagttttaatgtttaattctattaaaactttctaaaaatcatttacacctccttcaatatcgtcatagtggttttcttcgacttgtgagccgaaatctattgtttcttttgctgaagattcagcatcataatggtattcttggctgtcgttttcttgcgaagaatccatagaataagtattagccatagggtttttcatcgccaagctcaaatcttgattggaataagtatcttgatttgcccgattttcttggtttatttgattagtgtgatatttactattgttactctgatcggttcttccacgattataagagtatttagtaaaagcactaattcctcgatttaggtcgtgtccaattgcggtggcttctagtacaactcgagaccggtcttctccatctttgtgccaggattccgtgtttaaatttccgcacacgactatcgcatctcccttatgcacgctttttagcacatttgcagctaaagacttgtatgcttttactgtcatccaagttgtcggtctatctttccactgtctttcctcgctatggtagtaagacgttgtgcttcctattctaagtgagcatgctggtgagttttcgttgcgactaaagttcacagggtcactacctacatagccgctgattgttagtgttgcttgttgttgtgccatattcttaacctttcaaaagtttggactgcgactaatttaaatctcaaaattcatcacgcaacacgtgttgattattgtgattttcaataaattcgccgcagtagaatcaactatgaagtatcaaaaatagttttgcaagttatttttatcaatgtggttaaagcctatgctttatgcacatcgtttaaaaactcttgacaaaatatgtaaaattgagtaggcgagtctaaaatgtgtaaaatatatgtagattgatatacttagcgaaagtagtttttgtttttcattagcattggaaggtgaagcttgagttttttgcctacttgtttgtgttatttgaatcagggattactgaaaagtagttattaatcacgtggagagaggtctacatttatgtggcataagtcgcacgtattttctgcaaagaaatgtttagctgctgcggcatcagctgttgcttgcgtagcaatgattggatctactgccgtatctgctagtgctttggttatagtgcaaaatcacagtgttgctaatgttaatactaattggcaagttaagaatcagtcggctgcaagctacattttaggtgcaattcgtgatgtgcgttcaaagtattatgacgatggcgttacccttatgaacggtatgactcttgcagattatgttacttctaagggtcttacaaaagaacagtatattaatgatattcgctacgatcgtgctaatgaagaggatgcttatcgtcgtgcaaatgagactgttcagcatggaaaacttggacattttgctgcggatggtgtgagccttccaaactacgatggtcgtaaggcttggggcgaaaacattgcttggggtgaaagctcagaagaatctatgtcggattggaccgctggagaggagtctgcgttacaccaatctaatggtgctgaaactacttacaatgctcatctttaccagattttgaatccagaaaacatttccttcggatatggtgaagtagctggtacctcatacggaagagtatctgttttaactctttcaactcaggttggagacactgactacccacaaggcaagttaggtgttgctcctcaccttgattttgcttggattatccgtaataacgatattgctgttggtgcaaatgcttacaccgacaagcagcttgagtatcgttggctttcttacaatttgaatactcagcagtgggctactattgctgattggggtactggaaactgggcttcttgggttacaaagccaggtgactattggctgcattgtgaagctcgtgatccttctactaagaaagttattttagaaaagacaattgctttccactacacagttccaagccaaacagttattactggaacttatgctggttggcaaggcaatagtgttcttcttggtgcatccactaataatcctaatggctctaccaagattaagatttatgattacaatgctaagcagtgggttgaaggatacgatggcccttgggctttgtggagcccacgcccaggcatttactggactcatttcgaagcttacgatgagaatggtaatttgtcggatgttaagacctacgcctttggcgtgtgaatctgattagtaaatctgattagtatcatttaaaaagcctgcaaacgttttaaacgcttgcaggcttttgtttacttatttactttatttgtgttttatttgcaacttaccaaatgtgtacgcgctcgcttggagcaagccacatctcgtcgccgtctttaacgtcgaaagcatcgtagaacaagtcaacgttgcgcgcaatgccattagtgcggcactctcgttattaagttaatgctatgccatagatatttattacgcgaaaatctatagatatttattttatttatataaataattgattatgattttatatatggaaggcaatatttcttatgctatcggcattgacgtcggtttaaattcagtaggtcttgctgcaattcgcttatatgataatggggagcctataagaatacttaaagcaataagtgttattcacgatgctggtattgatccaaatggtgcaaaagaatctgatactcgtaaagcaatttctggtgtcgcgcggcgtgtgcgcaggttatatcgtcagcgcagacgccgtttgcagaaacttgattttctattacaatcattgggttggccggttgttgaaaacaaggatttagagttttttaattcgtttattccatggatttttcgtgcaaaacttgctgatgaatatattgaggatgaagaacaacgtaaacaaatgttaagcgttgcaattcgtcatattgctagacatcgtggttggcgcaatccttatcagtcaataaaatcaatgatgcaagagactgagtattctgaattttacaatgagttgctaaaaaatattgaaaagtttgcgccaggagtaggttgtgaaggttctacgcctgcgcaattagtacgcgattatcttttatcacaacaaggtaaaccctcacgtcgtttacgtataactacagacgataaaaagaaaaatcatcccaactcattagatcctgttttaccacgtaagctaatgcaaagtgacagcatgcttgagattctcaatattttcaatgtgcaacatattgatgacaagtatgttagagagcagattattaatgctgttttttatgagaaatctccgcgtggctctgcagaaaatcgtgttggcaaagatgctataacaggaaagggtaagcgtgcgctaaaggcatcgttagcgtttcagaaatatcgaatcatatctactatttctaatcttcgcataagagaaaattcaaaagaacgttgtttaacaatagaagaaaaacagaatgtttataaattattaacaacttcgactgatgagtcatcaaaaaagaaaagcgctgaagtaccattatacacttggattgatgtagctgattgcctcggaattgaacgctataagttgcgtggagtaggatcacaaataggagatggagaatctgttggtaatcgtcctccaatgttgaatagtgagttagctattatttatgcgaataataaatctttaagacaatcgttgctcacgtggtggttagatgctaatcgtacgcaagaagataaagaagctcttattgagatattgagcaacacggtagacatagaagcaattcatgataatcctgaatatcaagataagtacggttcagcaatagcatttattgattcaatggatgaaacagaaattgcggcattggaaaatatttcattgcctaatggtcgtgctgcttatagtttggaaatattagataaactcaataagcaaatgcttgaaactgatgatgatctatttaaagcgcgcaaaaagttatttaatttaccaaataattggcgtccatctgaagctcctattgcagagccaacaggtaatccttcagttgatcgagtattgaaaattgtgcatcgattccttataagtgctaaaaatcgttggggtaatcctgtacgtattaatattgagcatgttcgttctggattccaatctaaaaaaatggcgaattcatataaggaattattagataaacgaaccaaaggtaaagaaaatcttaaagcaatgatgcggaattctttgcatttaggcatgagtgattctatttcagatgcagatatacgccgttatgaggctgttcaacgtcagaatgggcaatgtttgtattgtggctatgagattacttatcatacatgtgagctagaccatattgttccgcgtaaggggccaggttctacgaatactcgtgagaatttagttgctacttgcttatcgtgtaacgctcaaaagtgcaatactccttttgcaacttggtgcgagcagtctacatattgcaagaatcatgatattagtgtagattccgctattaatcgggttcgtgcttttattttcccgcctaaatcatacgataaacgcggtgctaatcaattcaaaaaagaagttatatctcgcttgaaacaaaaagttggtgatgaagcgtttgataatcgttctatcgaatcggttgcatggatggcaaacgaattgcatcgtagaattgattggtattataactcgcagaattatcaaacaaacaatggtatttccgatataagtaataaagctcaaacaaatgttggagtttatgctggatcgcttactgctatagcaagaagaatgtctggaattgacggaaaactggagttctttgatggtagaaggaaaactcgttttgatagacgacatcatgcagttgatgcatcagtaattgcaatgatgactccaggaatggctcgaatacttgcaattaaatgcaatctgcgtgaaacacagttattgcaaggcaataaagtggttcctggtggtattgattggagagaatatccaacggctaatgatcaaggatatcagcaatatgctaattggtctgttcgtatgaatgcgttattgaaacttcttaatgaagaaatgagagctgatcgtattgctgtggttaattctattcgtttgagatacagtaattcttctgttcacaaagatgatgtacatgcattattaaagttgcacgtcggcgatgaaatcgacagtgaaacaatccgacgtgcttctactcctgcgctttattgtgcgttgacacggaatcctgattatgatgtaaacaatggtcttcctgaaaatccagatagaactattctgttgcataataagaagttaaatgcatacgattcaattacttttttcaaggcacaagcagcacagcttttcgtacgagaaggttctgtagagattggtaattctatccatcatctacgcatttatgaatactttgaaaagttgaaaagtggaaaaattaaaaaatcttatggaatgattcgtgtatttcaaaatgatttgcataaacatattcatgaagatttattctcgtgtgatttgcctgaacaatctatctcaatgagatatgctgatacagaagtcactcatgctgtgcaaacaggtaatgctaattatctcggatatcttgtgcctggcgatgagattatcgttgattttagtcatgctaaattatcaggatatattggtgactttgtagaattcctaaacaagataggtgcagattgtacagcatataagcattgggtggttgtgggtacggacgataaaacaactttgatacttaaaccatcgatgatttcttctgaaggaattgacaagttgtattcgaattgcaagcgcaataacttcgattatacttcttatgaagaatctattaataagattctagctggtaaaggttggcgtgtttcggttaatgtgttggccaagtataacgtagcaactattcgacgtaatgcgttaggtgaagttcgttgggtatcacgttcgcatttacctatttcttggcgttgggatactggagaaaatagagaatagaggaattatgcagaatgcttggcgtgtgattgattgtactaatttacaaggtgaattacggtatattcgcggtaggattttagtgtgtgatcacgcattagagcagaaagttgaaattccgctagcggaaacggcaatattgcttattggtttgcattgtaactgttctgcaggtctgcttcatcagtgtgctgaatatggtacttgcgtaatgacctgtgattggcgatgtgttcctatcagtgctatgcattcgtggaccaatgttcctacgagaattacggttcgtcaattgtctcaggcaacaatgagtgtgcctcgaagaaaagcagcgtgggctcagattgttcgcgcgaaaatacgtggacaagcagcttgtcttgatttattaaataaagaagggggtggattattacgcggactatctaatactgttcgttctggagatgtaacgaatagagaaggccaagctgctcgtgaatattggaaacgtatttttcccgaggaagaagattttcatcgtaaaccagggtctggtcaagataggaatgctttacttgactatgcttatatggtgttgcgtggtttttccattcgtgcagttttatctgctggtcttaatccaacaatgggtatgaatcatcataatggtactaattatttctgcttagcagatgacataattgagccgtttagaccagctgttgattacgctgtttcaaaattatcattctcagatactccaaatgataaagcagttaaaaagtatttgatcgacagtgttaatcaacagtttaatggttctggacatacaattcctagcgctttatctgatttagctcaatcatatggtatttatgtggaaaaagacatggaagactttcgagtaccacaatttgtaaggagtgaattatgaaagtcgatgaggacagtggtggcatgtggtgtttagtaatgtttgatttaccagtgaaaacaaaagtagagcgtcacgctgcaactgtatttcgcaatatgctgcttgatatggggtatgcaatggtacaattttctgtgtatgtccgttatagccccactcaaacaggaaatagaacttcagtaaaaataattaaggataatcttcctccacgtggatcaatacgcattttacatgtcagtgatcatcaatggtcatctgcacaacgttattacaatgccaggcaagaaaagaaagaggaggctcccgatattgctatgcttttttaatcataaaatgtcttataatggttggaattctaccattcttgatgatataccaattatatcaagaatggtagaagctaattttcaacgccgaagcagaatactttgtaaatactgcaattatatcaagaatggtagaagctaattttcaacctcaagcatcggtggaatcatatttctatcaattatatcaagaatggtagaagctaattttcaacttgttgagcgtcctgtttatgatgctggcaattatatcaagaatggtagaagctaattttcaaccaataaataaaaacggggaagctggaaagcttcccctgcagtaataatcattaaaactgctgagcaatcaaactggataacaagtccagtcttattgaaaattagcacttctaatatatcatctttaagaaataaaaaacaagtggacttttttaagttttgttaaaatatttgaaaaattaacatatcaatgtgattgatggatagtgtagttgaaaatgttattacttttcgaatgcatgtgttttctaaaaactgcattcgtgaaatgtatgtatgtaggttttatgtaaacagcatccatatattcataatgggaacgttactaaggtagcattcccattatgttttttataatatgcgacttatatgcgatttaccaaatgtgtacgcgctcgcttggagcaagccacatctcgtcgccttctttaacatcgaatgcattgtagaacaagtcaacgtttctagcaatgccgttagtgcggcactctgcaggggaatgtgggtcgatttgaaggtattgctcagcaatctcgttacgagcctttgaacgccacacaagtgcgtagcttaagaagaatcgttgcaaagcagtgaaaccatcaatcttaggagcgttcagcaaagtttcgcgaatcgcatcgtcacttccgtcgacttcttgtcccttgctcttttgcaaagcaaaagcgtaggctttaagagcaatagttacgccgcttaaatcaccaatgttttcgccgattgttaaagcaccatttacgtgaggcattgcatcgcgctcctctttgctctttaagtgagagtatttaacaataagctgcgttggtgtaaaagcattgtattgctcaataagcgttttagtgcgctcagtgaagttggttttgtcttcttcagtccaccaattgttaagcacgccgtcgccatcatattcgcaaccttgatcgtcaaaaccgtggccgatttcgtggccaattactgcaccaatagcaccgtagtttgctgcgtctggagcactagggctaaagaatggcggctgcaaaatcgcagctgggaacactattacgttaagcagcggatcgtagtaagcgtttacggtttgcggagtcatctgccactcttcgcgatccacaggttctccagcttttgcagtatacctaccaaacacgaatcgagaaacttcgcgcatattctcaattaagccagcgtcttccttaatatttagcacagagtagtcaatccaatgattcgtgtaaccaatatttggctcaaacttgctaagcttttccaaagccttcgccttagtctcctcgccaagccagctgctgtgagaaatcgactcgcggtaagcgttaataagattgtcaactaagccttccatatactttttagaagactcagggaagtgcaagcgcacgtattctttaccgacttcctcgccgcaagcatcgtcaacaactccgattgcgcgcttccagcggtcgcgtggcttggtggcgccagaaagcactttgccgtagaagtcgaatcgcgcttgtgcaaagtcctcgcttaacatgcttgcccagcacaaaatcacatgcacgcgtgcccaaagctttagatcttctaagtcggcttcttgccaaatcttattcaatccttctataaagcttggctcgtgaactactactttgctaaaagctttacgaaaatctattggctgattctttgcttcttcggaatcgtcgtaagatttttgagcagcatccaagaatgcgttaagattcagcgcttcaagcgtttttgccaaatccgcataatcgtaaggattataagttttttgagaatcgcgtgttgctacgttatcccagtggttgcttgcgatttgtgtttcaaccttcaagaaacgttccgattgctctcttgtagtagtggcatcaccgtatccagctaagcgcaacaatgaagccaccatttttacgtattcagcgcgaatcggagcgtaattatcttcgcgatagtatgcttcgtctggcaagcccaatccagcctgctcaatgtgcataatattcgtcttagggtctttagggtctccgtagacgccaaaagcaaacattgcattaggtccgccatatggagtaagagaagcaatagtgcgaactaagtcttctttgctgctagctgcatcaacagcgtctaaatcgctcttaattggcgtaattccagctttttcaatagatgcagtatctaaatagttgcggtataggattcgcgactttttggctgggcaatcttcattttctaaaatatctcgaatttgcgtctctgcatcttctgcaagcttgtagaaagcaccatacattggcttatcttctggaagagtgtaagtgtcaatccaaggaccgtttacgtaacggaataaatcgtcttgtggtcgagtaaccgatgagaaggaagctgggtcaaaatttacagcagaaatttccttctgcgattctttattattattatcattgttattaggcatgtgcctagattacaagtattaagcgacatcattggctagtattttcgccatattttgtgctattttcgtgcctgcgagttagtcttaaatcatgattgaacttaaaactccatccgagattgaagctatgaagcctgcgggtcgcttcgttggtagtattcttaaagatttacaagcaatgacaaaagttggaacaaatcttcttgagattgatgactttgttcgccaacgcattatgagccgtaaaggtgcatcttcttgctatgttgattacgctcctgattttggaactggtccttttgcgcactacatttgcacttctgtaaacgatgctgttcttcatggcgttccttttgattacaaccttaaagacggcgatttgctaacgcttgacttagcgattaacgttgacggatgggttggagattctgctattagtttcgtggttggaaagcatgcggatcctgaagatttgcgcttaattaagtgcactgaggaagcacttgaggctggaattaacatggctcagcctggaaaccgccttggagacatttctgcagctgttggatgcgttgctcacgagtatggttacagcgtaaatcttgagtttggcggtcacggagttggccatattatgcatggcgatccgcacgttcctaacgatggtactgcgcatcacggctacaagcttcgcccaggcttggttattgctattgagccgtggttcttaaagactactgacgagatttatcaagatcccaaagacggttggactcttcgatctgctgacggttcgcgtggcgctcatagcgagcatacgattgcaattacagagaatggtccagagattttgaccgtacgctaaacttcgaatagtaagtgcgtaaaacgaataatataaaatataaagaggtactttaagtaaatggcggaatttgattttgcccaagcgttaaatgatgttgaagcaaagtattctttgatttctaaggctttagacgttaattcgttaaagactgctattgcagatttagaaaagcaggcttcggagcctggactttgggatgattctgagcacgctcagcaagttacgagtaagctttcggcagctcagtctcaattaaagcgtttacaagccgttgagcaacgcattgaagatactaagactttgattgaacttggtcaggaagaagaggatgctgattctatgagcgaggctcaagaggagcttggctctattgctcacgagttggacgatatggaagttcaaactcttcttgacggcgaatatgatgctcgtgcagcggtggtgacaatacgctctggtgcgggtggtgtggatgctgccgattttgcgcaaatgcttcttagaatgtatttgcgttgggcggagcgaaacggctacaaaactaagatgatggatacgtcttacgcagaagaagctggtattaaatccgccactttccaagttgatgccccatatgcgtatggtcgtctttctgtagaaggcggcactcacagaatggttcgtatttctccattcgacaatcaaggcaggcgtcaaactggctttagtgccgtagaagtaatcccacttgttgaagctacagatcatattgacattccagattctgacattcgtgtggatactttccaggcgtctggccctggcggacagggcgtaaacactacgtattccgctgtgcgcatcacgcatttgccaactggtttggttgtttcaatgcaagatgagcgcagccagattcagaaccgagctgctgcaatggcggttttgcaatcgcgtttacttgtgcttaagcatgccgaagaagctgctaaaaagaaggagcttgctggagatattaaggcaagttggggagaccaaatgcgctcatacgtgcttcacccataccagatggtgaaggatttgcgcactggctacgaaacttcgcaaactcaggctgtttttgacggcgatattgacggttttattgaagctggaattcgttggcgtcacgaacagagagttgcagctaaaaaagaggctgaggaaaagtcgcaagcttagtctgcattagataaaattcaagataaaagtcagaataaaaatcaaaaataaaatataaaatagttaaaaacaaaattaaagtatatcgttcaatagttcgtaaaggaaactgcagaatatgtctctgatttcactagaacatgtgtcgaagatctatcctaagggtacgcgccctgctttggacgatatttctttagacgttaatcgtggcgacttcgtgtttcttgttggagcgtctggatctggtaaaacaactcttctaagcttgctgctgcgcgaagaggaggccactaagggcgagattcatgttgctggtaatgacttgcgacgcttagtgaatcgtcaggttccgcagtatagacgtactctcggctttattttccaggattataaactgttgaataataaaaccgtgtatcagaacgtggcttttgcactagaggttattggtacgagtcgttctactattaagtcgcttgttccgcgtgtgcttgaaacggttggcttaactggtaaggaaaataattatccgcatgagctttcgggtggtgaagctcagcgtgttgcaattgcgcgcgcgtacgtgaatcatccgcaaattcttctcgctgacgagcctactggtaatttggatccaactacttcgcttggtattatggaagttttggacgccattaatcgtacgggcactacaattgttatggctacgcataatgaagaaattgttaactcaatgcgcaagcgagttgtggagcttcatgctggaaaaattgtgcgagacgagcgtgaaggatcatatgattctgcgctttacttcccagacgcagatgttgagcaaaagtcgaaagctcagcaggcagttgaaggcgattcaggtgttcgtactgtggcagattcaggctctgatcacaccagttttaactcgtcttctgaagatcctaaaaattacagattcatgtctaaacgcgcaaagcgtgcagctcaagcaaagcaggctatggatgctgttgcgcaaactttgcaaaatggttctgaagataatgagggtattgctcgacttgcgcaatctgttcattcaggcagaacgggtagatatggtgaagtttttcagcctttagaaacaactatgacttgggggcgtggtctttcaattccaccagctcctcccgtgcaaaagtcgaatgatgctgaagatatgaagaattcagattttgcagattctagcaactcttcggattctggcgattctcttgatttaagtgagaatcaaaaagataagaataatacagaaaatattgtcgaaaacgatattgaaaattctagcgaaaattctggcgaaaacgtcggcaatacaagcgagaatccaagcgaaactggcgattatattgaatctaaagaatccaatgaaaaaagtaaatctgaagccagtaaaagcgaaaatcttaagaacgaaggagacgagtaatgcgattgcagttcatattctcagaaacgtggattagcttgcgcagaaacgtttctatgattgtttcggtaatgctcgttaccttcatatcgttcttgtttataggcgcatctgttcttatgcaagcgcaaatcacaaaagccaaaggtgattggtatgacaaggtagaagttgtagcatggctttgcccagacggtacaagtcagtcagcatcctgtgcttctggaaaagctcctactaaagaagaaattgtaaaattggaaaacattattaaccaagagttaggtgatgatgtttcgaatatcacttatgttagtagaagcgaattttacaagaatacttttcttaagcaatatcctaatggcttatatcaggggcgtactttaacagctgctgatatgcaagattctttgcgactaaagctcacaaatccaactaaataccaggttgtttcagaagttctttctggcagaaatggtgttgaggaagtagtagaccaaagacaaatttttgacccagtgtttagcgttttgaatcatgccacggctgttacaatcgtgcttgctgcagttatggttgttgttgcgattatgctaaccggtacaactattcgtatgtctgcagcatctagaaaacaagagacggagattatgcgacttgtgggcgcgtctaattggacaattcgcatgccatttattttagaaggtgcttttgcgtcccttatgggctctctgctatctgggtgcgcgctaagcgttgttgttaaagtgtttattacagattggcttgcacaaaacgttcgttggatgccatttgtaaatcaaacaactgtttggatgacagttccagtgctggttcttggagccgtgctactttcaatagtcgcctccgcggttgcactcagaagatatctgcaagcgtaaacataaaagaaaaatttaaattatcaataaattatgaacattaatagatcataaataaaaaatcataaataaaaaaattttatcgataatagaattttcaatgtataattcgcattagttgtgtttgaattattctacttgaaagggaagtaaatatggaaagcaagaaatgccatgcaaaatattgtaagcgcactgttgcaagcgcgattgcaagcagctttcttatgctttctgccggtattaccttatatgcttgccagccactacgcgctgatgcagttaccatgcaagattacaacaggaaagttcaaagtaatgccgctcttaaaaagcgtcttgctggagtaaataaacagcttgctgataagattctagagctcaatgatttaaacgaacatcaaatccctaatcaagtccgtgctgctcagcaagctcaggagcaagcgcaacaagctatgggccttgttgaatcaacaaatcagcgtttgcagtctgcgcaaaaagacaaactcgatttagaagaaaaaatcaagcagactggcgaagattttgatgatgcaaaggctgctgtagctcaacttgctcgcaaaagtttccatggctccaatgcctctaacgtaatggcaatggtgactaaatccactactaccgagcagtttgttggaaaacttcagtcagaagctgctgttgcacgtagcgaagcaaatgctgcaaatgatgctgctgttactttgagtaattctatgaatagacgtcagcgcttagctgctattgaaacagagattcaaaaattaaaagcaaaagctgattctgaggcgcagagtgctcaggctgcggctaaggctgccagtgaaaagcagcgttctcttcagtctttaagagatcagggaactattctaagaaagcagttagagagtcaaaagaatagtcttacttctcaagatgctcgcgaagctgcggaaataattgctttgaagtcacaaattgacgctcaagctagggctttagctgctacggctgcagctcgcatgaatcctaataatggtaatcgtcaacagcttagaggcggtggcagttggaatactccttctttgccctcgctgccgctttctaatggtgccgcaaatggtatgaattacgcggttcctgggaattgtcctgctggttctggcaattgctatggtcataatactggtaacacagctggaggttctgcctatccagctcgtcaatgcacactttgggcgtatttgcgtagatctcagcttggtcttccagtaggatcctttatgggcaacggtgctgattgggcgaattctgggcgcagacttgggtatttggttaaccacactccacacgttggcgctgttatggtatttgctagaggagctgctggatcagatcctacatatggacatgttgctgttgttgaacgcgtaaattccgatggctccgtgcttatatccgaaggtggcgttggatttgcaactttcccgtcttataggact

SEQ ID NO: 3414 - DNA, 23516 bp, synthetic construct
  misc_feature 1..23516: note = Synthetic
  source 1..23516: mol_type = other DNA
tgtgtgacgtttattgttccagaatcaggtttgattaatcctgaaataactttaagaagagtggtttttccgcatcctgagcgtcctattagagatacgaattcgccttttttaatatttagatttatatctcgtaatattttagcgttatttttaaaagtcacaccaatatgttctagagtaacgcagtaagagttatctttagtctcatagttttcttctatttgagtgttcatatttactcctactgcgttgctctaaatcatgtttatataatatttatataactttgttatacaagcatgttatataactttgttttaattttgattaatcagttatatattattttattttgatatttaattttttgtttttactgatatgtgttttatagatatatggattaatttacttcgtgcaatccattacagaatctttcaaattctttggagcttgcttaattaaaccatatttcacgtattccttagcttgagtttccatcattttcaaacctttttcatcgattggacgaatagttggattgtcaaacttttcaatttgcttaataatagtttcgcttgctccaagctgcttgtaagcgtttccaataacattgttttctttatgagacttttctgcttcgcgaacaagtgccttgtacatcttcttaacaagatctggatgcttttgggcaaagctcttagaaacaatgtgaatagtaacattcatattgccgtactttttagcatttacaagcaattttgcgcctggagttgtcattgctgcagcaagattctgatcgaatgaggaaattgcatcaatctgtccagaagtaaatgctgcctggaagttcttagggctcatctcaactttgttaactttagaaacgtctaaaccgcttttatcaaatgcgcggtgaagcatgtagtcgccagtgtcaccgttatgaataatagcaactttctttccgtataagtcttttagtgtttttacgccgctttttgcggatgcaacgattccttgagaatcaccattgtaatattcgagcgcaaaagctacccatggttgtccttcagcaatcaaatcaatgaagcgtccagttccggtagttgtagcatctgcatttccgctcataacagcagtaagaccgtcaactggagtgtaaggaccagtgtaaactactttagatttgccaaattcgtcttgaaggaatttctcatttttcaaagtagttaaataatttgctgttgaaagataagcaactctcatagttccagcgtcttcttttgaagaagcgcttaatgatttttgtgagcttccgcaagctgcgagagatacagttgtgcaaacagcgcagattaatgcaataatgctctttttagaaaatcgcatttttaaattagccatgatatatagttccttttgtttgttgttttatttatctgttgtttgtttggttgttattatttggttgttgattctaaatattgactaattcttaaaaagcaatttaatgcattttaaaaagtagttaactttagaaaaatgttgatattactagattattggcgtgattttctatctaatctgcgctcaggtataagaagatactctaatatgtttgcagtaagctcagatccaagacctgcaattgcgtacataataacgcatgccatcatttgatctggcctaaagaattcttgcgctcttgaaagaatgtatccaattccaatagaagaattaactgtttcgcaagtcactaatgcaacccatgctacagatattgcaaatcgcaaacctgtcataaaacttggaagtgtaccgcgaagcaaaatagatataaaaatagtagattttttaacgtgataaacctgcgctaattcgagaagtttcggatcaatattacgcactccgtcgcgaatattaacgtacataggtccaaaaacgccaacagctataagcgctattttcatcgtttcatctattccgaggaaaattattaatattggagctaaagccgggaatggaattgacctcaacatgtggcttggtttatcaactacaatattgccaagcttactgcctcccgcaagtatgcctgcaggaacagcaaaaataattcctaacaaaagtcctaaaagaactcgtaaaatacttattcctaaggattttaacaatatgccttcgttgtttaaatcaataaaagcttgtattacttcatatggggacggcaaagaacggtcttcgattggagaaagagttgtaaaaaaccacaaaaccaaaatgaggatagttgaaatccacactttgaaagaagataccgctttaaatgcaatcttcaatatgtttttcgctttattaggcgaactgtaagtcatgcgacaatcccttcgatagttttagctatatcaggttcaacgagtgtattctcagcgcaacactgtatgtattgttgtttggcacgatgtagttgcgcaccccgtgtctgtggtcattatctcccaagggtatggacatgtatatttgaaatcgatatttataaacgatattgcttaaaaatatacaattggctcatatgactcgaattaaatcaaaatattgtgaacgttcacggcataaatacgctggtactcaatataacgtccataaaacgcactaatcttggaagagtcatcacaacccataggtataaaggagtagttgtggcagctattgaaagcgtatatgcacgcgaaattttggattctcgtggaaatcctactgttcaggtttatttggagaccgaagatggcgctcagggtattggtttagtgccttctggtgcttctactggtgaggctgaagcttgggaacgtcgcgatggcgacaagtcccgttatcaaggcaagggcacgttggaagctgttaaggctgtcaacgaggtaatcgcacctaaggttattggcatggatgccaccgatcagcgcgctcttgatgagacgatgattgagcttgatggcacgccaaacaagggcaagcttggtgctaacgcaattctcggcgtttccctcgctgctctctacgctgctgccgagtctgctcagcttccgttgtaccgctacattggcggcaccaatggtcacattcttccagttccaaacatgaacatcatgaacggtggtgctcacgctgatttcgcaaccgatattcaggagtacatgatttctccttacggtttcgcgacctacagcgatgctttgcgcgctggtgttgaggtttatcacaccttgaagaatgttttgaagaaggaaggcttggctactggtcttggtgacgaaggtggcttcgctccaaagatgaagtccaacgaggattccttgaagtacatcatggatgcaatcgaagccgctggctacgagccaggcaagcagattggtatttctcttgacgttgcttcttctgagttctacaacaaggaaactggtaagtatcgtttcgatggcgaagagcgcgaatctgcttacatgctcgattactacgagaagctcattaacgagtatccaatcgtttccatcgaagatccattccaggaagaaggctgggatgattgggcagaaatcaccaagcgtcttggtgatcgtttgcagttcgttggcgatgacttgctcgtcaccaatccaaagcgtttggctaagggtattgagcttggtgcagctaactccttgctcgtgaagttgaaccagattggttccgttaccgaaaccctcgacgctattgagcttgcaactaagaacggcttcacttctatggtttcccatcgttctggtgaaaccccagataccaccatttctgatcttgctgttgctaagaacaccggccaaatcaagactggtgctcctgctcgtggcgagcgtattgctaagtacaaccgcttgcttgagattgaggaagagcttggttctaccgctcagtatgctggttacagcgcattcaaggcttgcaagaagtatatgaagtaacttttagttttaagtaacttagtggcttcttgagtctttgagttttaacggtcagtcgtgtttacggctgaccgttttttattaaatatttttgaaaaaatcacaacacgcaaaaaatttttcttaaatttactttcattctccgcataatggtgatatttttgtgagaaaatcgaaacagaaggagatgtttcattatgcgaaaagtagcagttattggtatgggaaatgttggcgcagctgttgctcatcagcttgttgttggtggttacgccgacgagctgtacttatatgacaagaatgaggctaaggttaaggctgatgcattggattttgaggattcaatggacaatttgccttttaatgtaaacattactgtcaatgattacgatgctttgaaagatgttgaagttatcgtaagcgctatgggcaatattaagcttttagacgtcccaaatcctgatcgtttcgcagaacttaaacataatcgtgttcaagttgaagaagttggcgcaaagattaaagcttctggcttccatggtgttctaatcgatattacgaatccttgcgacgctatttgccagctttataaagaaacaactggtctcccttatgaaaaagttattggcactggaacattgcttgattctgcacgtcttcatcgcgctgttggtaaattcttcggagtgcatccaaaagccgtgaagggctatagcttgggtgaacatggtgattcacagttcgtcgcatggtccacagttaaggttcttgaacagccgattgttgagtttgcaaaagaaaagaacattgatttagatgctgtcgatgaagaaactcgtcaaggcggcttcactgtgttctacggaaagaagtatacaaattacggtattgctgctgctgcagttcgtttggtccatgctgttctttcggattcgaaggagcaaatgcctgtttcgaactatcgagaggaataccattcttatctttcttacccagcaatcgttggtcgcgaaggtattgtgaagcagtgccaacttgacttgactgaagaagagttgcaaaagttgcagcattctgcagatacaattttgagtaaagctcaagcaaaatagacaagtcaaaaataaaataactaaaaatactacttttgaatctaaaatatttttacagattttagacaaaagcgtattgaaaaatgtcgttgtaggtttaattgctcataaagagtgttgaatttacagcgacatttttgttataagaatttttgatattagcttatttattatttgaatttataaagttggctagtcttaactgttcatgatatatacttttaactataaattgaattattttttgggggtggaaatatgatttctagtgcatacataagtgttggaagcaatataggtgatagattacttaatttgcgccaagctgtttcgctattgaagcaaaattcgcatataagcaatattatcgtttcttcagtgtatgaaactgaaccagttggtgacgtagtgcaagacagtttttataacattgctttacgcttggacactgatttaacagcttttgaattgcttgattttattcatgatattgaacagcgtcttcacagaaagcgcatagttcgttggggtcctcgaacaatcgatttagacattattgattttggtggtcaaactataaaaagtgaaaatcttacgattccgcacaaagaaagagataatcgcagatttgtattagttcctttgcttgaaataagcgaagacgatgcaaattatcatgagctcatccaagataagcttaataaaactagcgacactaattggattaatattattgaaagtagcgaagtttttaattagtttggaatataaatttactttttaaatatgaggttttagaaagaaagaatacaaatgcgaattattgaaagcaatttggagaatgcatcttctaaaaatattgcagatatagcgttactgcaggatctttgtgtaaatcaaaaaattttatgcacgtgggaaaatattagcgaaaacgatttaagcaaagtagctgattttctcgatcattttgatacagctatcaaagtttccgagtcttctattgacttcattttgccgcttattgctcttaaaccttttatgcaagaatgcgaaaaagcatggtacgaagatcaagaattactttcaagtttgcgctcgctattaaagcaaaaagcaattgtgtggaatgcaggtcgattctgctttgatacacttgacaagcctatagtttacgcgattttgaatattactcctgactcattctatgatggcggcaagtaccaaagtgaggacgaagtaaatagccatattaaagaaatagttgaagctggtgctgatgttatagaagtaggcggtcaaactacaaaacctggtggttatttagaaattactccagaagaggaaataaggcgcgttatacctgctattaagtatattcacaaaaattatcctcaaattgctgtagcagtagatacttacaagttacctgtaatggaggctgcaattgaagctggcgtagatattgtaaatgatgttcgtgcgtttgattctccagaaaaagtaaagcttatggcagattctaacgttggattagtaacaatgcatagcaatagagatacagaatatgacaatttaacaaaggttatgtgtcaattctttagcgataatttaaaaatgcttgttgatggaggagttgacttaaataggattattcttgatcaaggaattggctatgcaaaggttgctgatggtgaacaagattatgcaatgatgcgcaatattaatcaattgcatcgttttggtcgaccaatattggttgcgatttctagaaaaggttttggtaagaagctttttaatttagataaagaagatcgtttgccagttactttagttgcagaaacagcgatgtttatggctggtggacgtgtaatacgtgctcatgatattgcagaaacaaagcaattagttgaaatgattgatgttattaatagaaattactggtttaagtagaaaaatttgaatatttttttgcagttttgttcgtcagtttttttttaattttaataacgaataaatgtagagtgactgtaaatgtggtacaacagcattttgcatctaaagcacgtaagatattagcggaatacatgatgttttcacgtcgaatacatcgagtaatttagagagtatggttatgaaaaaacgtcgtaaaacggcattaggtgaggatgtagtatcaccattgcaacagcgtcgactactttcaggaccgctcgtgtttttatttatggtttttgtagttaccgttggttcaattgaatgcatttcaacagttagaaattatgcgttaagcttgtcggagcttcatgcacttcagcgtgaagaaagtgatttacgtgaacaaaagcgtacgttggataataatattgaccgatggaaagacaaagcatacgttaccgctcaagctagagatcgcctcggctttatttttcctggtgagcaggctgttcgtgtagagcatcctgaggcagtaactggaaaagttccgaatgaatttgctcaagaaaatagcgaaactaagactcattcagtcttgccttggtatagtgacttaatgtatgcaatacataaagcagacaaaccagatactgtgccatccttataacacataaactgataaaatatataaactgataaagtaaagaattatttatttgtaaaacagctttaacaggagtagaaacgcatggctaacagccaagaaagttcagataaaatgcagaacagtaataagaattatattccaaaagaagctgtaaaacgtttatttactacacctgcgagtgatgctgagcgtgcaattgttgaaaagcaacttggaagattccctagaggaatggtagctgttggtgctcgttgcgtttgtggtagacctcttgctgttattactagaccatgcttagaagatggcactccattcccaactacatgctaccttaccagtcctgaagctgtaaaagcggtgtctcgcgtagaagcagacggtattatgcgagaatataacgagctattacaatcggacgaagatttaaagaaacaatatgagcgtgcacataagtattatttggaattccgtcatgaattagctgtgtctttgggggatagtgaagagcatattagtcagatgagcgctggtggaatgccagttcgtgttaaatgcttgcatgctttgcttgcgcaaacattggtaatgggcaaaggtgtaaatccgattggtgacatggtgttagagcgcattaaagatgagtttgatcctaacgtgtgccgctgtactactccgtggagcgatgatgcatatgctactgaaacggaagttgttgtggaagacgaaacggctaaaactgcagagggtgaagctgtaaaaagtgaaacgactacttgcgcagaaaaaacagtacaggttgctgcaattgactgcggtacaaattctattcgactaaaaattgcgcaagtttctgagcatggaatgaaagatattgtgcctcgtatgcttcgcgtcgttagactcggtcagggaattgacgaaactcatcgtttcgcagatgacgctttgaagcgagtgagggaggctgcgcacgaatttgcgcaagttttgaaagaacatccagttgatgcgattcgttttgtggcaacctcagctacacgagatgctgaaaatcgtgagatttttgaacaaatgatgattgatgagcttggtgttcgccctgaagttattagtggtaacgaagaagcggctcttagcttccttggagcaacaagcgttgtgtctcgcgatgagttgcagccaccgtatctcgtagttgatttaggtggaggctctactgagttagtgcttggaggggatggtgactgcttgccagcgcacaaggtttctgcagcatactccatgaatgttggttccgttagaatgacggaaaggcatttgcataccgatcctcctactgaagaggaaattcaagctgcgattgaagatattgacaagcatattgatgatgctttcaaagtcgttcctgcaggacgagctcgcactattattggcgtttctggaactgtgacaactatggctgctttgactatgggattgcagcattatgatcatactgctgtcgatggtgtgcgtattggattagagcaggcttatgctgttaataatcgatttttgcgtatgcctaaggactgcaggcgtacgtacgcgacgattcacccagggcgtgtggatgttgttggcggtggagcagtgatttggagccgagtgttggagagattagcaaaagctgcgtatgaggatcacggtggggttttagatacgtttgttgcaagtgagcatggtttgcttgacggaatcacgattgatttgggaagaaagttactcgccacacgctgagtgcgtgtgtttgcggtttctgacggttgatgagtgtgcgtgtttgcagtttctgacggatactgagaatatgtgtttgtgatttcgccacacgctgagcttgttctttgcttaaatgtatggcataataagtgattgctgcctctgtggcggaattggcatacgcatcagacttaaaatctgacgcccttacgggcttgtgggtccgagtcccaccggaggcacaaacgaggcgctgcacagtttttagctgtgtggtgccttttgcttttctgagtttttgggtagtctatgacagttcagtaagactgatgggttagtgtcagcaaatgtgcatgagattaaaacgtattattcgatgaattgtgttgtgtttgtaaagcggctatattgagacaaccgtagcgcaatacatacataagattctgtttttataaattggtttttcttctgagattatgtaatttttatacgagtataggattttgatgtaaaattatttcatgaagaatgtaacttatgctataggtattgatgtcggtcttaattcaactggtttggctgcaatacaattggacgataatggttgtcctataagaattctaaaagctttaagtttcatacatgattctggaattgatccgacaggtagaaaaacttcggatactcgcaagaaagtttctggtgttgcaaggcgtgcaagacgtttgaatagaactagacgcaagagattaagtaaattggattctttgttagaatcattaggctatccaattgtagataattcttgtttagagtctaaagattcattcgaaccttggtatattcgaggtgaacttgctgatgcgtatataagtgacgataaaaaacgaaagataatgttgagtgtagctattcgtcatattgccaggcatagaggatggcgtaatccgtatcaatctgttagatcaatgatgcaggccaaagaatactccaagttttatgatcagtttatagatactgtaaaccgtttagctcctggtgttgctaattacggttgtaccatagggcagatagtttgtgattacataatgtctaaaaaaggcatgccttctcctaggattcgtgttcgtatcaaaaaagataataaaatttataatccaattctacccggtaagtttatccaaagtgattgtatgcttgaactgcgcaagatttttgagatgcaatccgttgatgatacagatgctacaaaattattaaattgtgtatttgagtccaaatctcctaaaggctctgctactaaattagtaggcaaagatgctattactaatattggtcgtcgtgcgtcgaaagcgtctctagcatttcagcgttatagaattatttcttctatttcaaatcttcgcattcgtgaaaattctattgagagaaaattaacttgcgaagaaaaacagcaagtgtataaattgttgacaacaacttttatatctactactgaaaaggaagcatttatttctaatgagtatagttggaatgacgtttcagaattgctgcatataaaacgtagtgatttgcgaggcattggtaagcagacaggtgatggtgaatctattactcttcagccgcctagattagatagcgaaattgcaatcttctcagaaactggcaattcttctagggataagtttgttaaggaaaaattgaagccttggtggaatgagcacacagatgattcagatgagcatgaggcttttattgatttaatcagtaactcgtgtgattttgaatcaaaaagtgatacagctgcttctgcgtttatagaagatctagcagataatgaatttgaaatattagataatataagtttgcctagtggacgtgctgcttacagtattgatactttaaataagttatctcagcaaatgctaaatactgatgatgacttgtttgaagctcgtaagcatctttttaatctcaatgataattggaggccttcagctgaacctatttcttctcctataggtaatccttctgtagatcgtgttttaaaaattgtaaatcgtttcattgttaatgcaacaaatcgctggggttcgccaatgcgggtgagtattgaacatgttcgttctggttttaaatcggcgaaaatgagcaaagattacacggataatattaatggaagaaccaaatttaggaacaacttaagaatggagctttccaaagaacttggaattaatgctttaactatttcagatgcagatattcgacgttatgaagcggtgcaaagacaaaatggacagtgcttgtattgtgggaatcctataacgttcaaaacttgtgaaatggatcatatagttcctcgtaagggagttgggtctaccaatactcgtgtgaatttagctgcagtttgcgtactttgtaatcgcaataaaagcaatattccgttcgcaatttggtgtaagtcacaatattgtgttgaacataatattaccgttaataatgcaaataaaagagtgaagcattttatatttcctagtaaattgtatggtaataaagcatcaaagttaaaatttgagaaatctgttattgctagactttctcagactgaagaagacgaaccatttgataatcgttcaatagaatcagttgcgtggatggctaatgagctacatcatagaattgattggtattacaattctgaatattatattggcaatacctatgcaacagatgcagtgatttccaatacagattctaaccttggaacaagtgttggcgtatacgctggttcgattactgctatgagccgtaaattatctggaattgatggtaagttgcagttctttgatgcaaagcataaaacacgcttcgatcgaagacaccatgctgtggatgcggctgttattgccatgataacgtccaatgtttcacaagcattatatataaaaaataatcttcgtgaaacacaaagaatattggggcatccagattatggtgatttagattggcgtgattatccatctgaacacgatgctatgtattctagttacgaatcgtggcatagaaatatgcaaaagttgcttgagttgcttaatgaatctatgacagaaaatcgtattcctgtggttcggcaagttcgtatgagatatgaaaattcagctgttcatgatgatagtattaacaagttacagagtttgcatgtttcagacgcaattagttctgatgatatacttcgtgcctctactcctgcactgtattgtgctttagttaatcagcctgactatacccttaaagatggtataccatcttcgcaatctagagtgttacgagtgaataataaaacgcttactgcaaatgatgaaataactttcttcaatggtaaatccgctcagattgcagttagaggtggatctgctgatattggtaatagtattcatcatgctcgtctttatagatatagaaaatcaaagaaagaaattgcctatggcataatccgtatcttccaagctgatttaaataaattccgcgatgaggatttatttacttgtgaattgccatattattctgtatcaatgcgttatgcagatggcacattattgaaggcaattcgtgataataaagctgagtatattggatatttgctcgttggtgatgaacttgtaatagatccttcgtttataaagagcgatactgttgctgggaagttcatacagtttcttaaggaattgggcattgattctgttgcttattcgcattgggttatagatggtataccagaaccaaccaagattaagcttcgaccatccatgttatctaaagaaggatttgataaattaattactagcggatatgtaagcgatggtaattatttagaagatgcagctaaagtcttaggtgaaaagggttggattgttgctgttaattcacttgcatcatgtaagcctgtaacaattcgccgaaatggttttggtgaaattcgttggaaatcgctttccggtatgccggtttcttggaaatggtgtaatgattcaaaataaattatggatggtgcatcatgcagagtgcttggcgagttgttgattgtacgtctttagacggtagtcttacttatgttcgtggaagattagtggtgaacaatcgtgttactggcgagattgtagagattcctcttgctgaaactgcggttttactaattggattgcattgtggatgttcacctgggttattgcatcaatgcgctgtatatggaacatgtgtgatggtatgcaattggcaaggagttcctgtttgtgcaatgcattcttggagtgatgttcctactcgtattgttactagacagttggctcaagcttcgttatctattcctagaagaaaagctgcatgggctaatgttgttagatcaaagattcgtggacaggctgcatgtcttgatgcgttgaacattgaaggtggcggaatactacgtggcattgcaaatgaggtacattctggcgatagtaccaatagagaaggtcaagctgcaagagaatattggaaacgtatattttcctctgaagaagattttcacagagtgccaggttgtaatgttggacgtaatgctgctcttaattatgcttatacgatactgaggggtttctctataaaggctgtaatttctgcagggcttaatcctgtattaggtatgaatcatcataataggtctaactatttctgtttagctgacgatattatagagccatttaggcctgctgtagattttgctgtagctcaattagctgttgatgatacgccagatagtaagtcagttaagaagtatcttattgaaagtgtgaataagcaatttaacggagttgggccaactatacctagtgctcttaatgatattgcacaggcttatggaatgtatgtggaaaaacagtcaaaagatttcttggttccagaatacaagggaggattatgaaaattgatgaggatagtggcggaatgtggtgtctagtaatgtttgatttacctgtagctacaaaaattcaaaggaaagccgctactgattttagaaatttgttgttagacatgggatatgcaatggtgcagttttctgtgtatgttcgttacactccaactcaatctggtaatcgctcaaccgtaaaagcaataaaagagaatttaccaccatttggtcaagttagaatactgcatattagtgaccatcaatggtcttctgcgctgagatatactaatttgcatcaggatatttcgtctgaaactcctgaaattgccacacttttttgaatgaaaaaatgcctaaaaagattgaaatcttgcccctcttgagcttataacaagtatatcaagaggggtaagagctaattctcaacaaaacgaaaatattactattcgcatgaccaagtatatcaagaggggtaagagctaattctcaacgaatactcgcaaaaccaatgaacaatgagcaagtatatcaagaggggtaagagctaattctcaaccgcggtctgattgagcgtatttattccacaagtatatcaagaggggtaagagctaattctcaacttattgcgcgcactaggttgatgcttgccaagtatatcaagaggggtaagagctaattcttaacttaggatactgatcgcgatgctgattgtcaagtatatcaagaggggtaagagctaattctcaacagcaaactatcacagtaaaagacattgacaagtatatcaagaggggtaagagctaattctcaacgaaactcatcacgccactagctccagtagcaagtatatcaagaggggtaagagctaattctcaacacgatgaggcttcccgtaccgtcaccggcaagtatatcaagaggggtaagagctaattctaaaaacgtacccccggtgagactcaaacttattcatctgatgaatgaactttacgaggtacacctaaatcgtctgctatatcgtcgtagtcatcaccacattcataagggtctagcaaattataagcttcgattagcaactctttaggtgcgctcttgtgcaatccatgcttctactaaataataatcaattgcaatagacggttcgcctgctcgaatggcactattggctgcttctttagagagcttatccatgttaggttctgcatatggacggagtttctcaaccatgtcataacaaattttcatcatgtccattagcctttgactactctagtattatctatcttattgtatgcagtaagatgcatcgtctatgttttccttcttatatgtatgtattttaattattgatatttagattatctgatatactttttatggaatctagggctcctcttacccttaatctctttctaatagagttggtttgggggaatgactggtcttcttattttatgtgcaatgcataaaatgcaatgttacaaatgtgaggccctcggcaaccagctttcaagactggaatattagtctgaggagtacttcacattttatcattgtgattgctgcataaaataagttattattaaagccgggcgcgagtccctcgcagctgtcgtttacggcagagtgttagtcgaggattggcttgcgctcggttatttgatgttttatcagaaattttaactggttcaattccacagataagcacgagactgcgagcatatcggcttatatgccaaaaagtgcgtgaagctaagctgatgaatattatgtgcctataatccataatctaaacagcattaaaaactcagctaacaaactgagaaaacaacgttcatatgttactcgcgcagtacgtaatctgcgccaataacgcgtttgacgatttattgttaaatactcggctaatatggaaagtaataatatgttcaactgtactattcattgattatatcgatatgttaactttttaaatcttctaaccaaacttaaaaaatcacttgttttctatttactaaagatgatatattgtaaatgctaattctcaataagactggacttgttatccagtttgattgctcagcagatttgatgattatcactgcaggggaagcttccagcttccccgtttttatttattagttttcaaattaggggttataggccaaaaagtggggtaattggcaaaaagtgtgtaaagctaagctgatgagtattcttaaaatagaagtagcccgcttagctttttaataactacttgcagtattcgccgctcttatggaactcatttcaatcaactccagtaccctatcttgctggtattctaaatacttcagataatccctacttaaggattgcaaagctacattacacgttcaaaataaagttgataaaaaacgtaggcgcaatgtattgataagtgaaaaaattgattcagaaaaatgtttaacgggatatgtaccagataaggttcataggatgcctcctaatgataataagaaatttgatgaagcaaattcaccatcatatattcatttcatgttaacttttttacttgttgcgctgtgtcttttctttctattcaattcgtgcaatggttatcacgataacgactattattctgacgctatatcaattagcaataatgttttatgaaccgtttttgtttacatgcaatttttgtgcttgtgcagaatatagaaattcattttatttattaatgtttcgtgagtttacaataaaagtacggtagtatattaaaagaaatataaatgtaatagctaatttaaatatagtttaatttgtgaggagaagtagttatcaatgggcttaatgataacgagctgtcttcaaatgtttccaagcatttatccagcaaataatgtggagcagattcgacaggagtcaatgaaaatgtctcaagagcgtctgcagcgtcaaatgcgagcaaggattcttcaatctctgctttatcaaaaggagcaggaaaaaattttttttgaacaggactcattctaagtctagttaagcaaacagcgatgactataaaggtttgtctaataactaatatttttttacgtttgttttatatctgatatattctttacggaagttggatccccgtaatcattgaccttcaagggctggtttttggtgtggtgcagcttcctctttaacttaactgcagcatttctttcgatattttaacgagacttaggttttaaacatactttttggtctataacccacatttgcactttacttagcatatttgcgattgacaatcccgtatttgtcttatagtcagttcgattgttataattgttgcgaatttgcaatgcaatagttgtattgcttaacaactgaagtagaaggtgaattatgctttgtaatttttgcggtaaagagaacgacgcaaatagtcaagtatgtgctaattgcggaaatcgcttaggaaacccaaatgtgcagcagactgttcaaaatactcagcagccagcaaacgatactttaaattctgttaaagatggctttaagaattttaatgagacaatagattcagtaattgaagattcagatcctgagcttttacataagtactctttgattgcttatatggcagcttctgttgttgcaattattgctccattcttgccacttatcactgtaaattgctttggtctctccaagtcgtttaattttgtaaacaataataacactcctggcgatggaattttctatataattattgctattgttgctttagtttttgcttttatgaataagtcaaaaataatgatgattgttggcggtgttgctgccgtatttatgatttttgagtttttccatattaatggcaagatatcttccctcaaatcgcagtttggcggattctcgatgcttggatctgtaagttatggcattggtttctacttattcattctctctgcacttgctttgcttggatcctctgtattgtactacctgtgtgaaagagtgctaaaagcagagaaatagcattactttgtaacatgttttgtacaatgtttatgcatgttgacagcttgtgattacatagtcatagacaaagtaattgataatagtgaaccccggcttaggctggggttcattgcgtatacggcaaaatgcgaatgatattgagaaacgatatcgcccaaatattttaatattttaggaggctggaaagtgcataatcataacgatgtaattcaaactaacggcactggttcacgctcaagcagtgtgaatgcaaatgtcaactctttcgatactcattacaataacgccaatgcagcttcccaagcagccgcaattcacgcaagtcatgcgcatcagcatcgtttgcttcttacgctttctcttactgcaactgtgttttttgctgaggtgattggttctttcctaactaattctttgtcgcttcttatagacgcaggtcatatgcttacagacatttcagttcttgcagcttcaacagttactgcaattcttatgcgtcgtcgtccaaatagtaagcgtacgtggggctgggcgcgtcttgaggttattacagctgctgcgggagctcttattttactgcttgtaggagtgtatgctcttgttgaagctggaatgcgtctttttggtagtggtcatcaaggcattcacgatgtaaatcagctcctattctttggtattcttggtttagctgcgaatttaggttctcttgtaattcttatgtctcaatcgcaagacaacatgaatatgcgtgctgcctttcttgaggttatgaacgatgctcttggatctgttgcagttgtagtctcagctattgtaatgatgagcacaggttgggcaggttttgatgctgtagctggtggtattattgcgcttcttatgattcctcgtgcgttaaagcttcttaagaatgctgttaaggttcttcttgagcagactcctgaaggtcttgatttaaacaaagttcgtgaacatctagagcatgttcctcatgtgattgcagttcacgatttacatgctagtactgtctctactggtatgccgatttttatggcacatgtcgttgtggatcctaatatgacaatgtctcaatgctctcatgtgctttctcagcttcaggactgtttacgcgagcattttcctgtttctgtgtctcacactacttttcaacttgagcctaaaggttatacaacttccagtgcttcagagcatcatgaatagagtttataaggttttgcttataagttttgttgcaatgaatgtggcaggtttgcataaatgtgtgaatgtgtatttcctgtgtcgtaatcgtttttgaagtaaagttatatttatgccgttaaaagaactaattgataatactcacagtgagcgcgtgcgcagacttgtttctttaggtcgcgcaaagtcgcatgatttgcagcgttttttagttgaaggtccgcaaagtgtgcgtgaagctatacgttatgccacagattcgttatgtgatatttatgttactaaagatgcttgtgaaggtaatgaaaaggaaagttcacaattttcttctttgcgggaaatagttaaagaagctttatctcgatcttgttatgttcatcctgttgaaccgagtattatgcaaaaaattagtgctgattcacagggaattgttgcggttgctaattcgaaatctttagatgatatctattttagtgagtttaaaaatttgcaacaatcagcacaagtaaaatcaaaaaacgattttaagcctcttcgtattgcagcttgctggcaggtaagagatcctggcaatgctggtgctattattcgcgttgcagatgttgctggatgcgatgctgttgtttttgttgatgattgcgtaagtcgttggaattctaagcttgtgcgttcgactgcaggttcactatttcatcttcctgtagtgcaattaagcgttcaagactggttcgaatgcgctgcaaaatcaaatattcgaattattgcagctgatatttacggaactgacaagattaaacctgtgccatttccaaaaattttagtcaattccgaggttattagcagttctttggctattttatttggcaatgaagctagaggcttacctaaagaagtattgcaacaggttgacgatatttcaataattccaatatatggaaaagcagaatcaatgaaccttgcaacaagtgcagcagtaatgcttatgggcttggctatgtcgagtcatgagcgaaaaatataactttgggcaatattttgcaatatcgtatataaacaatgaatatacgtataacacagataggaagggtgctgtgaccgataataagccattcgatattaaagctgtaactaaagcagtaaaagaaggtattgctagcgttacagctgctcaaactatggaagagctgaaggctgttaaaactaagtatgctggcgcgcagtcagtgatgactgttgcaagcaaagcaattggttctttgcctgcagatcaaaagaaggaagttggcaaggtgatgtcaactttgcgagctgattttggtcgagcttttgcagaagctacagagcgaattaaagccgttgaagaagctaacatgctttctgcagagactgtagatatgactcttccaattaatcgtaagcctttaggtgctcgtcatcctattgctcgtattattgaagattttgaagacttctttgtgtctatgggttggcagatttctgcgggtccagaagttgaaactgaatggtttgatttcgatgcattgaactttggaccggatcatcctgcgcgtcaaatgcaagatactttctacgttcaaggaaatcaagctaaggatgccgcaggctttgttggttcaaatatggttttgcgcacgcaaacttcctctgaccaagtacgtgcgttaattgagcgtggagttcctctgtatattgcttctcctggtagagtgttccgcactgatgaactggatgcaacgcatactccagtttttcatcaatgtgaagctttggctgtggataagcatttaacaatggctgatttaaagggtgttctcgatcgtttggctgttgctatgtttggtccagatgcaaagagccgtttgcgaccaagctacttcccatttactgagcctagtgctgagctggatctttggttcccagataaaaagggcggcccaggctggattgaatggggcggatgtggaatggtgaatcctaatgtccttaaatctgctggtttagatccagaagtttatactggttttgctttcggagtaggtttggagcgaactttgctacttcgacatgacattaacgatatgcatgatttggttgaaggcgataagcgcttcagtgaacagtttgtgatgggggagtaaaactcatgccaatggtagatattgactggcttaaagatcatgttgaagtgccagaaggtttaacatacgaacagcttgctaaagatttagttcgtgttggtttagaggaagaagagattcacacttctcaagttaccggtccaattgttgtcggttacgtagttgacgcaactcctgaaccgcagaaaaatggcaaaactattaattggtgccatgttgatgtcggagataaatacaacgatgttgacgaaaacggtaaaaaagttcctcgtggcattatttgcggtgctcctaatatggctgctggtgaaaaggttgttgtaactcttcctggtgctgttctgcctggagattttaagattgagccgcgcaagacttacggtcatatttctgacggtatgtgtgcttcagagcgtgagcttggtttgggagatagccacaatggcattattttgttgcgtgaatatggcttttctaaggctgaatatgatgagttgaagcctggcgatgatgtaatggagttgttgcatcttaataagccgattttggagattaacataacgcctgatcgtggttatgctttctcttatcgtggtgttgctcgcgaatatcatcattcaactggtgctgtttatacggatcctgtttcaaagttgaatgagcaggtatcgcaaattaatgatgaaggtcacaagacttcagatattgacgtgagcattgaagatactaatccaattcatggtgtacctggttgtgatcgatattatgcgcgtgctgtacatggttttgactccacttgtgcaagcccacgttggatgcagcgtcgtttaacgcgtgcaggtatgcgcagtatctctcttgccgttgatatcactaattatgtcatgctcgatttgggtcaacctcttcatgcttatgatttagacaaaattgaaggtccaattgtagttcgtcgtgcacatgatggcgaacatcttacgactttggatggcaaagatcatgaattgcatgttgaggatttagttatttgcgattctcctcatggaaaccacggttcacgcgtgcttggcttagcaggtgttatgggaggcatgtacggcgaagttacgagtgaaacgaaaaatattttgattgaggcagctcactttgatcccgtttcaattgctcgcactgctagacgacataagattccttctgaggcttctcgtcgttttgaacgtggcgttgatactcaattgcagccagcagctgcgcaaatggctgcgaatcttttggaacagtttggtggagctaagccatctacatcgccgtgtgatgttaataatactcagtcgcgaaatgtgattgtgtttaaagctaatgaagtgcagcgagttgctggtttggaagttgatttgaatcgcattagcgatattcttaccgatattggttgctctgttgctggtggtggcaatggatccttctccgttcttcctccaacttggcgtcctgatttgaatgagccttgcgatctagtagaagaaatcgctcgacttattggatatgatgagattcctgttaaggttcctgcagttcctgttactggtcgaaccggtttaaccacgcaacagcaaactaggcgagctattgcttatgagttagcagaaactggttttgttgaatctttaagttatccatttgttggtgaagaag

SEQ ID NO: 3415 - DNA, 23360 bp, synthetic construct
  variation 9109..9901: note = note, n is a, c, g, or t
  variation 21151..21917: note = note, n is a, c, g, or t
  variation 20291..21017: note = note, n is a, c, g, or t
  variation 15120..15871: note = note, n is a, c, g, or t
  source 1..23360: mol_type = other DNA
  variation 17139..17969: note = note, n is a, c, g, or t
  variation 13361..14094: note = note, n is a, c, g, or t
  misc_feature 1..23360: note = Synthetic
taactcgcgaaatcactatgaaagttcctgcaatttctgcagcaatggacacagtaaccgagtcagatatggctattgcaatggctcgaaatggtggaattggtgttcttcatcgcaatctttctatagatgatcaggctgcgcaagtcgatattgttaagcgcagcgagtctggtatgattaccgacccactcactgttcacccagatgcaacgctcgcagatttagataaattgtgcgggcgttttcatatttctggtttgccagtggtagatagcgaaaatcgtctagttggtattattaccaatcgcgatatgcgtttcattgcttccgaagactatgatcgtttgaaagtcaaagacgtgatgactcgcgaaaatctcgtcactggtccttctaatatttctaaagaagacgcgcatcgtttgcttgcagacaacaaagttgaaaaattgcctttggttgatgcagaaggcaagcttactggtttgattactgttaaggattttgtgaagactgagcagtatccagatgctactaaggatgatcagggtcgcttgcgcgtggctgctggaattggcttccttggagatgcttggcagcgtgcgtgcgcgcttatggaggctggagttgacgtgcttgtggttgatactgcaaacggcgaggctcgcttggctttagatatgattcgcagaattaaggcagataaggcgtttgacggagtacaaattattggcggaaatattgctactcgccaaggcgctcaggctatgattgacgctggtgtcgacgctgtaaaggttggcgttggaccaggctctatttgcactacgcgcgttgttgcaggcgttggtgtgcctcagcttactgctgtttatgatgcggctcaggcttgcaaggctgctggcgttccatgcattgctgatggtggtattcactattctggcgatattgctaaggctttggtcgctggtgctgacaccgttatgctcggcggtactttggctggttgtgaggaagctcctggagagaaggttttgcttcacggcaagcagtacaagctttatcgtggcatgggttcgcttggcgcaatggctcctcgcggtaagaagtcttattcgaaggatcgttacttccaggcagacgttactagctccgacaaggtggttccagaaggcgtggaaggagaagttccatatcgcggtccacttaacgctgtgctttaccagttgcttggcggcttgcatcagtccatgttctacgttggtgcgcacaatattaaggaaatgcaagagcgcggtcgctttattcgcattacggatgctggtcttcgcgaatcgcatcctcacgatatcgtgatgactgcagaagcgccaaactacagcggtttccacaactaaatcgcaagttgtgtaagttgcgtaagttgcgtaagttgtgcgtataagtcgcaactattttaaacggcgaaaagttaatcaagtttcccacaacttgcatgcttttcgtcgtttttgttttgacaattcgtataaaattattatatagttagtgggatatcccactaaaaacgaggtgattttgtggaagtagtgaaagattatgacgttcgtcttgatagtaaaaagcgtgtaactctgcgcggcgctaaatatccttattacaatgttaaagaatgtgataatggttgtattttattagaacctcgtgagcttactattcctaagagtatctcttctaaaactcttaaaagtatggatgaagcaatccgcaattttaagattggcaaagtctctgaacctgttgatctttctgacttctaggagtaagtgaatgaacttcaatattagaatgggtattccagagatgtctaatatttgggagagattgaagaaagagtttctagaaggcagtataagtaaaaaagatctttctctttataagaaatggggaaaatctatgaaacttttatctgaaaatccaaggcatccaggattgcatactcatgatattgaagaattgacaaatagatatggtgttagagtttggcaatcctacttggagaataaaacaagtagtgcaatgagaatgtattgggtttatggtccagatcatatgtcaataactattatcggtttagagcctcaccctgaagataagaaaaatggatcatattctagaatttcactttctgatatgccagagatgtgattttagctgttagtcgtcgctgggaagatgtaggctgatgggttcgaaaaaatattaggaaaggaacgaaaatggctgaagctaaggaagatcttacgtttacgccggaagaatcgcgcttaatttggattgattgcgagatgacaggtctcgatattttccacgacgaattatgcgaagtatctgtagttccaactgattttaatttgaaagttttggacgacggaattgatttagtgattaagccgagcgatgctgctgtggctcatatgaacgatttcgtacgcaatatgcacacttcttccggacttgttgacgaatggaataaaaacggtttgcctttggaagaagcgcaaaagcaggtagttgagtacgtaaagcgttttttgccggcttgcggaaaagcgcatcttgcaggcaactccgttggctccgacaaaaagttcctcgaccgttacatgccagatttaatggcaaatctgcactatcgcgtaatagacgtaagcacgttgaaggagatttcgcgcagactttacccagatgtttaccgcaataagccggcaaaacatggcggtcaccgtgcgctcgcagatattattgagtcgattgacgagttgcgttactaccgcgatatgatgttcgtgccagctccaggaccaagcgaagcacaggcaaaagctggcgcacagcacattgagagcacgagcttgcttcgtgactatgagcgccgcggtgaagcattagaagacgtaaattccgcagaaaagcgcgactattaaacaaagcgcgactactaaacgcaataaaaggtactgccaatgaagcaatccgaagccctaaccataatcaacgctggtgcaagcgttttcattaccggcgctccgggtgcaggtaaaacctacgtattaaacgaagctattcgcgcaatgcgaaaaaacggtttaagcgtggctgtaacggcttctaccggaatcgcagcaacgcatttaaacggtcaaaccattcactcgtggagtggagttggagtttcaaacgcgcttagcgattcgcttcttaaaaccattagagctaggcgagggaaacgcataaaagccacggaagtgctcgtgttggacgaagtttcaatgattcacgcgtggctttttgacatggttgatgaagtatgccgtaaagtgcgcaaaaactctgctcccttcggcggacttcaagtagttatttcgggagatttcttccagctgcctcctgtgagtgcttctatgcgaaatcgcgatgtgttcgagccaagtccagagtttattgagtcgcgcgaaaagtatgctgctgctggcaagaatccagaaggctatattacggaatctttcgcctgggatgctttaaagcctgttgtgtgctatttaactgagcaacatcgtcaggatgacggcaaattgcttgaagttttgacggatattcgtggcggtcttgtaagcgacgaagataagcaagtgcttgccagtcgcctcggtgagtatccgcaaggcgatgaagtttcggttcatcttttccctacgaactcacaggcagatggcttaaataatgtgcagcttgcggcaattgatgctgagcctcacgaatttgtggcaacagaagccggccctaaaaatctcgtcgagcgtttaaaaaagaatatgcttgctccggaacggcttgtactaaaggctggagctgcagtgatggcgttgcgaaatgatcaagataagcaatatgtgaatggctctgttgggcgagttttgagattcgcacctgaatctaaaggtggatggccgattgttgagtttgaaaacggcaatattgtcactcttaagccagctgcatgggaaatgacggatggtgagactgttcttgctagcgtaaatcaagtgccacttagatgcgcgtggggaattacgattcataaatcgcaaggtatgacgcttgacagtgcggtaatggatttgcgtaaaacttttgctcccggaatgggatatgtggcgctttctcgcgtggaaaatcttggcgggctttatttggaaggtattaacgatcgcgcgtttagtgtttcggcggatgctgtactgttagacggattcttgcgtgaggcttctaaacgcgcgagtgagttgcttgctaacgacggtgctgctgctttcgtaacaaataatgcggaagatgattctgcaaatcagcaagagtttgatattttcgcctctagtgattacgcgtataatgacgaattttccttcgacgatgagttctagctttttgtagctctaatcgttgtttttagctacaaagtcgggaaaatcttccgctttttgtagctctaatcgtcgttttaagctacaaagtcgggaaagtgttattgctattgtttaatagtgtaaacaagtgtttatgtcctcatgcgcaaatagattggaacgcatgaattccaatgtacttcgtatgtctcagctgttccttcgtacgctgcgcgaggatccagcagacgcggacgtgacttccgcaaaacttatgcagcgcgcaggctatattcgtaaatccgctccaggtgtgtggacttggttgccgctcggactcaaggttttaaacaaggttcaggcgattattcgtgaagaaatcaacggtatcggtgcgcaggaggtccactttccagcgcttcttccacgcgagccttatgaggcgacaaaccgttgggaagaatacggcgacaacattttccgccttaaggatcgtcatgaggctgactatcttcttgctccaacgcacgaagaagttttcacgctccttgttaaggatatgtattcttcttacaaggatttgccagttactttgtatcagattcaaacgaagtatcgcgacgaattccgtcctcgcgcaggtcttattcgcggtcgcgagtttattatgcaggatggttattcgttctcgattgacgaagatggtttgaagtctgcttatgttgaagagcgcgctgcttacgctcgaatttttgaccgtttaggcattaaatatgtgattgttcacgctgtttctggccctatgggcggatcggattctgaggaattcttggctccaatggcaattggcgaagatacttttgcgcttgctccttctggaaaagcttggaatgttgaggctttgaccacaccagaaatgcaagatgttgactgctcggcaactcctaaaatggaagctcttgatactccagatgctaagacgattgaagctttggttaaagtttctaacgatttgcatccacgcaaagacggccgcgaatggcaagcagacgacactttgaagaatctgattattgctgttaagcacccggctgatgctgagggcggcgagcacgaggagccatggcgcgaaatcgtggctattggtattccaggtgatcgccaggtagatatgaagcgtcttgaagctcagtttgctcctgcagaaattgaagaagcaactgaggatgattttaaggctcatcctgagtttgttaagggctacattggctttagcgtattaggtcctcaagctcgcaaagagggtagtggaattgaaaatcctgtccgctacttgatggatgctcacgttgcaaagggtagcgcttggattacaggagctgacgaagacggaaagcatgtttataacgctgtttacggccgcgattttgaggctgatggtgttgttgaagcagctcaggttcgcgacggcgatatgagcccagatggttctggtccattgagcttcgaacgcggtgttgagattggtcaggtgttccagcttggtttaaagtattctaaggctttgggcttaagcgttcttaacgaaaacggtaaggctgtgccggtttggatgggctgctatggtattggcgttagccgcgtgattgcatgcttggcagaaacgcatcacgacgatgctggtcttgcatggcctatggcgattgctccagctcaagttcacgtcgttgctacaggcaaggatcaagttgctttcgatgctgctgagaaggttgttgaagagcttagtaagcagggaatcgaagtaatcttcgacgatcgtccaaaggtttctccaggcgtgaagttcaaggatgctgagcttgttggcgttccgctgattgctgtagccggccgcgatactgtgaacaatggaacgattgaaatccgcgatcgcaacggttcaaacgttgaggcagttccagtggatgaggctgctgctcgaattgtagagcgcgttcgcgaacagttgtaatcgcaataactgttaacaacgaatcagcgattaagcaattaaactattaaacaattaaacgactaagcaatattgccgttggtgtaatgctttgcatattatacgcattattttcagcggcaatattgctatgaatagtaaaaaattatataaattattagaatagaatgttaatgagttttaatgtttaattctattaaaactttctaaaaatcatttacacctccttcaatatcgtcatagtggttttcttcgacttgtgagccgaaatctattgtttcttttgctgaagattcagcatcataatggtattcttggctgtcgttttcttgcgaagaatccatagaataagtattagccatagggtttttcatcgccaagctcaaatcttgattggaataagtatcttgatttgcccgattttcttggtttatttgattagtgtgatatttactattgttactctgatcggttcttccacgattataagagtatttagtaaaagcactaattcctcgatttaggtcgtgtccaattgcggtggcttctagtacaactcgagaccggtcttctccatctttgtgccaggattccgtgtttaaatttccgcacacgactatcgcatctcccttatgcacgctttttagcacatttgcagctaaagacttgtatgcttttactgtcatccaagttgtcggtctatctttccactgtctttcctcgctatggtagtaagacgttgtgcttcctattctaagtgagcatgctggtgagttttcgttgcgactaaagttcacagggtcactacctacatagccgctgattgttagtgttgcttgttgttgtgccatattcttaacctttcaaaagtttggactgcgactaatttaaatctcaaaattcatcacgcaacacgtgttgattattgtgattttcaataaattcgccgcagtagaatcaactatgaagtatcaaaaatagttttgcaagttatttttatcaatgtggttaaagcctatgctttatgcacatcgtttaaaaactcttgacaaaatatgtaaaattgagtaggcgagtctaaaatgtgtaaaatatatgtagattgatatacttagcgaaagtagtttttgtttttcattagcattggaaggtgaagcttgagttttttgcctacttgtttgtgttatttgaatcagggattactgaaaagtagttattaatcacgtggagagaggtctacatttatgtggcataagtcgcacgtattttctgcaaagaaatgtttagctgctgcggcatcagctgttgcttgcgtagcaatgattggatctactgccgtatctgctagtgctttggttatagtgcaaaatcacagtgttgctaatgttaatactaattggcaagttaagaatcagtcggctgcaagctacattttaggtgcaattcgtgatgtgcgttcaaagtattatgacgatggcgttacccttatgaacggtatgactcttgcagattatgttacttctaagggtcttacaaaagaacagtatattaatgatattcgctacgatcgtgctaatgaagaggatgcttatcgtcgtgcaaatgagactgttcagcatggaaaacttggacattttgctgcggatggtgtgagccttccaaactacgatggtcgtaaggcttggggcgaaaacattgcttggggtgaaagctcagaagaatctatgtcggattggaccgctggagaggagtctgcgttacaccaatctaatggtgctgaaactacttacaatgctcatctttaccagattttgaatccagaaaacatttccttcggatatggtgaagtagctggtacctcatacggaagagtatctgttttaactctttcaactcaggttggagacactgactacccacaaggcaagttaggtgttgctcctcaccttgattttgcttggattatccgtaataacgatattgctgttggtgcaaatgcttacaccgacaagcagcttgagtatcgttggctttcttacaatttgaatactcagcagtgggctactattgctgattggggtactggaaactgggcttcttgggttacaaagccaggtgactattggctgcattgtgaagctcgtgatccttctactaagaaagttattttagaaaagacaattgctttccactacacagttccaagccaaacagttattactggaacttatgctggttggcaaggcaatagtgttcttcttggtgcatccactaataatcctaatggctctaccaagattaagatttatgattacaatgctaagcagtgggttgaaggatacgatggcccttgggctttgtggagcccacgcccaggcatttactggactcatttcgaagcttacgatgagaatggtaatttgtcggatgttaagacctacgcctttggcgtgtgaatctgattagtaaatctgattagtatcatttaaaaagcctgcaaacgttttaaacgcttgcaggcttttgtttacttatttactttatttgtgttttatttgcaacttaccaaatgtgtacgcgctcgcttggagcaagccacatctcgtcgccgtctttaacgtcgaannnnnnnnnnnnnnnnnnnnnnnnnnnnnnnnnnnnnnnnnnnnnnnnnnnnnnnnnnnnnnnnnnnnnnnnnnnnnnnnnnnnnnnnnnnnnnnnnnnnnnnnnnnnnnnnnnnnnnnnnnnnnnnnnnnnnnnnnnnnnnnnnnnnnnnnnnnnnnnnnnnnnnnnnnnnnnnnnnnnnnnnnnnnnnnnnnnnnnnnnnnnnnnnnnnnnnnnnnnnnnnnnnnnnnnnnnnnnnnnnnnnnnnnnnnnnnnnnnnnnnnnnnnnnnnnnnnnnnnnnnnnnnnnnnnnnnnnnnnnnnnnnnnnnnnnnnnnnnnnnnnnnnnnnnnnnnnnnnnnnnnnnnnnnnnnnnnnnnnnnnnnnnnnnnnnnnnnnnnnnnnnnnnnnnnnnnnnnnnnnnnnnnnnnnnnnnnnnnnnnnnnnnnnnnnnnnnnnnnnnnnnnnnnnnnnnnnnnnnnnnnnnnnnnnnnnnnnnnnnnnnnnnnnnnnnnnnnnnnnnnnnnnnnnnnnnnnnnnnnnnnnnnnnnnnnnnnnnnnnnnnnnnnnnnnnnnnnnnnnnnnnnnnnnnnnnnnnnnnnnnnnnnnnnnnnnnnnnnnnnnnnnnnnnnnnnnnnnnnnnnnnnnnnnnnnnnnnnnnnnnnnnnnnnnnnnnnnnnnnnnnnnnnnnnnnnnnnnnnnnnnnnnnnnnnnnnnnnnnnnnnnnnnnnnnnnnnnnnnnnnnnnnnnnnnnnnnnnnnnnnnnnnnnnnnnnnnnnnnnnnnnnnnnnnnnnnnnnnnnnnnnnnnnnnnnnctctcgttattaagttaatgctatgccatagatatttattacgcgaaaatctatagatatttattttatttatataaataattgattatgattttatatatggaaggcaatatttcttatgctatcggcattgacgtcggtttaaattcagtaggtcttgctgcaattcgcttagatgataatggggagcctataagaatacttaaagtaataagtgttattcacgatgctggtattgatccaaatggggcaaaagaatctgatacgcgtaaagcaatttctggtgtcgcgcggcgtgtgcgcaggttatatcgtcagcgcagacgtcgtttgcagaaacttgattttctattacaatcattgggttggccggttgttgaaaacaaggatttagagttttctaattcgtttattccatggatttttcgtgcaaaacttgctgatgaatatattgaggatgaagaacaacgtaaacaaatgttaagcgttgcaattcgtcatattgctagacatcgtggttggcgcaatccttatcagtcaataaaatcaatgatgcaagagactgagtattctgaattttacaatgagttgctaaaaaatattgaaaagtttgcgccaggagtaggttgtgaaggttctacgcctgcgcaattagtacgcgattatcttttatcacaacaaggtaaaccctcacgtcgtttacgtataactacagacgataaaaagaaaaatcatcccaactcattagatcctgttttaccacgtaagctaatgcaaagtgacagcatgcttgagattctcaatattttcaatgtgcaacatattgatgacaagtatgttagagagcagattattaatgctgttttttatgagaaatctccgcgtggctctgcagaaaatcgtgttggcaaagatgctataacaggaaagggtaagcgtgcgctaaaggcatcgttagcgtttcagaaatatcgaatcatatctactatttctaatcttagcataagagaaaattcaaaagaacgttgtttaacaatagaagaaaaacagaatgtttataaattattaacaacttcgactgatgagtcatcaaaaaagaaaagcgctgaagtaccattatacacttggattgatgtagctgattgcctcggaattgaacgctataagttgcgtggagtaggatcacaaataggagatggagaatctgttggtaatcgtcctccaatgttgaatagtgagttagctattatttatgcgaataataaatctttaagacaatcgttgctcacgtggtggttagatgctaatcgtacgcaagaagataaagaagctcttattgagatattgagcaacacggtagacatagaagcaattcatgataatcctgaatatcaagataagtacggttcagcaatagcatttattgattcaatggatgaaacagaaattgcggcattggaaaatatttcattgcctaatggtcgtgctgcttatagtttggaaacattagataaactcaataagcaaatgcttgaaactgatgatgatctatttaaagcgcgcaaaaagttatttaatttaccaaataattggcgtccatctgaagctcctattgcagagccaacaggtaatccttcagttgatcgagtattgaaaattgtgcatcgattccttataagtgctaaaaatcgttggggtaatcctgtacgtattaatattgagcatgttcgttctggattccaatctaaaaaaatggcgaattcatataaggaattattagataaacgaaccaaaggtaaagaaaatcttaaagcaatgatgcggaattctttgcatttaggcatgagtgattctatttcagatgcagatatacgccgttatgaggctgttcaacgtcagaatgggcaatgtttgtattgtggctatgagattacttatcatacatgtgagctagaccatattgttccgcgtaaggggccaggttctacgaatactcgtgagaatttagttgctacttgcttatcgtgtaacgctcaaaagtgtaatactccttttgcaacttggtgcgagcagtctacatattgcaagaatcatgatattagtgtagattccgctattaatcgggttcgtgcttttattttcccgcctaaatcatacgataaacgcggtgctaatcaattcaaaaaagaagttatatctcgcttgaaacaaaaagttggtgatgaagcgtttgataatcgttctatcgaatcggttgcatggatggcaaacgaattgcatcgtagaattgattggtattataactcgcagaattatcaaacaaacaatggtatttccgatataagtaataaagctcaaacaaatgttggagtttatgctggattgcttactgctatagcaagaagaatgtctggaattgacggaaaactggagttctttgatggtagaaggaaaactcgttttgatagacgacatcatgcagttgatgcatcagtaattgcaatgatgactccaggaatggctcgaatacttgcaattaaatgcaatctgcgtgaaacacagttattgcaaggcaataaagtggttcctggtggtattgattggagagaatatccaacggctaatgatcaaggatatcagcaatatgctaattggtctgttcgtatgaatgcgttattgaaacttcttaatgaagaaatgagagctgatcgtattgctgtggttaattctattcgtttgagatacagtaattcttctgttcacaaagatgatgtacatgcattattaaagttgcacgtcggcgatgaaatcgacagtgaaacaatccgacgtgcttctactcctgcgctttattgtgcgttgacacggaatcctgattatgatgtaaacaatggtcttcctgaaaatccagatagaactattctgttgcataataagaagttaaatgcatacgattcaattacttttttcaaggcacaagcagcacagcttttcgtacgagaaggttctgtagagattggtaattctatccatcatctacgcatttatgaatactttgaaaagttgaaaagtggaaaaattaaaaaatcttatggaatgattcgtgtatttcaaaatgatttgcataaacatattcatgaagatttattctcgtgtgatttgcctgaacaatctatctcaatgagatatgctgatacagaagtcactcatgctgtgcaaacaggtaatgctaattatctcggatatcttgtgcctggcgatgagattatcgttgattttagtcatgctaaattatcaggatatattggtgactttgtagaattcctaaacaagataggtgcagattgtacagcatataagcattgggtggttgtgggtacggacgataaaacaactttgatacttaaaccatcgatgatttcttctgaaggaattgacaagttgtattcgaattgcaagnnnnnnnnnnnnnnnnnnnnnnnnnnnnnnnnnnnnnnnnnnnnnnnnnnnnnnnnnnnnnnnnnnnnnnnnnnnnnnnnnnnnnnnnnnnnnnnnnnnnnnnnnnnnnnnnnnnnnnnnnnnnnnnnnnnnnnnnnnnnnnnnnnnnnnnnnnnnnnnnnnnnnnnnnnnnnnnnnnnnnnnnnnnnnnnnnnnnnnnnnnnnnnnnnnnnnnnnnnnnnnnnnnnnnnnnnnnnnnnnnnnnnnnnnnnnnnnnnnnnnnnnnnnnnnnnnnnnnnnnnnnnnnnnnnnnnnnnnnnnnnnnnnnnnnnnnnnnnnnnnnnnnnnnnnnnnnnnnnnnnnnnnnnnnnnnnnnnnnnnnnnnnnnnnnnnnnnnnnnnnnnnnnnnnnnnnnnnnnnnnnnnnnnnnnnnnnnnnnnnnnnnnnnnnnnnnnnnnnnnnnnnnnnnnnnnnnnnnnnnnnnnnnnnnnnnnnnnnnnnnnnnnnnnnnnnnnnnnnnnnnnnnnnnnnnnnnnnnnnnnnnnnnnnnnnnnnnnnnnnnnnnnnnnnnnnnnnnnnnnnnnnnnnnnnnnnnnnnnnnnnnnnnnnnnnnnnnnnnnnnnnnnnnnnnnnnnnnnnnnnnnnnnnnnnnnnnnnnnnnnnnnnnnnnnnnnnnnnnnnnnnnnnnnnnnnnnnnnnnnnnnnnnnnnnnnnnnnnnnnnnnnnnnnnnnnnnnnnnnnnnnnnnnnnnnnnncgcaataacttcgattatacttcttatgaagaatctattaataagattctagctggtaaaggttggcgtgtttcggttaatgtgttggccaagtataacgtagcaactattcgacgtaatgcgttaggtgaagttcgttgggtatcacgttcgcatttacctatttcttggcgttgggatactggagaaaatagagaatagaggaattatgcagaatgcttggcgtgtgattgattgtactaatttacaaggtgaattacggtatattcgcggtaggattttagtgtgtgatcacgcattagagcagaaagttgaaattccgctagcggaaacggcaatattgcttattggtttgcattgtaactgttctacaggtctgcttcatcagtgtgctgaatatggtacttgcgtaatgacctgtgattggcgatgtgttcctatcagtgctatgcattcgtggaccaatgttcctacgagaattacggttcgtcaattgtctcaggcaacaatgagtgtgcctcgaagaaaagcagcgtgggctcagattgttcgcgcgaaaatacgtggacaagcagcttgtcttgatttattaaataaagaagggggtggattattacgcggactatctaatactgttcgttctggagatgtaacgaatagagaaggccaagctgctcgtgaatattggaaacgtatttttcccgaggaagaagattttcatcgtaaaccagggtctggtcaagataggaatgctttacttgactatgcttatatggtgttgcgtggtttttccattcgtgcagttttatctgctggtcttaatccaacaatgggtatgaatcatcataatggtactaattatttctgcttagcagatgacataattgagccgtttagaccagctgttgattacgctgtttcaaaattatcattctcagatactccaaatgataaagcagttaaaaagtatttgatcgacagtgttaatcaacagtttaatggttctggacatacaattcctagcgnnnnnnnnnnnnnnnnnnnnnnnnnnnnnnnnnnnnnnnnnnnnnnnnnnnnnnnnnnnnnnnnnnnnnnnnnnnnnnnnnnnnnnnnnnnnnnnnnnnnnnnnnnnnnnnnnnnnnnnnnnnnnnnnnnnnnnnnnnnnnnnnnnnnnnnnnnnnnnnnnnnnnnnnnnnnnnnnnnnnnnnnnnnnnnnnnnnnnnnnnnnnnnnnnnnnnnnnnnnnnnnnnnnnnnnnnnnnnnnnnnnnnnnnnnnnnnnnnnnnnnnnnnnnnnnnnnnnnnnnnnnnnnnnnnnnnnnnnnnnnnnnnnnnnnnnnnnnnnnnnnnnnnnnnnnnnnnnnnnnnnnnnnnnnnnnnnnnnnnnnnnnnnnnnnnnnnnnnnnnnnnnnnnnnnnnnnnnnnnnnnnnnnnnnnnnnnnnnnnnnnnnnnnnnnnnnnnnnnnnnnnnnnnnnnnnnnnnnnnnnnnnnnnnnnnnnnnnnnnnnnnnnnnnnnnnnnnnnnnnnnnnnnnnnnnnnnnnnnnnnnnnnnnnnnnnnnnnnnnnnnnnnnnnnnnnnnnnnnnnnnnnnnnnnnnnnnnnnnnnnnnnnnnnnnnnnnnnnnnnnnnnnnnnnnnnnnnnnnnnnnnnnnnnnnnnnnnnnnnnnnnnnnnnnnnnnnnnnnnnnnnnnnnnnnnnnnnnnnnnnnnnnnnnnnnnnnnnnnnnnnnnnnnnnnnnnnnnnnnnnnnnnnnnnnnnnnnnnnnnnnnnnnnnnnnnaccacaatttgtaaggagtgaattatgaaagtcgatgaggacagtggtggcatgtggtgtttagtaatgtttgatttaccagtgaaaacaaaagtagagcgtcacgctgcaactgtatttcgcaatatgctgcttgatatggggtatgcaatggtacaattttctgtgtatgtccgttatagccccactcaaacaggaaatagaacttcagtaaaaataattaaggataatcttcctccacgtggatcaatacgcattttacatgtcagtgatcatcaatggtcatctgcacaacgttattacaatgccaggcaagaaaagaaagaggaggctcccgatattgctatgcttttttaatcataaaatgtcttataatggttggaattctaccattcttgatgatataccaattatatcaagaatggtagaagctaattttcaactaatggtgacattaagcttaagtctcttcaattatatcaagaatggtagaagctaattttcaacgctgaagctaaacagtcgcggcatgtatcaattatatcaagaatggtagaagctaattttcaactatatattggacgggcggcacaggcgtacaattatatcaagaatggtagaagctaattttcaactagcgtgtgtggtggttttgatggttctcaattatatcaagaatggtagaagctaattttcaacccagccaggcaacggctcaaaactagatcaattatatcaagaatggtagaagctaattttcaacattgcgataggcttctggcactaacgtagcaattatatcaagaatggtagaagctaattttcaacaaataaataaaaacggggaagctagaaagcttcccctgcagtgataatcatcaaaactgctgagcaatcaaactggataacaagtccagtcttattgaaaattagcacttcaaatatatcatttttaagaaacaaaagacaagtgaatttttttaagttttgttaaaagatttgaaaagttaacatatcgatatattcaatgaatgacacagttggagatattactattattatgtttaacatatatgcgttttttaaaaagtgcattcttagaatgtatgtatgtacatagatagcatccatatattcataatgggaacgttactaatgcagcgttcccattatgttttttataatatgcgactttatatgcgatttaccaaatgtgtacgcgctcgcttggagcaagccacatctcgtcgccgtctttaacgtcgaannnnnnnnnnnnnnnnnnnnnnnnnnnnnnnnnnnnnnnnnnnnnnnnnnnnnnnnnnnnnnnnnnnnnnnnnnnnnnnnnnnnnnnnnnnnnnnnnnnnnnnnnnnnnnnnnnnnnnnnnnnnnnnnnnnnnnnnnnnnnnnnnnnnnnnnnnnnnnnnnnnnnnnnnnnnnnnnnnnnnnnnnnnnnnnnnnnnnnnnnnnnnnnnnnnnnnnnnnnnnnnnnnnnnnnnnnnnnnnnnnnnnnnnnnnnnnnnnnnnnnnnnnnnnnnnnnnnnnnnnnnnnnnnnnnnnnnnnnnnnnnnnnnnnnnnnnnnnnnnnnnnnnnnnnnnnnnnnnnnnnnnnnnnnnnnnnnnnnnnnnnnnnnnnnnnnnnnnnnnnnnnnnnnnnnnnnnnnnnnnnnnnnnnnnnnnnnnnnnnnnnnnnnnnnnnnnnnnnnnnnnnnnnnnnnnnnnnnnnnnnnnnnnnnnnnnnnnnnnnnnnnnnnnnnnnnnnnnnnnnnnnnnnnnnnnnnnnnnnnnnnnnnnnnnnnnnnnnnnnnnnnnnnnnnnnnnnnnnnnnnnnnnnnnnnnnnnnnnnnnnnnnnnnnnnnnnnnnnnnnnnnnnnnnnnnnnnnnnnnnnnnnnnnnnnnnnnnnnnnnnnnnnnnnnnnnnnnnnnnnnnnnnnnnnnnnnnnnnnnnnnnnnnnnnnnnnnnnnnnnnnnnnnnnnnnnnnnnnnnnnnnnnnnnnnnnnnnnnnnnnnnnnnnnnnnnnnnnnnnnnnnnnnnnnnnnnnnnnnnnnnnnnnnnnnnnnnnnnnnnnnnnnnnnnnnnnnnnnnnnnnnnnnnnnnttctgcaggggagtgtgggtcgatttgaaggtattgctccgcaatctcgttacgagcctttgaacgccacacaagtgcgtagcttaagaagaatcgttgcaaagcagtgaaaccatcaatcttaggagcgttcagcaaagtttcgcgaatcgcatcgtcacttccgtcgacttcttgtcccttgctcttttgcaaagcaaaagcgtaggctttaagagcaatagttacgccgcttaaatcaccaatgttttcgccgattgttaaagcaccatttacgtgaggcattgcatcgcgctcctctttgctctttaagtgagagtatttaacaataagctgcgttggtgtaaaagcattgtattgctcaataagcgttttagtgcgctcagtgaagttggttttgtcttcttcagtccaccaattgttaagcacgccgtcgccatcatattcgcaaccttgatcgtcaaaaccgtggccgatttcgtggccaattactgcaccaatagcaccgtagtttgctgcgtctggagcactagggctaaagaatggcggctgcaaaatcgcagctgggaacactattacgttaagcagcggatcgtagtaagcgtttacggtttgcggagtcatctgccactcttcgcgatccacaggttctccagcttttgcagtatacctaccaaacacgaatcgagaaacttcgcgcatattctcaattaagccagcgtcttccttaatatttagcacagagtagtcaatccaatgattcgtgtaaccaatatttggctcaaacttgctaagcttttccaaagccttcgccttagtctcctcgccaagccagctgctgtgagaaatcgactcgcggtaagcgttaataagattgtcaactaagccttccatatactttttagaagactcagggaagtgcaagcgcacgtattctttaccgacttcctcgccgcaagcatcgtcaacaactccgattgcgcgcttccagcggtcgcgtggcttggtggcgccagaaagcactttgccgtagaagtcgaatcgcgcttgtgcaaagtcctcgcttaacatgcttgcccagcacaaaatcacatgcacgcgtgcccaaagctttagatcttctaagtcggcttcttgccaaatcttattcaatccttctataaagcttggctcgtgaactactactttgctaaaagctttacgaaaatctattggctgattctttgcttcttcggaatcgtcgtaagatttttgagcagcatccaagaatgcgtcaagattcagcgcttcaagcgtttttgccaaatctgcataatcgtaaggattataagttttttgagaatcgcgtgttgctacgttatcccagtggttgcttgcgatttgtgtttcaaccttcaagaaacgttccgattgctctcttgtagtagtggcatcaccgtatccagctaagcgcaacaatgaagccaccatttttacgtattcagcgcgaatcggagcgtaattatcttcgcgatagtatgcttcgtctggcaagcccaatccagcctgctcaatgtgcataatattcgtcttagggtctttagggtctccgtagacgccaaaagcaaacattgcattaggtccgccatatggagtaagagaagcaatagtgcgaactaagtcttctttgctgctagctgcatcaacagcgtctaaatcgctcttaattggcgtaattccagctttttcaatagatgcagtatctaaatagttgcggtataggattcgcgactttttggctgggcaatcttcgttttctaaaatatctcgaatttgcgtctctgcatcttctgcaagcttgtagaaagcaccatacattggcttatcttctggaagagtgtaagtgtcaatccaaggaccgtttacgtaacggaataaatcgtcttgtggtcgagtaaccgatgagaaggaagctgggtcaaaatttacagcagaaatttccttctgcgattcctcattgttgttattattttcattgttattaggcatgtgcctagattacaagtattaagcgacatcattagctagtattttcgccatattttgcgctattttcgtgcctgcgagttagtcttaaatcatgattgaacttaaaactccatccgaaattgaagctatgaagcctgcaggtcgcttcgttggtagtattcttaaagacttgaaagcaatgacaaaagttggcacaaatcttcttgagattgatgactttgttcgccaacgcattatgagccgtaaaggtgcgtcttcttgctatgttgactacgctcctgattttggaactgnnnnnnnnnnnnnnnnnnnnnnnnnnnnnnnnnnnnnnnnnnnnnnnnnnnnnnnnnnnnnnnnnnnnnnnnnnnnnnnnnnnnnnnnnnnnnnnnnnnnnnnnnnnnnnnnnnnnnnnnnnnnnnnnnnnnnnnnnnnnnnnnnnnnnnnnnnnnnnnnnnnnnnnnnnnnnnnnnnnnnnnnnnnnnnnnnnnnnnnnnnnnnnnnnnnnnnnnnnnnnnnnnnnnnnnnnnnnnnnnnnnnnnnnnnnnnnnnnnnnnnnnnnnnnnnnnnnnnnnnnnnnnnnnnnnnnnnnnnnnnnnnnnnnnnnnnnnnnnnnnnnnnnnnnnnnnnnnnnnnnnnnnnnnnnnnnnnnnnnnnnnnnnnnnnnnnnnnnnnnnnnnnnnnnnnnnnnnnnnnnnnnnnnnnnnnnnnnnnnnnnnnnnnnnnnnnnnnnnnnnnnnnnnnnnnnnnnnnnnnnnnnnnnnnnnnnnnnnnnnnnnnnnnnnnnnnnnnnnnnnnnnnnnnnnnnnnnnnnnnnnnnnnnnnnnnnnnnnnnnnnnnnnnnnnnnnnnnnnnnnnnnnnnnnnnnnnnnnnnnnnnnnnnnnnnnnnnnnnnnnnnnnnnnnnnnnnnnnnnnnnnnnnnnnnnnnnnnnnnnnnnnnnnnnnnnnnnnnnnnnnnnnnnnnnnnnnnnnnnnnnnnnnnnnnnnnnnnnnnnnnnnnnnnnnnnnnnnnnnnnnnnnnngtccttttgctcactacatttgcacttctgtaaacgatgctgttcttcacggagttccttttgattacaaccttaaagacggcgatttactaacgcttgacttagcgattaacgttgacggatgggttggagannnnnnnnnnnnnnnnnnnnnnnnnnnnnnnnnnnnnnnnnnnnnnnnnnnnnnnnnnnnnnnnnnnnnnnnnnnnnnnnnnnnnnnnnnnnnnnnnnnnnnnnnnnnnnnnnnnnnnnnnnnnnnnnnnnnnnnnnnnnnnnnnnnnnnnnnnnnnnnnnnnnnnnnnnnnnnnnnnnnnnnnnnnnnnnnnnnnnnnnnnnnnnnnnnnnnnnnnnnnnnnnnnnnnnnnnnnnnnnnnnnnnnnnnnnnnnnnnnnnnnnnnnnnnnnnnnnnnnnnnnnnnnnnnnnnnnnnnnnnnnnnnnnnnnnnnnnnnnnnnnnnnnnnnnnnnnnnnnnnnnnnnnnnnnnnnnnnnnnnnnnnnnnnnnnnnnnnnnnnnnnnnnnnnnnnnnnnnnnnnnnnnnnnnnnnnnnnnnnnnnnnnnnnnnnnnnnnnnnnnnnnnnnnnnnnnnnnnnnnnnnnnnnnnnnnnnnnnnnnnnnnnnnnnnnnnnnnnnnnnnnnnnnnnnnnnnnnnnnnnnnnnnnnnnnnnnnnnnnnnnnnnnnnnnnnnnnnnnnnnnnnnnnnnnnnnnnnnnnnnnnnnnnnnnnnnnnnnnnnnnnnnnnnnnnnnnnnnnnnnnnnnnnnnnnnnnnnnnnnnnnnnnnnnnnnnnnnnnnnnnnnnnnnnnnnnnnnnnnnnnnnnnnnnnnnnnnnnnnnnnnnnnnnnnnnnnnnnnnnnnnnnnnnnnnnnnnnnnnnnnnnnnnnnnnnnnnnnnnnnnnnnnnttctgctattagtttcgtggttggaaagcatgcggatcctgaagatttgcgcttaattaagtgcactgaggaagcacttgaggctggaattaacatggctcagcctggaaaccgtcttggagacatttctgcagctgttggatgcgttgctcacgagtatggttacagcgtaaaccttgagtttggcggtcacggagtcggtcatattatgcatggtgatccgcacgttcctaacgatggcactgctcaccacggctacaagcttcgtccaggtcttgtaattgcaattgagccatggttcttaaagactactgacgaaatttaccaggatcctaaggatggttggactcttcgctctgctgatggttctcgcggtgcacacactgagcatacgattgcaattacggaaaacggtcctgagattttgaccgtgcgctaaacttataaatagttgattttgtaagtattttgcgagtagtaattgcgtaaaacaggtatgtaaagaggtactttaagtaaatggcggaatttgatttttcccaagcattaaatgatgttgaagcaaagtattcttcgatttctaaagcactagatgtcgattcgttgaaagttacgattgcagatttagaaaagcaggcttcggagcctggactttgggatgattctgagcatgcgcagcaggttacgagtaagctttcggcagctcagtctcaattaaagcgtttacaagccgttgagcaacgcattgaagatactaagactttgattgaacttggtcaggaagaagaggatgctgattctatgagcgaggctcaagaggagcttggctctattgctcacgagttggacgatatggaagttcaaactcttcttgacggcgaatatgatgctcgtgcagcggtggtgacaatccgttctggtgcgggtggtgtggatgctgccgattttgctcaaatgcttcttagaatgtacttgcgttgggcagagcgaaacggctataaaactaagatgatggatacgtcttacgcagaagaagctggtattaaatccgccactttccaagtagatgccccatatgcgtatggtcgcctttctgtagaaggaggcactcacagaatggttcgtatttctccattcgacaatcaaggcaggcgtcaaactggctttagtgccgtggaagtaattcctcttgttgaagctacagatcatattgacattccagattctgacattcgtgtggatactttccaggcgtctggccctggcggacaaggcgtaaacactacgtattccgctgtgcgcatcacgcatttgccaactggtttggttgtttcaatgcaagatgagcgcagccagattcagaaccgagctgctgcaatggcggttttgcaatcgcgtttacttgtgttaaagcatgccgaagaagctgctaaaaagaaggag

SEQ ID NO: 3416 - DNA, 23189 bp, synthetic construct
  variation 16382..16857: note = note, n is a, c, g, or t
  variation 14470..14924: note = note, n is a, c, g, or t
  source 1..23189: mol_type = other DNA
  variation 9437..9892: note = note, n is a, c, g, or t
  misc_feature 1..23189: note = Synthetic
  variation 18459..18922: note = note, n is a, c, g, or t
  variation 4791..5253: note = note, n is a, c, g, or t
  variation 21854..22217: note = note, n is a, c, g, or t
  variation 12715..13167: note = note, n is a, c, g, or t
gatattgttaagcgcagcgagtctggtatgattaccgacccactcactgttcacccagatgcaacgctcgcagatttagataaattgtgcgggcgttttcatatttctggtttgccagtggtagatagcgaaaatcgtctagttggtattattaccaatcgcgatatgcgtttcattgcttccgaagactatgatcgtttgaaagtcaaagacgttatgactcgcgaaaatctcgtcactggtccttctaatatttctaaagaagacgcgcatcgtttgcttgcagacaacaaagttgaaaaattgcctttggttgatgcagaaggcaagcttactggtttgattactgttaaggattttgtgaagactgagcagtatccagatgctactaaggatgatcagggtcgcttgcgcgtggctgctggaattggcttccttggagatgcttggcagcgtgcgtgcgcgcttatggaagctggagttgacgtgcttgtggttgataccgcaaacggagaggctcgattggctctcgatatgattcgcagaattaaggcagataaggcgtttgacggagtacaaattattggcggaaatattgctactcgccaaggcgctcaggctatgattgatgccggcgtcgacgctgtaaaggttggcgttggaccaggctctatttgcactacgcgcgttgttgcaggcgttggtgtgcctcagcttactgctgtttatgatgcggctcaggcttgcaaggctgctggcgttccatgcattgctgatggtggtattcactattctggcgatattgctaaggctttggttgctggcgctgacaccgttatgctcggcggcactttggctggttgcgaggaagctccaggtgaaaaggttttgcttcacggcaagcagtataagctttatcgtggcatgggctcgcttggcgcaatggctcctcgcggtaagaagtcttattctaaggatcgttacttccaggcagacgttactagctccgacaaggtggttccagaaggcgtggaaggcgaagttccatatcgcggtccacttaacgctgtgctttaccagttgcttggcggattgcatcagtctatgttctacgttggtgcgcacaatattaaggaaatgcaagagcgcggtcgctttattcgcattacggatgctggtcttcgcgaatcgcatcctcacgatattgtgatgactgcagaagcgccaaactacagcggtttccacaactaaatcgtaagttgcgtaagttgtgcgtataagttgcgtataaatcgcaagtaattttgcattaaacggcgaagagttagctaagtcttttttgctactttctaacttttcgtcgtttttgttttgacaattcgtataaaattattgtatagttagtgggatatcccactaaaaatgaggtgttttgtggaagtagtgaaagattatgacgttcgtcttgatagtaaaaagcgtgtaactctgcgcggagctaaatacccttattacaatgttaaagaatgtgataatggttgtattttattagagccacgtgagcttactattcctaagagtatctcttctaaaactcttaaaagtatggatgaagcaatccgcaattttaagattggcaaagtctctgaacctgttgatctctctgacttctaggagtaagtgaatgaacttcaatattagaatgggtattccagagatgtctaatatttgggagagattgaagaaagagtttctagaaggcagtataagtaaaaaagatctttctctttataagaaatggggaaaatctatgaaacttttatctgaaaatccaaggcatccaggattgcatactcatgatattgaagaattgacaaatagatatggtgttagagtttggcaatcctacttggagaataaaacaagtagtgcaatgagaatgtattgggtttatggtccagatcatatgtcaataactattatcggtttagagcctcaccctgaagataagaaaaatggatcatattctagaatttcactttctgatatgccagagatgtgattttagctgttagtcgtcgctgggaagatgtaggctgatgggttcgaaaaaatattaggaaaggaacgaaaatggctgaagctaaggaagatcttacgtttacgccggaagaatcgcgcttaatttggattgattgcgagatgacgggactcgatattttccacgacgaattatgcgaagtatctgtagttccaactgattttaatttgaaagttctagacgacggtattgatttagtgattaagccgagcgatgctgctgtggctcatatgaacgatttcgtacgcaatatgcacacatcttctggtcttgttgacgagtggaataaaaacggtttgcctctagaagaagcacaaaagcaggttgttgagtatgtaaagcgctttttgccagagcacggaaaagcacatcttgctggcaactctgttggctccgataaaaagttcctcgaccgctacatgccagatttaatggcaaatttgcattaccgcgtaatcgacgtaagcacattgaaggagatttcgcgcagactttacccagatgtttaccgcaataagccagcaaagcacggaggccatcgtgcgctcgcggatattattgagtcgattgacgagttgcgctactacagcgatatgatgttcattccagctccaggcccaagcgaagcacaggcaaaagctggcgcacagcacattgagagcacgagcttgcttcgcgactacgagcgccgcggagacgcgctagaagacgtaaattccgcagaaaagcgcgattattaaataaagcgcgactattaaacgcaataaaaggtactgccaatgaagcaatccgaagccctaaccataatcaacgctggtgtaagcgttttcattaccggcgctccgggtgcaggtaaaacctacgtattaaacgcggctattcgcgaaatgcgaaaaaacggtttaagcgtggctgtaacggcttctacaggaatcgcagcaacgcatttaaacggtcaaaccattcactcgtggagtggagttggagtttcaaacgcgcttagcgattcgcttcttaaaaccattagagctaggcgagggaaacgcataaaagccacggaagtgctcgtgttggacgaagtttcaatgattcacgcgtggcttttcgacatggttgatgaagtatgccgcaaagtgcgcaaaaactctgctcccttcggcggacttcaagtagttatttcgggagatttcttccagctgcctcctgtgagtacttctatgcgaaatcgcgatgtgttcgagccaagtccagagtttattgagtcgcgcgaaaagtatgctgctgctggcaaaaatccagaaggctatattacggaatctttcgcctgggatgctttaaagcctgttgtgtgctatttaactgagcaacatcgtcaggatgacggcaaattgcttgaagttttgacggatattcgtggcggtcttgtaagcgacgaagataagcaagtgcttgccagtcgccttggtgagtatccgcaagacgatgaagtttcggttcatcttttccctacgaactcacaagcagatggtttaaataatgtgcagcttgcggcaattgatgctgagcctcacgaattcgtggcaacagaagccggccctaaaaatctcgtcgagcgtttaaaaaagaatatgctcgctccagaacggcttgtattaaaggttggagctgcagtgatggcgttgcgaaatgatcaagataagcagtatgtgaacggctcggttgggcgagttttgagattcgcacctgaatctaaaggtggatggccgattgttgagtttgaaaacggcaatattgtcactcttaagccggctgcttgggaaatgacggatggtgagactgttcttgctagcgtaaatcaagtgccacttagatgcgcgtggggaattacgattcataaatcgcaaggtatgacgcttgacagtgcggtaatggatttgcgtagaacttttgctcccggaatgggatatgtggcgctttctcgcgtggaaaatcttggcgggctttatttggaaggtattaacgatcgcgcgtttagtgtttcggcggatgctgtactgttagacggattcttgcgtgaggcttctaaacgcgcgagtgagttgcttgctagcgacggtgctgctgctttcgtaacaaataatgcggaagatgattctgcgaatcagcaagagtttgacatttttggcgctgtcaattacgcagataatgaagagttttctttcgataacgagttttagcattttgcgccatgacttgcctgagcgcttagagcgttttgcgactaatccgcgcgaacgacataatctatattccgctttttgtacgtgattcgggtcaaaattggtacaaaatgcggaggatgtttccagagtttgtagtccaacactccatttagagctacaaagtcggtaaagtgtttttgcttttgattagctgtgtaaacaagtgtttatgtcctcatgcgcaaatagattggaacgcatgaattccaatgtacttcgtatgtctcagctgttccttcgtacgctgcgcgaggatccagcagacgcggacgtaacttccgcaaaacttatgcagcgcgcaggctatattcgtaaatctgccccaggtgtgtggacttggttgccgctcggactcaaggttttaaacaaggttcaggcgattattcgcgaagaaatcaacggtatcgnnnnnnnnnnnnnnnnnnnnnnnnnnnnnnnnnnnnnnnnnnnnnnnnnnnnnnnnnnnnnnnnnnnnnnnnnnnnnnnnnnnnnnnnnnnnnnnnnnnnnnnnnnnnnnnnnnnnnnnnnnnnnnnnnnnnnnnnnnnnnnnnnnnnnnnnnnnnnnnnnnnnnnnnnnnnnnnnnnnnnnnnnnnnnnnnnnnnnnnnnnnnnnnnnnnnnnnnnnnnnnnnnnnnnnnnnnnnnnnnnnnnnnnnnnnnnnnnnnnnnnnnnnnnnnnnnnnnnnnnnnnnnnnnnnnnnnnnnnnnnnnnnnnnnnnnnnnnnnnnnnnnnnnnnnnnnnnnnnnnnnnnnnnnnnnnnnnnnnnnnnnnnnnnnnnnnnnnnnnnnnnnnnnnnnnnnnnnnnnnnnnnnnnnnnnnnnnnnnnnnnnnnnnnnnnnnnnnnnnnnnnnnnnnnnnnnnnnnnnnnnnggaagaatacggcgataacattttccgccttaaggatcgtcatgaggctgactatcttcttgctccaacgcacgaagaagttttcacgctccttgttaaggatatgtattcttcttacaaggatttgccagttactttgtatcagattcaaacgaagtatcgcgacgaattccgtcctcgcgcaggtcttattcgcggccgcgagtttattatgcaggatggttattcgttctcgattgacgaagatggtttgaagtctgcttatgttgaagagcgcgctgcttacgctcgaattttcgaccgtttaggcattaaatatgtgattgttcacgctgtttctggccctatgggtggttctgattctgaggaattcttggctccaatggcaattggcgaagatacttttgcgcttgctccttctggaaaagcttggaatgttgaggctttgaccacaccagaaatgcaagatgttgactgctcggcaactcctaaaatggaagctcttgatactccagatgctaagacgattgaagctttggttaaagtttctaacgatttgcatccacgcaaagacggccgcgaatggcaagcagacgacactttgaagaatctgatcattgctgttaagcatccggctgatgctgagggcggcgaacacgaggagccatggcgcgaaatcgtggctattggtattccaggtgaccgccaggtagatatgaagcgtcttgaagctcagtttgctcctgcagaaattgaagaagcaactgaggatgatttgaaggctcatcctgagtttgttaagggatacattggctttagcgtattaggtcctcaagctcgcaaagagggtagtggaattgaaaatcctgtccgctacttgatggatgctcacgttgcaaagggtagcgcttggattacaggagctgacgaagacggaaagcatgtttataacgctgtttacggccgcgattttgaggatgatggtgttgttgaagcagcccaggttcgcgatggcgatatgagcccagatggttccggtccattgagcttcgaacgcggtgttgagattggtcaggtgttccagcttggtttaaagtattctaaggctttgggcttaagcgttcttaacgaaaacggtaaagctgtaccagtttggatgggctgctatggtattggcgttagccgcgtgattgcatgcttggcagaaacgcatcacgatgatgctggtcttgcatggtctatggcgattgctccagctcaagttcacgtcgttgctacaggcaaggatcaagttgctttcgatgctgctgaaaaagttgttgaagagcttagtaagcagggaattgaagtaatcttcgacgaccgtccaaaggtttctccaggtgtgaagtttaaggatgctgagctcgttggcgttccgctgattgctgtagccggccgcgatactgtgaacaatggaacgattgaaatccgcgatcgcaacggttcaaacgttgaggcagttccagtggatgaggctgctgctcgaattgtagagcgcgttcgcgaacagttgtaatcgcaataactgttaacaacgaatcagcgattaagcaattaaactattaaacaattaaacgactaagcaatattgccgttggtgtaatgctttgcatattatacgcattattttcagcggcaatattgctatgaatagtaaaaaattatataaattattagaatagaatgttaatgagttttaatgtttaattctattaaaactttctaaaaatcatttacacctccttcaatatcgtcatagtggttttcttcgacttgtgagccgaaatctattgtttcttttgctgaagattcagcatcataatggtattcttggctgtcgttttcttgcgaagaatccatagaataagtattagccatagggtttttcatcgccaagctcaaatcttgattggaataagtatcttgatttgcccgattttcttggtttatttgattagtgtgatatttactattgttactctgatcggttcttccacgattataagagtatttagtaaaagcactaattcctcgatttaggtcgtgtccaattgcggtggcttctagtacaactcgagaccggtcttctccatctttgtgccaggattccgtgtttaaatttccgcacacgactatcgcatctcccttatgcacgctttttagcacatttgcagctaaagacttgtatgcttttactgtcatccaagttgtcggtctatctttccactgtctttcctcgctatggtagtaagacgttgtgcttcctattctaagtgagcatgctggtgagttttcgttgcgactaaagttcacagggtcactacctacatagccgctgattgttagtgttgcttgttgttgtgccatattcttaacctttcaaaagtttggactgcgactaatttaaatctcaaaattcatcacgcaacacgtgttgattattgtgattttcaataaattcgccgcagtagaatcaactatgaagtatcaaaaatagttttgcaagttatttttatcaatgtggttaaagcctatgctttatgcacatcgtttaaaaactcttgacaaaatatgtaaaattgagtaggcgagtctaaaatgtgtaaaatatatgtagattgatatacttagcgaaagtagtttttgtttttcattagcattggaaggtgaagcttgagttttttgcctacttgtttgtgttatttgaatcagggattactgaaaagtagttattaatcacgtggagagaggtctacatttatgtggcataagtcgcacgtattttctgcaaagaaatgtttagctgctgcggcatcagctgttgcttgcgtagcaatgattggatctactgccgtatctgctagtgctttggttatagtgcaaaatcacagtgttgctaatgttaatactaattggcaagttaagaatcagtcggctgcaagctacattttaggtgcaattcgtgatgtgcgttcaaagtattatgacgatggcgttacccttatgaacggtatgactcttgcagattatgttacttctaagggtcttacaaaagaacagtatattaatgatattcgctacgatcgtgctaatgaagaggatgcttatcgtcgtgcaaatgagactgttcagcatggaaaacttggacattttgctgcggatggtgtgagccttccaaactacgatggtcgtaaggcttggggcgaaaacattgcttggggtgaaagctcagaagaatctatgtcggattggaccgctggagaggagtctgcgttacaccaatctaatggtgctgaaactacttacaatgctcatctttaccagattttgaatccagaaaacatttccttcggatatggtgaagtagctggtacctcatacggaagagtatctgttttaactctttcaactcaggttggagacactgactacccacaaggcaagttaggtgttgctcctcaccttgattttgcttggattatccgtaataacgatattgctgttggtgcaaatgcttacaccgacaagcagcttgagtatcgttggctttcttacaatttgaatactcagcagtgggctactattgctgattggggtactggaaactgggcttcttgggttacaaagccaggtgactattggctgcattgtgaagctcgtgatccttctactaagaaagttattttagaaaagacaattgctttccactacacagttccaagccaaacagttattactggaacttatgctggttggcaaggcaatagtgttcttcttggtgcatccactaataatcctaatggctctaccaagattaagatttatgattacaatgctaagcagtgggttgaaggatacgatggcccttgggctttgtggagcccacgcccaggcatttactggactcatttcgaagcttacgatgagaatggtaatttgtcggatgttaagacctacgcctttggcgtgtgaatctgattagtaaatctgattagtatcatttaaaaagcctgcaaacgttttaaacgcttgcaggcttttgtttacttatttactttatttgtgttttatttgcaacttaccaaatgtgtacgcgctcgcttggagcaagccacatctcgtcgccgtctttaacgtcgaannnnnnnnnnnnnnnnnnnnnnnnnnnnnnnnnnnnnnnnnnnnnnnnnnnnnnnnnnnnnnnnnnnnnnnnnnnnnnnnnnnnnnnnnnnnnnnnnnnnnnnnnnnnnnnnnnnnnnnnnnnnnnnnnnnnnnnnnnnnnnnnnnnnnnnnnnnnnnnnnnnnnnnnnnnnnnnnnnnnnnnnnnnnnnnnnnnnnnnnnnnnnnnnnnnnnnnnnnnnnnnnnnnnnnnnnnnnnnnnnnnnnnnnnnnnnnnnnnnnnnnnnnnnnnnnnnnnnnnnnnnnnnnnnnnnnnnnnnnnnnnnnnnnnnnnnnnnnnnnnnnnnnnnnnnnnnnnnnnnnnnnnnnnnnnnnnnnnnnnnnnnnnnnnnnnnnnnnnnnnnnnnnnnnnnnnnnnnnnnnnnnnnnnnnnnnnnnnnnnnnnnnnnnnnnnnnnnnnnnnnnnnnnnnnnnnnnncgcaatgccattagtgcggcactctcgttattaagttaatgctatgccatagatatttattacgcgaaaatctatagatatttattttatttatataaataattgattatgattttatatatggaaggcaatatttcttatgctatcggcattgacgtcggtttaaattcagtaggtcttgctgcaattcgcttagatgataatggggagcctataagaatacttaaagtaataagtgttattcacgatgctggtattgatccaaatggggcaaaagaatctgatacgcgtaaagcaatttctggtgtcgcgcggcgtgtgcgcaggttatatcgtcagcgcagacgtcgtttgcagaaacttgattttctattacaatcattgggttggccggttgttgaaaacaaggatttagagttttctaattcgtttattccatggatttttcgtgcaaaacttgctgatgaatatattgaggatgaagaacaacgtaaacaaatgttaagcgttgcaattcgtcatattgctagacatcgtggttggcgcaatccttatcagtcaataaaatcaatgatgcaagagactgagtattctgaattttacaatgagttgctaaaaaatattgaaaagtttgcgccaggagtaggttgtgaaggttctacgcctgcgcaattagtacgcgattatcttttatcacaacaaggtaaaccctcacgtcgtttacgtataactacagacgataaaaagaaaaatcatcccaactcattagatcctgttttaccacgtaagctaatgcaaagtgacagcatgcttgagattctcaatattttcaatgtgcaacatattgatgacaagtatgttagagagcagattattaatgctgttttttatgagaaatctccgcgtggctctgcagaaaatcgtgttggcaaagatgctataacaggaaagggtaagcgtgcgctaaaggcatcgttagcgtttcagaaatatcgaatcatatctactatttctaatcttagcataagagaaaattcaaaagaacgttgtttaacaatagaagaaaaacagaatgtttataaattattaacaacttcgactgatgagtcatcaaaaaagaaaagcgctgaagtaccattatacacttggattgatgtagctgattgcctcggaattgaacgctataagttgcgtggagtaggatcacaaataggagatggagaatctgttggtaatcgtcctccaatgttgaatagtgagttagctattatttatgcgaataataaatctttaagacaatcgttgctcacgtggtggttagatgctaatcgtacgcaagaagataaagaagctcttattgagatattgagcaacacggtagacatagaagcaattcatgataatcctgaatatcaagataagtacggttcagcaatagcatttattgattcaatggatgaaacagaaattgcggcattggaaaatatttcattgcctaatggtcgtgctgcttatagtttggaaatattagataaactcaataagcaaatgcttgaaactgatgatgatctatttaaagcgcgcaaaaagttatttaatttaccaaataattggcgtccatctgaagctcctattgcagagccaacaggtaatccttcagttgatcgagtattgaaaattgtgcatcgattccttataagtgctaaaaatcgttggggtaatcctgtacgtattaatattgagcatgttcgttctggattccaatctaaaaaaatggcgaattcatataaggaattattagataaacgaaccaaaggtaaagaaaatcttaaagcaatgatgcggaattctttgcatttaggcatgagtgattctatttcagatgcagatatacgccgttatgaggctgttcaacgtcagaatgggcaatgtttgtattgtggctatgagattacttatcatacatgtgagctagaccatattgttccgcgtaaggggccaggttctacgaatactcgtgagaatttagttgctacttgcttatcgtgtaacgctcaaaagtgcaatactccttttgcaacttggtgcgagcagtctacatattgcaagaatcatgatattagtgtagattccgctattaatcgggttcgtgcttttattttcccgcctaaatcatacgataaacgcggtgctaatcaattcaaaaaagaagttatatctcgcttgaaacaaaaagttggtgatgaagcgtttgataatcgttctatcgaatcggttgcatggatggcaaacgaattgcatcgtagaattgattggtattataactcgcagaattatcaaacaaacaatggtatttccgatataagtaataaagctcaaacaaatgttggagtttatgctggatcgcttactgctatagcaagaagaatgtctggaattgacggaaaactggagttctttgatggtagaaggaaaactcgttttgatagacgacatcatgcagttgatgcatcagtaattgcaatgatgactccaggaatggctcgaatacttgcaattaaatgcaatctgcgtgaaacacagttattgcaaggcaataaagtggttcctggtggtattgattggagagaatatccaacggctaatgatcaaggatatcagcaatatgctaattggtctgttcgtatgaatgcgttattgaaacttcttaatgaagaaatgagagctgatcgtattgctgtggttaattctattcgtttgagatacagtaattcttctgttcacaaagatgatgtacatgcattattaaagttgcacgtcggnnnnnnnnnnnnnnnnnnnnnnnnnnnnnnnnnnnnnnnnnnnnnnnnnnnnnnnnnnnnnnnnnnnnnnnnnnnnnnnnnnnnnnnnnnnnnnnnnnnnnnnnnnnnnnnnnnnnnnnnnnnnnnnnnnnnnnnnnnnnnnnnnnnnnnnnnnnnnnnnnnnnnnnnnnnnnnnnnnnnnnnnnnnnnnnnnnnnnnnnnnnnnnnnnnnnnnnnnnnnnnnnnnnnnnnnnnnnnnnnnnnnnnnnnnnnnnnnnnnnnnnnnnnnnnnnnnnnnnnnnnnnnnnnnnnnnnnnnnnnnnnnnnnnnnnnnnnnnnnnnnnnnnnnnnnnnnnnnnnnnnnnnnnnnnnnnnnnnnnnnnnnnnnnnnnnnnnnnnnnnnnnnnnnnnnnnnnnnnnnnnnnnnnnnnnnnnnnnnnnnnnnnnnnnnnnnnnnnnnnnnnnnnnnnnnnncggaatcctgattatgatgtaaacaatggtcttcctgaaaatccagatagaactattctgttgcataataagaagttaaatgcatacgattcaattacttttttcaaggcacaagcagcacagcttttcgtacgagaaggttctgtagagattggtaattctatccatcatctacgcatttatgaatactttgaaaagttgaaaagtggaaaaattaaaaaatcttatggaatgattcgtgtatttcaaaatgatttgcataaacatattcatgaagatttattctcgtgtgatttgcctgaacaatctatctcaatgagatatgctgatacagaagtcactcatgctgtgcaaacaggtaatgctaattatctcggatatcttgtgcctggcgatgagattatcgttgattttagtcatgctaaattatcaggatatattggtgactttgtagaattcctaaacaagataggtgcagattgtacagcatataagcattgggtggttgtgggtacggacgataaaacaactttgatacttaaaccatcgatgatttcttctgaaggaattgacaagttgtattcgaattgcaagcgcaataacttcgattatacttcttatgaagaatctattaataagattctagctggtaaaggttggcgtgtttcggttaatgtgttggccaagtataacgtagcaactattcgacgtaatgcgttaggtgaagttcgttgggtatcacgttcgcatttacctatttcttggcgttgggatactggagaaaatagagaatagaggaattatgcagaatgcttggcgtgtgattgattgtactaatttacaaggtgaattacggtatattcgcggtaggattttagtgtgtgatcacgcattagagcagaaagttgaaattccgctagcggaaacggcaatattgcttattggtttgcattgtaactgttctgcaggtctgcttcatcagtgtgctgaatatggtacttgcgtaatgacctgtgattggcgatgtgttcctatcagtgctatgcattcgtggaccaatgttcctacgagaattacggttcgtcaattgtctcaggcaacaatgagtgtgcctcgaagaaaagcagcgtgggctcagattgttcgcgcgaaaatacgtggacaagcagcttgtcttgatttattaaataaagaagggggtggattattacgcggactatctaatactgttcgttctggagatgtaacgaatagagaaggccaagctgctcgtgaatattggaaacgtatttttcccgaggannnnnnnnnnnnnnnnnnnnnnnnnnnnnnnnnnnnnnnnnnnnnnnnnnnnnnnnnnnnnnnnnnnnnnnnnnnnnnnnnnnnnnnnnnnnnnnnnnnnnnnnnnnnnnnnnnnnnnnnnnnnnnnnnnnnnnnnnnnnnnnnnnnnnnnnnnnnnnnnnnnnnnnnnnnnnnnnnnnnnnnnnnnnnnnnnnnnnnnnnnnnnnnnnnnnnnnnnnnnnnnnnnnnnnnnnnnnnnnnnnnnnnnnnnnnnnnnnnnnnnnnnnnnnnnnnnnnnnnnnnnnnnnnnnnnnnnnnnnnnnnnnnnnnnnnnnnnnnnnnnnnnnnnnnnnnnnnnnnnnnnnnnnnnnnnnnnnnnnnnnnnnnnnnnnnnnnnnnnnnnnnnnnnnnnnnnnnnnnnnnnnnnnnnnnnnnnnnnnnnnnnnnnnnnnnnnnnnnnnnnnnnnnnnnnnnnnatggtgttgcgtggtttttccattcgtgcagttttatctgctggtcttaatccaacaatgggtatgaatcatcataatggtactaattatttctgcttagcagatgacataattgagccgtttagaccagctgttgattacgctgtttcaaaattatcattctcagatactccaaatgataaagcagttaaaaagtatttgatcgacagtgttaatcaacagtttaatggttctggacatacaattcctagcgctttatctgatttagctcaatcatatggtatttatgtggaaaaagacatggaagactttcgagtaccacaatttgtaaggagtgaattatgaaagtcgatgaggacagtggtggcatgtggtgtttagtaatgtttgatttaccagtgaaaacaaaagtagagcgtcacgctgcaactgtatttcgcaatatgctgcttgatatggggtatgcaatggtacaattttctgtgtatgtccgttatagccccactcaaacaggaaatagaacttcagtaaaaataattaaggataatcttcctccacgtggatcaatacgcattttacatgtcagtgatcatcaatggtcatctgcacaacgttattacaatgccaggcaagaaaagaaagaggaggctcccgatattgctatgcttttttaatcataaaatgtcttataatggttggaattctaccattcttgatgatataccaattatatcaagaatggtagaagctaattttcaacagttgactcgggttttggcggtcagtatgcaattatatcaagaatggtagaagctaattttcaacctcaagcatcggtggaatcatatttctatcaattatatcaagaatggtagaagctaattttcaacttgttgagcgtcctgtttatgatgctggcaattatatcaagaatggtagaagctaattttcaactagcgtctgctgctgaccgtggcttgttcgattatatcaagaatggtagaagctaattttcaaccaataaataaaaacggggaagctggaaagcttcccctgcagtaataatcattaaaactgctgagcaatcaaactggataacaagtccagtcttattgaaaattagcacttctaatatatcatctttaagaaataaaaaacaagtggacttttttaagttttgttaaaatatttgaaaaattaacatatcaatgtgattgatggatagtgtagttgaaaatgttattacttttcgaatgcatgtgttttctaaaaactgcattcgtgaaatgtatgtatgtaggttttatgtaaacagcatccatatattcataatgggaacgttactaaggtagcattcccattatgttttttataatatgcgacttatatgcgatttaccaaatgtgtacgcgctcgcttggagcaagccacatctcgtcgccgtctttaacgtcgaannnnnnnnnnnnnnnnnnnnnnnnnnnnnnnnnnnnnnnnnnnnnnnnnnnnnnnnnnnnnnnnnnnnnnnnnnnnnnnnnnnnnnnnnnnnnnnnnnnnnnnnnnnnnnnnnnnnnnnnnnnnnnnnnnnnnnnnnnnnnnnnnnnnnnnnnnnnnnnnnnnnnnnnnnnnnnnnnnnnnnnnnnnnnnnnnnnnnnnnnnnnnnnnnnnnnnnnnnnnnnnnnnnnnnnnnnnnnnnnnnnnnnnnnnnnnnnnnnnnnnnnnnnnnnnnnnnnnnnnnnnnnnnnnnnnnnnnnnnnnnnnnnnnnnnnnnnnnnnnnnnnnnnnnnnnnnnnnnnnnnnnnnnnnnnnnnnnnnnnnnnnnnnnnnnnnnnnnnnnnnnnnnnnnnnnnnnnnnnnnnnnnnnnnnnnnnnnnnnnnnnnnnnnnnnnnnnnnnnnnnnnnnnnnnnnnnnnnnnnnnnnnnnnnnnnnnnntgcaatgccattagtgcggcattctgcaggggagtgtgggtcgatttgaaggtattgctccgcaatctcgttacgagcctttgaacgccacacaagtgcgtagcttaagaagaatcgttgcaaagcagtgaaaccatcaatcttaggagcgttcagcaaagtttcgcgaatcgcatcgtcacttccgtcgacttcttgtcccttgctcttttgcaaagcaaaagcgtaggctttaagagcaatagttacgccgcttaaatcaccaatgttttcgccgattgttaaagcaccatttacgtgaggcattgcatcgcgctcctctttgctctttaagtgagagtatttaacaataagctgcgttggtgtaaaagcattgtattgctcaataagcgttttagtgcgctcagtgaagttggttttgtcttcttcagtccaccaattgttaagcacgccgtcgccatcatattcgcaaccttgatcgtcaaaaccgtggccgatttcgtggccaattactgcaccaatagcaccgtagtttgctgcgtctggagcactagggctaaagaatggcggctgcaaaatcgcagctgggaacactattacgttaagcagcggatcgtagtaagcgtttacggtttgcggagtcatctgccactcttcgcgatccacaggttctccagcttttgcagtatacctaccaaacacgaatcgagaaacttcgcgcatattctcaattaagccagcgtcttccttaatatttagcacagagtagtcaatccaatgattcgtgtaaccaatatttggctcaaacttgctaagcttttccaaagccttcgccttagtctcctcgccaagccagctgctgtgagaaatcgactcgcggtaagcgttaataagattgtcaactaagccttccatatactttttagaagactcagggaagtgcaagcgcacgtattctttaccgacttcctcgccgcaagcatcgtcaacaactccgattgcgcgcttccagcggtcgcgtggcttggtggcgccagaaagcactttgccgtagaagtcgaatcgcgcttgtgcaaagtcctcgcttaacatgcttgcccagcacaaaatcacatgcacgcgtgcccaaagctttagatcttctaagtcggcttcttgccaaatcttattcaatccttctataaagcttggctcgtgaactactactttgctaaaagctttacgaaaatctattggctgattctttgcttcttcggaatcgtcgtaagatttttgagcagcatccaagaatgcgttaagattcagcgcttcaagcgtttttgccaaatccgcataatcgtaaggattataagttttttgagaatcgcgtgttgctacgttatcccagtggttgcttgcgatttgtgtttcaaccttcaagaaacgttccgattgctctcttgtagtagtggcatcaccgtatccagctaagcgcaacaatgaagccaccatttttacgtattcagcgcgaatcggagcgtaattatcttcgcgatagtatgcttcgtctggcaagcccaatccagcctgctcaatgtgcataatattcgtcttagggtcttnnnnnnnnnnnnnnnnnnnnnnnnnnnnnnnnnnnnnnnnnnnnnnnnnnnnnnnnnnnnnnnnnnnnnnnnnnnnnnnnnnnnnnnnnnnnnnnnnnnnnnnnnnnnnnnnnnnnnnnnnnnnnnnnnnnnnnnnnnnnnnnnnnnnnnnnnnnnnnnnnnnnnnnnnnnnnnnnnnnnnnnnnnnnnnnnnnnnnnnnnnnnnnnnnnnnnnnnnnnnnnnnnnnnnnnnnnnnnnnnnnnnnnnnnnnnnnnnnnnnnnnnnnnnnnnnnnnnnnnnnnnnnnnnnnnnnnnnnnnnnnnnnnnnnnnnnnnnnnnnnnnnnnnnnnnnnnnnnnnnnnnnnnnnnnnnnnnnnnnnnnnnnnnnnnnnnnnnnnnnnnnnnnnnnnnnnnnnnnnnnnnnnnnnnnnnnnnnnnnnnnnnnnnnnnnnnnnnnnnnnnnnnnnnnnnnnnnnnnnnnnnngcaatagtgcgaactaagtcttctttgctgctagctgcatcaacagcgtctaaatcgctcttaattggcgtaattccagctttttcaatagatgcagtatctaaatagttgcggtataggattcgcgactttttggctgggcaatcttcgttttctaaaatatctcgaatttgcgtctctgcatcttctgcaagcttgtagaaagcaccatacattggcttatcttctggaagagtgtaagtgtcaatccaaggaccgtttacgtaacggaataaatcgtcttgtggtcgagtaaccgatgagaaggaagctgggtcaaaatttacagcagaaatttccttctgcgattcctcattgttgttattattttcattgttattaggcatgtgcctagattacaagtattaagcgacatcattagctagtattttcgccatattttgcgctattttcgtgcctgcgagttagtcttaaatcatgattgaacttaaaactccatccgaaattgaagctatgaagcctgcaggtcgcttcgttggtagtattcttaaagacttgaaagcaatgacaaaagttggcacaaatcttcttgagattgatgactttgttcgccaacgcattatgagccgtaaaggtgcgtcttcttgctatgttgattacgctcctgattttggaactggtccttttgcgcactacatttgcacttctgtaaacgatgctgttcttcatggcgttccttttgattacaaccttaaagacggcgatttactaacgcttgacttagcgattaacgttgacggatgggttggagattctgctattagtttcgtggttggaaagcatgcggatcctgaagatttgcgcttaattaagtgcactgaggaagcacttgaggctggaattaacatggctcagcctggaaaccgccttggagacatttctgcagctgttggttgcgttgctcacgagtatggttacagcgtaaaccttgagtttggcggtcacggagtcggtcatattatgcatggtgatccgcacgttcctaacgatggcactgctcaccacggctacaagcttcgcccaggcttggttattgctattgagccgtggttcttaaagactactgacgagatttatcaagatccaaaagacggttggactcttcgatctgctgacggttcgcgtggcgctcatagcgagcatacgattgcaattacagagaatggtccagagattttgaccgtacgctaaacttcgaatagtaagtgcgtaaaacgaataatataaaatataaagaggtactttaaataaatggcggaatttgattttgcccaagcgttaaatgatgttgaagcaaagtattctttgatttctaaggctttagacgttaattcgttgaagactgctattgcagatttagaaaagcaggcttcggagcctggactttgggatgattctgatcacgctcagcaagttacgagtaagctttcggcagctcagtctcaattaaagcgtttacaagccgttgagcaacgcattgaagatactaagactttgattgaacttggtcaggaagaagaggatgctgattctatgagcgaggctcaagaggagcttggctctattgctcacgagttggacgatatggaagttcaaactcttcttgacggcgaatatgatgctcgtgcagcggtggtgacaatacgctctggtgcgggtggtgtggatgctgccgattttgcgcaaatgcttcttagaatgtacttgcgttgggcggaacgaaacggctacaaaactaagatgatggatacgtcttacgcagaagaagctggtattaaatccgccactttccaagttgatgccccatatgcgtatggtcgtctttccgtagaaggcggcactcacagaatggttcgtatttctccattcgacaatcaaggcaggcgtcaaactggctttagtgccgtagaagtaatcccacttgttgaagctacagatcatattgacattccagattctgacattcgtgtggatactttccaggcgtctggccctggcggacaaggcgtaaacactacgtattccgctgtgcgcatcacgcatttgccaactggtttggttgtttcaatgcaagatgagcgcagccagattcagaaccgagctgctgcaatggcggttttgcaatcgcgtttacttgtgcttaagcatgctgaggaagcagcgaaaaagaaggagcttgctggagatattaaggcaagttggggagaccaaatgcgctcatacgtgcttcacccataccagatggtgaaggatttgcgcactggctacgaaacttcgcaaactcaggctgtttttgacggcgatattgacggttttattgaagctggaattcgttggcgtcacgaacagagagttgcagctaaaaaagaggctgaggaaaagtcgcaagcttagtctgcattagataaaattcaagataaaattcaagataaaagtcagaataaaaatcaaaaataaaatataaaatagttaaaaacaaaattaaagtatatcgttcaatagttcgtaaaggaaactgcagaatatgtctctgatttcactagaacatgtgtcgaagatctatcctaagggtacgcgccctgctttggacgatatttctttagacgttaatcgtggcgacttcgtgtttcttgttggagcgtctggatctggtaaaacaactcttctaagcttgctgctgcgcgaagaggaggccactaagggcgagattcacgttgctggtaatgacttgcgacgcttagtgaatcgtcaggttccgcagtatagacgtactctcggctttattttccaggattataaactgttgaataataaaaccgtgtatcagaacgtggcttttgcactagaagttattggcacgagtcgttctacnnnnnnnnnnnnnnnnnnnnnnnnnnnnnnnnnnnnnnnnnnnnnnnnnnnnnnnnnnnnnnnnnnnnnnnnnnnnnnnnnnnnnnnnnnnnnnnnnnnnnnnnnnnnnnnnnnnnnnnnnnnnnnnnnnnnnnnnnnnnnnnnnnnnnnnnnnnnnnnnnnnnnnnnnnnnnnnnnnnnnnnnnnnnnnnnnnnnnnnnnnnnnnnnnnnnnnnnnnnnnnnnnnnnnnnnnnnnnnnnnnnnnnnnnnnnnnnnnnnnnnnnnnnnnnnnnnnnnnnnnnnnnnnnnnnnnnnnnnnnnnnnnnnnnnnnnnnnnnnnnnnnnnnnnnnnnnnnnnnnnnnnnnnnnnnnnnnnnnnnnnnnccgcatgagctttcgggtggtgaagctcagcgtgttgcaattgcgcgcgcgtacgtgaatcatccgcaaattcttctcgctgacgagcctactggtaatttggatccaactacttcgcttggcattatggaagttttggacgccattaatcgtacgggcactacaattgttatggctacgcataatgaagaaattgttaactcaatgcgcaagcgagttgtggagcttcatgctggaaaaattgtgcgagacgaacgcgaaggatcttacgattctgcgctttacttcccagacgcagatgttgagcaaaagtcgaaagctcagcaggcagttgaaggcgattcaggtgttcgtactgtggcagattcaggctctgatcacactagttttaactcgtcttctgaagatcctaaaaattacagattcatgtctaaacgcgcaaagcgtgcagctcaagcaaagcaggctatggatgctgttgcgcaaactttgcaaaatggttctgaagataatgagggtattgctcgacttgcgcaatctgttcattcaggcagaacgggtagatatggtgaagtttttcagcctttagaaacaactatgacttgggggcgtggtctttcaattccaccagctcctcccgtgcaaaagtcgaatgatgctgaagatatgaagaattcagattttgcagattctagcaactcttcggattctggcgattctcttgatttaagtgagaatcaaaaagataagaataatacagaaaatattgtcgaaaacgatattgaaaattctagcgaaaattctagcgaaaacgtcggcaatacaagcgagaatccaagcgaaactggcgattatattgaatctaaagaatccaatgaaaaaagtaaatctgaagccagtaaaagcgaaaatcttaagaacgaaggagacgagtaatgcgattgcagttcatattctcagaaacgtggatta

SEQ ID NO: 3417 - DNA, 22889 bp, synthetic construct
  misc_feature 1..22889: note = Synthetic
  source 1..22889: mol_type = other DNA
caaatgagactgatgttattccttccgaagtggatacaactactcatctaactcgcgaaatcactatgaaagttcctgcaatttctgcagcaatggacacagtaaccgagtccgatatggctattgcaatggctcgaaatggtggaattggtgttcttcatcgcaatctttctatagatgatcatgctgcgcaagtcgatattgttaagcgcagcgagtctggtatgattaccgacccactcactgttcacccagatgcaacgctcgcagatttagataaattgtgcgggcgttttcatatttctggtttgccagtggtagatagcgaaaatcgtctagttggtattattaccaatcgcgatatgcgtttcattgcttccgaagactatgatcgtttgaaagtcaaagacgtgatgactcgcgaaaatctcgtcactggtccttctaatatttctaaagaagacgcgcatcgtttgcttgcagacaacaaagttgaaaaattgcctttggttgatgcagaaggcaagcttactggtttgattactgttaaggattttgtgaagactgagcagtatccagatgctactaaggatgatcagggtcgcttgcgcgtggctgctggaattggcttccttggagatgcttggcagcgtgcgtgcgcgcttatggaggctggagttgacgtgcttgtggttgataccgcaaacggcgaggctcgattggctcttgatatgattcgcagaattaaggcagataaggcgtttgacggagtacaaattattggcggaaatattgctactcgccaaggcgctcaggctatgattgatgccggcgtcgacgctgtaaaggttggcgttggaccaggctctatttgcactacgcgcgttgttgcaggcgttggtgtgcctcagcttactgctgtttatgatgcggctcaggcttgcaaggctgctggcgttccatgcattgctgatggtggtattcactattctggcgatattgctaaggctttggtcgctggtgctgacaccgttatgctcggcggtactttggctggttgtgaggaagctcctggagagaaggttttgcttcacggcaagcagtacaagctttatcgtggcatgggttcgcttggcgcaatggctcctcgcggtaagaagtcttattcgaaggatcgttacttccaggcagacgttactagctccgacaaggtggttccagaaggcgtggaaggagaagttccatatcgcggtccacttaacgctgtgctttaccagttgcttggcggcttgcatcagtccatgttctacgttggtgcgcacaatattaaggaaatgcaagagcgcggtcgctttattcgcattacggatgctggtcttcgcgaatcgcatcctcacgatattgtgatgactgcagaagcgccaaactacagcggtttccataactaaatcgcgtggtgcgcgtggtgtgtatgtcgcgcgtattatgcgattaaatcgcgtataaatcgcaagtaattttgaaataaacggcgaaaagttagccaagttacccacaacttgcatgcttttcgtcgttttttgttttgacaagacggataaaattattatatagttagtgggatatcccactaaaaatgaggtgattttgtggaagtagtgaaagattatgacgttcgtcttgatagtaaaaagcgtgtaactctgcgcggcgctaaatatccttattacaatgttaaagaatgcgataatggttgtattttattagagccacgtgagcttactgttccaaagagtatatcttctcgaactcttaaaagtatggatgaagcaattcgcaattttaaaattggcaaagtctctgaacctgttgatctttctgacttctaggagtaagtaaatgaacttcaatattagaatgggtattccagaaatgtctaatatgtgggagagattgcggaaagagtttagagaaggaagtataagtaaaaaagatctttctctttataagaaatggggaaaatctatgaaactcttatctgaaaatccaaggcatccaggattgcatactcatgatattgaagaattgacaaatagatatggcgttaaagtctggcaatcatacttggagaataaaacaagtagtgcaatgcgaatgtattgggtttatggtccagatcatatgtcaataactattatcggtttagagcctcaccctgaagataagaaaaatggggcatattctagaatttcgctttctgatatgccagagatgtgattttagcggttagtagtctgtacgaagatgtaggctgattggttcgaaaaaatattaggaaaggaacgaaaatggcagaagctaaggaagatcttacgtttacgccggaagaatcgcgcttaatttggatcgattgtgagatgacgggactcgatattttccacgacgaattatgcgaagtgtctgtagttccaaccgattttaatttgaaagttctagacgacggtattgatttagtgattaagccaagcgatgctgctgtggctcatatgaacgattttgtgcgcaatatgcacacatcttctggtcttgttgacgagtggaataagaacggtttgcctctagaagatgcacaaaagcagattattgagtatgtaaagcgtttcctgccagaacgcggaaaagctcatcttgctggaaactccgttggctccgacaaaaagttcctcgaccgttacatgccagatttaatggcaaatctgcactatcgcgtaatagacgtaagcacgttgaaggagatttcgcgcagactttacccagatgtttgccgcaataagccggcaaaacatggcggtcaccgtgcgctcgcagatattattgagtcgattgacgagttgcgttactaccgcgatatgatgttcgtgccagctccaggaccaagcgaagcacaggcaaaagctggcgcacagcacattgagagcacgagcttgcttcgtgactatgagcgccgcggtgaagcattagaagacgtaaattccgcagaaaagcgtgattattaaacgcattaaacacattaaacgcattaaacacaatagcgcaaataaaaggtgctgccaatgaagcaatcggaagcgttagaaataataaacgcaggcgcaagcgtgttcttaacaggcgctcctgggtcgggaaaaacgtatgttttgaaccgtgctgtgcgctcaatgcgagaaaacggtttaagcgttgctgtaacggcttcaacgggcattgcagcaacgcatttgaacggccaaaccattcactcgtggagtggaacaggcgttgcaaacgcgcttaccgattcgcttcttaaaaccattagagctaggcgagggaaacgcataaaagccacggaagtgctcgtgttggacgaagtttcaatgattcacgcgtggctttttgacatggttgatgaagtatgccgtaaagtgcgcaaaaatgatttgccttttggcggacttcaagtggtggtttctggcgacttcttccagctgccgcctgttagcacgtctatgcgaaatcgcgatgtattcgagccaagccccgagtttattgcgtcgcgagaaaagtatgctgctgctggcaaaaatcccgaaggctatattacgcaatcttttgcgtgggatgctctaaagcctgttgtgtgctatttaacggagcaacataggcaagatgatggcaaacttcttagcgttttaacggatgttcgaagcggcatcgtgagtgatgaagataagcaagttcttgctagtcgacttggtgaatatcctcaagatagcgaagtttcggttcatcttttcccaacaaactcgcaagctgacggcttaaataatgtgcaacttgcggcgattgatgctgagcctcacgaatttgtagcaacggaagctgggcctaaaaatctcgtcgagcgtttaaaaaagaatatgctcgctccagaacgtcttgtgctaaaggctggcgcggctgtaatggctttgcgaaacgaccaagataagcaatatgtgaacggttctgttggacgcgtattgcgatttgcgcctgaatccaaaggtggctggccgattgttgagtttgaaaacggcaatattgttattcttaagcctgctgcgtgggagatgacggatggcgaaacggttcttgctagcgtaaatcaagtgccacttagatgtgcgtgggggattacgattcataagtcgcaaggtatgacgcttgatagtgctgttatggatttgcgccgtacttttgctcccggaatgggatatgtggcgctttctcgcgtggaaaatcttggcgggctttatttagagggcattaatgaccgcgcgtttagtgtttcggcggatgctgtgattcttgatagctctttacgtgaggcttctaaacgagctagtgagattcttgcaaacgagggcgcttgcgcgtttacaaataatgcgaatagcgcgaatggcgattctgccaatcaacaagagtttgatattttcgcctctagtgattacgcgtataatgacgaattttccttcgacgatgagttctagctttttgtagctctaatcgttgtttttagctacaaagtcgggaaaatcttccgctttttgtagctctaatcgttgtttttagctacaaagtcgggaaagtgttattgctattgtttaatagtgtaaacaagtgtttatgtcctcatgcgcaaatagattggaacgcatgaattccaatgtacttcgtatgtctcagctgttccttcgtacgctgcgcgaggatccagcagacgcggacgtaacttccgcaaaacttatgcagcgcgcaggctatattcgtaaatccgctccaggtgtgtggacttggttgccgctcggactcaaggttttaaacaaggttcaggcgattattcgcgaagaaatcaacggtatcggtgcgcaggaggtccacttcccagcgcttcttccacgtgagccttatgaggcgacaaaccgttgggaagaatacggtgacaacattttccgccttaaggatcgtcatgaggctgactatcttcttgctccaacgcacgaagaagttttcacgctccttgttaaggatatgtattcttcttacaaggatttgccagttactttgtatcagattcaaacgaagtatcgcgacgaattccgtcctcgcgcaggtcttattcgcggccgcgagtttattatgcaggatggttattcgttctcgattgacgaagatggtttgaagtctgcttatgttgaagagcgcgctgcttacgctcgaattttcgaccgtttaggcattaaatatgtgattgttcacgctgtttctggccctatgggtggttctgattctgaggaatttttggctccaatggcaattggcgaagatacttttgcgcttgctccttctggaaaagcttggaatgttgaggctttgaccacaccagaaatgcaagatgttgactgctcggcaactcctaaaatggaagctcttgatactccagatgctaagacgattgaagctttggttaaagtttctaacgatttgcatccacgcaaagacggccgcgaatggcaagcagacgacactttgaagaatctgatcattgctgttaagcatccggctgatgctgagggcggcgaacacgaggagccatggcgcgaaatcgtggctattggtattccaggtgaccgccaggtagatatgaagcgtcttgaagctcagtttgctcctgcagaaattgaagaagcaactgaggatgatttgaaggctcatcctgagtttgttaagggatacattggctttagcgtattaggtcctcaagctcgcaaagagggtagtggaattgaaaatcctgtccgctacttgatggatgctcacgttgcaaagggtagcgcttggattacaggagctgacgaagacggaaagcatgtttataacgctgtttacggccgcgattttgaggatgatggtgttgttgaagcagcccaggttcgcgatggcgatatgagcccagatggttccggtccattgagcttcgaacgcggtgttgagattggtcaggtgttccagcttggtttaaagtattctaaggctttgggcttaagcgttcttaacgaaaacggtaaagctgtaccagtttggatgggctgctatggtattggcgttagccgcgtgattgcatgcttggcagaaacgcatcacgatgatgctggtcttgcatggcctatggcgattgctccagctcaagttcacgtcgttgctacaggcaaggatcaagttgctttcgatgctgctgaaaaagttgttgaagagcttagtaagcagggaattgaagtaatcttcgacgaccgtccaaaggtttctccaggtgtgaagtttaaggatgctgagcttattggcgtgcctctgattgctgtagccggccgcgatactgtgaacaatggaacgattgaaatccgcaatcgtaacggttcaaacgttgaggcggttccagtggatgaggctgctagccgcattgtagagcgcgttcgcgaacagttgtaatcgcaatagctgttaacaactaatcagcgattaagcaattaaacgactaagcaatattgccgttggtgtaatgctttgcatattatacgcattattttcagcggcaatattgttatgaatagtaaaaaattatataaattattagaataggatgttcatgagttttaatgtttaattctattaaaactttttaaaaatcattcgcacctccttcaatatcgtcatagtggttttcttcgacttgtgagccgaaatctattgtttcttttgctgaagattcagcatcataatggtattcttggctgtcgttttcttgcgaagaatccatagaataagtattagccatagggtttttcatcgccaagctcaaatcttgattggaataagtatcttgatttgcccgattttcttggtttatttgattagtgtgatatttactattgttactctgatcggttcttccacgattataagagtatttagtaaaagcactgattcctcgatttaggtcgtgtccaattgcggttgcttctagtacaactcgagatcggtcttctccatctttgtgccaggattccgtgtttaaatttccgcacacgactatcgcgtctcccttatgcacgctttttagcacatttgcagctaaagacttgtatgcttttactgtcatccaagttgtcggtctatctttccactgtctttcctcgctatgatagtaagacgttgtgcttcctattctaagtgagcatgctggtgagttttcgttgcgactaaagttcacagggtcactccctacatagccgctgattgttagtgttgcttgttgttgtgccatattcttaacctttcaaaagtttggactgcgactaatttaaatctcaaaattcatcacgcaacacgtgttgattattgtgattttcaataaattcgccgcagtagaatcaactatgaagtatcaaaaatagttttgcaagatatttttatcaatgtggttaaagcctatgctttatacacatcgtttaaaaactcttgacaaaatatataaaactgagtaagcgagtctaaaatgtgtaaaatatatgtagattgatatacttagcgaaagtagtttttgtttttcattagcattggaaggtgaagcttgagttttttgcctacttgtttgtgttatttgaatcagggattactgaaaagtagttattaatcacgtggagagaggtctacatttatgtggcataagtcgcacgtattttctgcaaagaaatgtttagctgctgcggcatcagctgttgcttgcgtagcaatgattggatctactgccgtatctgctagtgctttggttatagtgcaaaatcacagtgttgctaatgttaatactaattggcaagttaagaatcagtcggttgcaagctacattttaggtgcaattcgtgatgtgcgttcaaagtattatgacgatggcgttacccttatgaacggtatgactcttgcagattatgttacttctaagggtcttacaaaagaacagtatattaatgatattcgctacgatcgtgctaatgaagaggatgcttatcgtcgtgcaaatgagactgttcagcatggaaaacttggacattttgctgcggatggtgtgagccttccaaactacgatggtcgtaaggcttggggcgaaaacattgcttggggtgaaagctcagaagaatctatgtcggattggactgctggagaggaatctgcgttacaccaatctaatggtgctgaaactacttacaatgctcatctttaccagattttgaatccagaaaacatttccttcggatatggtgaagtagctggtacctcatacggaagagtatctgttttaactctttcaactcaggttggagacactgactacccacaaggcaagttaggtgttgctcctcaccttgattttgcttggattatccgtaataacgatattgctgttggtgcaaatgcttacaccgacaagcagcttgagtatcgttggctttcctacaatttgaatactcagcagtgggctactattgctgattggggtactggaaactgggcttcttgggttacaaagccaggtgactattggttgcattgcgaagtacgcgatccttctaataagaaagttattttagaaaagacaattgctttccactacacagttccaagccaaacagttattactggaacttatgctggttggcaaggcaatagtgttcttcttggtgcatccactaataatcctaatggctctaccaagattaagatttatgattacaatgctaagcagtgggttgaaggatacgatggcccttgggctttgtggagcccacgcccaggcatttactggactcatttcgaagcttacgatgagaatggtaatttgtcggatgttaagacctacgcctttggcgtgtgaatctgattagtaaatctgattagtatcatttaaaaagcctgcaaacgttttaaacgcttgcaggcttttgtttacttatttactttatttgttttgacatgcgattcaccaaatgtgcacgcggttagcagggtcgagccacatctcgtcgccgtctttaacgtcgaaagcatcgtagaacaagtcaacgttgcgtgcaatgccattagtgcggcactctcgttattaagttaatgctatgccatagatatttattacgcgaaaatctatagatatttattttatttatataaataattgattatgattttatatatggaaggcaatatttcttatgctatcggcattgacgtcggtttaaattcagtaggtcttgctgcaattcgcttagatgataatggggagcctataagaatacttaaagtaataagtgttattcacgatgctggtattgatccaaatggggcaaaagaatctgatacgcgtaaagcaatttctggtgtcgcgcggcgtgtgcgcaggttatatcgtcagcgcagacgtcgtttgcagaaacttgattttctattacaatcattgggttggccggttgttgaaaacaaggatttagagttttctaattcgtttattccatggatttttcgtgcaaaacttgctgatgaatatattgaggatgaagaacaacgtaaacaaatgttaagcgttgcaattcgtcatattgctagacatcgtggttggcgcaatccttatcagtcaataaaatcaatgatgcaagagactgagtattctgaattttacaatgagttgctaaaaaatattgaaaagtttgcgccaggagtaggttgtgaaggttctacgcctgcgcaattagtacgcgattatcttttataacaacaaggtaaaccctcacgtcgtttacgtataactacagacgataaaaagaaaaatcatcccaactcattagatcctgttttaccacgtaagctaatgcaaagtgacagcatgcttgagattctcaatattttcaatgtgcaacatattgatgacaagtatgttagagagcagattattaatgctgttttttatgagaaatctccgcgtggctctgcagaaaatcgtgttggcaaagatgctataacaggaaagggtaagcgtgcgctaaaggcatcgttagcgtttcagaaatatcgaatcatatctactatttctaatcttagcataagagaaaattcaaaagaacgttgtttaacaatagaagaaaaacagaatgtttataaattattaacaacttcgactgatgagtcatcaaaaaagaaaagcgctgaagtaccattatacacttggattgatgtagctgattgcctcggaattgaacgctataagttgcgtggagtaggatcacaaataggagatggagaatctgttggtaatcgtcctccaatgttgaatagtgagttagctattatttatgcgaataataaatctttaagacaatcgttgctcacgtggtggttagatgctaatcgtacgcaagaagataaagaagctcttattgagatattgagcaacacggtagacatagaagcaattcatgataatcctgaatatcaagataagtacggttcagcaatagcatttattgattcaatggatgaaacagaaattgcggcattggaaaatatttcattgcctaatggtcgtgctgcttatagtttggaaacattagataaactcaataagcaaatgcttgaaactgatgatgatctatttaaagcgcgcaaaaagttatttaatttaccaaataattggcgtccatctgaagctcctattgcagagccaacaggtaatccttcagttgatcgagtattgaaaattgtgcatcgattccttataagtgctaaaaatcgttggggtaatcctgtacgtattaatattgagcatgttcgttctggattccaatctaaaaaaatggcgaattcatataaggaattattagataaacgaaccaaaggtaaagaaaatcttaaagcaatgatgcggaattctttgcatttaggcatgagtgattctatttcagatgcagatatacgccgttatgaggctgttcaacgtcagaatgggcaatgtttgtattgtggctatgagattacttatcatacatgtgagctagaccatattgttccgcgtaaggggccaggttctacgaatactcgtgagaatttagttgctacttgcttatcgtgtaacgctcaaaagtgtaatactccttttgcaacttggtgcgagcagtctacatattgcaagaatcatgatattagtgtagattccgctattaatcgggttcgtgcttttattttcccgcctaaatcatacgataaacgcggtgctaatcaattcaaaaaagaagttatatctcgcttgaaacaaaaagttggtgatgaagcgtttgataatcgttctatcgaatcggttgcatggatggcaaacgaattgcatcgtagaattgattggtattataactcgcagaattatcaaacaaacaatggtatttccgatataagtaataaagctcaaacaaatgttggagtttatgctggatcgcttactgctatagcaagaagaatgtctggaattgacggaaaactggagttctttgatggtagaaggaaaactcgttttgatagacgacatcatgcagttgatgcatcagtaattgcaatgatgactccaggaatggctcgaatacttgcaattaaatgcaatctgcgtgaaacacagttattgcaaggcaataaagtggttcctggtggtattgattggagagaatatccaacggctaatgatcaaggatatcagcaatatgctaattggtctgttcgtatgaatgcgttattgaaacttcttaatgaagaaatgagagctgatcgtattgctgtggttaattctattcgtttgagatacagtaattcttctgttcacaaagatgatgtacatgcattattaaagttgcacgtcggcgatgaaatcgacagtgaaacaatccgacgtgcttctactcctgcgctttattgtgcgttgacacggaatcctgattatgatgtaaacaatggtcttcctgaaaatccagatagaactattctgttgcataataagaagttaaatgcatacgattcaattacttttttcaaggcacaagcagcacagcttttcgtacgagaaggttctgtagagattggtaattctatccatcatctacgcatttatgaatactttgaaaagttgaaaagtggaaaaattaaaaaatcttatggaatgattcgtgtatttcaaaatgatttgcataaacatattcatgaagatttattctcgtgtgatttgcctgaacaatctatctcaatgagatatgctgatacagaagtcactcatgctgtgcaaacaggtaatgctaattatctcggatatcttgtgcctggcgatgagattatcgttgattttagtcatgctaaattatcaggatatattggtgactttgtagaattcctaaacaagataggtgcagattgtacagcatataagcattgggtggttgtgggtacggacgataaaacaactttgatacttaaaccatcgatgatttcttctgaaggaattgacaagttgtattcgaattgcaagcgcaataacttcgattatacttcttatgaagaatctattaataagattctagctggtaaaggttggcgtgtttcggttaatgtgttggccaagtataacgtagcaactattcgacgtaatgcgttaggtgaagttcgttgggtatcacgttcgcatttacctatttcttggcgttgggatactggagaaaatagagaatagaggaattatgcagaatgcttggcgtgtgattgattgtactaatttacaaggtgaattacggtatattcgcggtaggattttagtgtgtgatcacgcattagagcagaaagttgaaattccgctagcggaaacggcaatattgcttattggtttgcattgtaactgttctgcaggtctgcttcatcagtgtgctgaatatggtacttgcgtaatgacctgtgattggcgatgtgttcctatcagtgctatgcattcgtggaccaatgttcctacgagaattacggttcgtcaattgtctcaggcaacaatgagtgtgcctcgaagaaaagcagcgtgggctcagattgttcgcgcgaaaatacgtggacaagcagcttgtcttgatttattaaataaagaagggggtggattattacgcggactatctaatactgttcgttctggagatgtaacgaatagagaaggccaagctgctcgtgaatattggaaacgtatttttcccgaggaagaagattttcatcgtaaaccagggtctggtcaagataggaatgctttacttgactatgcttatatggtgttgcgtggtttttccattcgtgcagttttatctgctggtcttaatccaacaatgggtatgaatcatcataatggtactaattatttctgcttagcagatgacataattgagccgtttagaccagctgttgattacgctgtttcaaaattatcattctcagatactccaaatgataaagcagttaaaaagtatttgatcgacagtgttaatcaacagtttaatggttctggacatacaattcctagcgctttatctgatttagctcaatcatatggtatttatgtggaaaaagacatggaagactttcgagtaccacaatttgtaaggagtgaattatgaaagtcgatgaggacagtggtggcatgtggtgtttagtaatgtttgatttaccagtgaaaacaaaagtagagcgtcacgctgcaactgtatttcgcaatatgctgcttgatatggggtatgcaatggtacaattttctgtgtatgtccgttatagccccactcaaacaggaaatagaacttcagtaaaaataattaaggataatcttcctccacgtggatcaatacgcattttacatgtcagtgatcatcaatggtcatctgcacaacgttattacaatgccaggcaagaaaagaaagaggaggctcccgatattgctatgcttttttaatcataaaatgtcttataatggtagaagctaattttcaacttgttgagcgtcctgtttatgatgctggcaattatatcaagaatggtagaagctaattttcaactagcgtgtgtggtggttttgatggttctcaattatatcaagaatggtagaagctaattttcaacccagccaggcaacggctcaaaactagatcaattatatcaagaatggtagaagctaattttcaactgacgtagatactaccccgctcgtgtctcaattatatcaagaatggtagaagctaattttcaacgcggaagcagaatattttgtgaacactgcaattatatcaagaatggtagaagctaattttcaacaaataaataaaaacggggaagctagaaagcttcccctgcagtgataatcatcaaaactgctgagcaatcaaactggataacaagtccagtcttattgaaaattagcacttcaaatatatcatttttaagaaacaaaagacaagtgaatttttttaagttttgttaaaagatttgaaaagttaacatatcgatatattcaatgaatgacacagttggagatattactattattatgtttaacatatatgcgttttttaaaaagtgcattcttagaatgtatgtatgtacatagatagcatccatatattcacaatgggaacgttgctaatgcagcgttcccattatgttttttataatatgcgactttatatgcgatttaccaaatgtgtacgcgctcgcttggagcaagccacatctcgtcgccgtctttaacgtcgaaagcatcgtagaacaagtcaacgttgcgcgcaatgccattagtgcgacattctgcaggggagtgtgggtcgatttgaaggtattgctccgcaatcttgttacgagcctttgaacgccacacaagtgcgtagcttaagaagaatcgttgcaaagcagtgaaaccatcaatcttaggagcgttcagcaaagtttcgcgaatcgcatcgtcacttccgtcgacttcttgtcccttgctcttttgcaaagcaaaagcgtaggctttaagagcaatagttacgccgcttaaatcaccaatgttttcgccgattgttaaagcaccatttacgtgaggcattgcatcgcgctcttccttgctctttaagtgagagtatttaacaataagctgcgttggtgtaaaagcattgtattgctcaataagcgttttagtgcgctcagtgaagttggttttgtcttcttcagtccaccaattgttaagcacgccgtcgccatcatattcgcaaccttgatcgtcaaaaccgtggccgatttcgtggccaattactgcaccaatagcaccgtagtttgctgcgtctggagcactagagctaaagaatggcggctgcaaaatcgcagctgggaacactattacgttaagcagcggatcgtagtaagcgtttacggtttgcggagtcatctgccactcttcgcgatccacaggttctccagcttttgcagtatacctaccaaacacgaatcgagaaacttcgcgcatattctcaattaagccagcgtcttccttaatatttagcgcagagtagtcaatccaatgatttgtgtaaccaatatttggctcaaacttgctaagcttttccaaagccttcgccttagtctcctcgccaagccagctgctgtgagaaatcgactcgcggtaagcgttaataagattgtcaactaagccttccatatactttttagaagactcagggaagtgcaagcgcacgtattctttaccgacttcctcgccgcaagcatcgtcaacaactccgattgcgcgcttccagcggtcgcgtggcttggtggcgccagaaagcactttgccgtagaagtcgaatcgcgcttgtgcaaagtcctcgcttaacatgcttgcccagcacaaaatcacatgcacgcgtgcccaaagctttagatcttctaagtcggcttcttgccaaatcttattcaatccttctataaagcttggctcgtgaactactactttgctaaaagctttacgaaaatctattggctgattctttgcttcttcggaatcgtcgtaagatttttgagcagcatccaagaatgcgtcaagattcagcgcttcaagcgtttttgccaaatccgcataatcgtaaggattataagttttttgagaatcgcgtgttgctacgttatcccagtggttgcttgcgatttgtgtttcaaccttcaagaaacgttccgattgctctcttgtagtagtggcatcaccgtatccagctaagcgcaacaatgaagccaccatttttacgtattcagcgcgaatcggagcgtaattatcttcgcgatagtatgcttcgtctggcaagcccaatccagcctgctcaatgtgcataatattcgtcttagggtctttagggtctccgtagacgccaaaagcaaacattgcattaggtccgccatatggagtaagagaagcaatagtgcgaactaagtcttctttgctgctagctgcatcaacagcgtctaaatcgctcttaattggcgtaattccagctttttcaatagatgcagtatctaaatagttgcggtataggattcgcgactttttggctgggcaatcttcgttttctaaaatatctcgaatttgcgtctctgcatcttctgcaagcttgtagaaagcaccatacattggcttatcttctggaagagtgtaagtgtcaatccaaggaccgtttacgtaacggaataaatcgtcttgtggtcgagtaaccgatgagaaggaagctgggtcaaaatttacagcagaaatttccttctgcgattcctcattgttgttattattttcattgttattaggcatgtgcctagattacaagtattaagcgacatcattagctagtattttcgccatattttgcgctattttcgtgcctgcgagttagtcttaaatcatgattgaacttaaaactccatccgaaattgaagctatgaagcctgcaggtcgcttcgttggtagtattcttaaagacttgaaagcaatgacaaaagttggcacaaatcttcttgagattgatgactttgttcgccaacgcattatgagccgtaaaggtgcgtcttcttgctatgttgactacgctcctgattttggaactggtccttttgctcactacatttgcacttctgtaaacgatgctgttcttcacggagttccttttgattacaaccttaaagacggcgatttactaacgcttgacttagcgattaacgttgacggatgggttggagattctgctattagtttcgtggttgggaagcatgcggatcctgaagatttgcgcttaattaagtgcactgaggaagcacttgaggctggaattaacatggctcagcctggaaaccgccttggagacatttctgcagctgttggatgcgttgctcacgagtatggttacagcgtaaaccttgagtttggcggtcacggagttggccatattatgcatggcgatccgcacgttcctaacgatggcactgcgcatcacggctacaagcttcgcccaggcttggttattgctattgagccgtggttcttaaagactactgacgagatttatcaagatccaaaagacggttggactcttcgatctgctgacggttcgcgtggcgctcatagcgagcatacgattgcaattacagagaatggtccagagattttgaccgtacgctaaacttcgaatagtaagtgcgtaaaacgaataatataaaatataaagaggtactttaaataaatggcggaatttgattttgcccaagcgttaaatgatgttgaagcaaagtattctttgatttctaaggctttagacgttaattcgttgaagactgctattgcagatttagaaaagcaggcttcggagcctggactttgggatgattctgatcacgctcagcaagttacgagtaagctttcggcagctcagtctcaattaaagcgtttacaagccgttgagcaacgcattgaagatactaagactttgattgaacttggtcaggaagaagaggatgctgattctatgagcgaggctcaagaggagcttggctctattgctcacgagttggacgatatggaagttcaaactcttcttgacggcgaatatgatgctcgtgcagcggtggtgacaatacgctctggtgcgggtggtgtggatgctgccgattttgcgcaaatgcttcttagaatgtacttgcgttgggcggaacgaaacggctacaaaactaagatgatggatacgtcttacgcagaagaagctggtattaaatccgccactttccaagttgatgccccatatgcgtatggtcgtctttccgtagaaggcggcactcacagaatggttcgtatttctccattcgacaatcaaggcaggcgtcaaactggctttagtgccgtagaagtaatcccacttgttgaagctacagatcatattgacattccagattctgacattcgtgtggatactttccaggcgtctggccctggcggacaaggcgtaaacactacgtattccgctgtgcgcatcacgcatttgccaactggtttggttgtttcaatgcaagatgagcgcagccagattcagaaccgagctgctgcaatggcggttttgcaatcgcgtttacttgtgcttaagcatgctgaggaagcagcgaaaaagaaggagcttgctggagatattaaggcaagttggggagaccaaatgcgctcatacgtgcttcacccataccagatggtgaaggatttgcgcactggctacgaaacttcgcaaactcaggctgtttttgacggcgatattgacggttttattgaagctggaattcgttggcgtcacgaacagagagttgcagctaaaaaagaggctgaggaaaagtcgcaagcttagtctgcattagataaaattcaagataaaattcaagataaaagtcagaataaaaatcaaaaataaaatataaaatagttaaaaacaaaattaaagtatatcgttcaatagttcgtaaaggaaactgcagaatatgtctctgatttcactagaacatgtgtcgaagatctatcctaagggtacgcgccctgctttggacgatatttctttagacgttaatcgtggcgacttcgtgtttcttgttggagcgtctggatctggtaaaacaactcttctaagcttgctgctgcgcgaagaggaggccactaagggcgagattcacgttgctggtaatgacttgcgacgcttagtgaatcgtcaggttccgcagtatagacgtactctcggctttattttccaggattataaactgttgaataataaaaccgtgtatcagaacgtggcttttgcactagaagttattggcacgagtcgttctactattaagtcgcttgttccgcgtgtgcttgaaacggttggcttaactggtaaggaaaataattatccgcatgagctttcgggtggtgaagctcagcgtgttgcaattgcgcgcgcgtacgtgaatcatccgcaaattcttctcgctgacgagcctactggtaatttggatccaactacttcgcttggcattatggaagttttggacgccattaatcgtacgggcactacaattgttatggctacgcataatgaagaaattgttaactcaatgcgcaagcgagttgtggagcttcatgctggaaaaattgtgcgagacgaacgcgaaggctcttatgattctgcgctttacttcccagacgcagatgttgagcaaaagtcgaaagctcagcaggcagttgaaggcgattcaggtgttcgtactgtggcagattcaggctctgatcacactagttttaactcgtcttctgaagatcctaaaaattacagattcatgtctaaacgcgcaaagcgtgcagctcaagcaaagcaggctatggatgctgttgcgcaaactttgcaaaatggttctgaagataatgagggtattgctcgacttgcgcaatctgttcattcaggcagaacgggtagatatggtgaagtttttcagcctttagaaacaactatgacttgggggcgtggtctttcaattccaccagctcctcccgtgcaaaagtcgaatgatgctgaagatatgaagaattcagattttgcagattctagcaactcttcggattctggcgattctcttgatttaagtgagaatcaaaaagataagaataatacagaaaatattgtcgaaaacgatattgaaaattctagcgaaaattctggcgaaaacgtcggcaatacaagcgagaatccaagcgaaactggcgattatattgaatctaaagaatccaatgaaaaaagtaaatctgaagccagtaaaagcgaaaatcttaagaacgaaggagacgagtaatgcgattgcagttcatattctcagaaacgtggattagcttgcgcagaaacgtttctatgattgtttcggtaatgctcgttaccttcatatcgttcttgtttataggcgcatctgttcttatgcaagcgcaaatcacaaaagccaaaggcgattggtatgacaaggtagaagttgtagcatggctttgcccagacggtacaagtcagtcagcatcctgtgcttctggaaaagctcctactaaagaagaaattgtaaaattggaaaacattattaaccaagagttaggtgatgatgtttcgaatatcacttatgttagtagaagcgaattttacaagaatacttttcttaagcaatatcctaatggcttatatcaggggcgtactttaacagctgctgatatgcaagattctttgcgactaaagctcacaaatccaaccaaataccaggttgtttcagaagttctttctggcagaaatggtgttgaggaagtagtagaccaaagacaaatttttgacccagtgtttagcgttttgaatcatgccacggctgttacaatcgtgcttgctgcagttatggttgttgttgcgattatgctaaccggtacaactattcgtatgtctgcagcatctagaaaacaagagacggagattatgcgacttgtgggcgcgtctaattggacaattcgcatgccatttattttagaaggtgcttttgcgtcccttatgggctctctgctatctgggtgcgcgctaagcgttgttgttaaagtgtttattacagattggcttgcacaaaacgttcgttggatgccatttgtaaatcaaacaactgtttggatgacagttccagtgctggttcttggagccgtgctactttcaatagtcgcctccgcggttgcactcagaagatatctgcaagcgtaaacataaaagaaaaatttaaattatcaataaattatgaacattaatagatcataaataaaaaatcataaataaaaaaattttatcgataatagaattttcaatgtataattcgcattagttgtgtttgaattattctacttgaaagggaagtaaatatggaaagcaagaaatgccatgcaaaatattgtaagcgcactgttgcaagcgcgattgcaagcagctttcttatgctttctgccggtattaccttatatgcttgccagccactacgcgctgatgcagttaccatgcaagattacaacaggaaagttcaaagtaatgccgctcttaaaaagcgtcttgctggagtaaataaacagcttgctgataagatcctagagctcaatgatttaaacgaacatcaaatccctaatcaagtccgtgctgctcagcaagctcaggagcaagcgcaacaagctatgggccttgttgaatcaacaaatcagcgtttgcagtctgcgcaaaaagacaaactcgatttagaagaaaaaatcaagcagactggcgaagattttgatgatgcaaaggctgctgtagctcaacttgctcgcaaaagtttccatggctccaatgcctctaacgtaatggcaatggtgactaactccactactaccgagcagtttgttggaaaacttcagtcagaagctgctgttgcacgtagcgaagcaaatgctgcaaatgatgctgctgttactttgagtaattctatgaatagacgtcagcgcttagctgctattgaaacagagattcaaaaattaaaagcaaaagctgattctgaggcgcagagtgctcaggctgcggctaaggctgccagtgaaaagcagcgttctcttcagtctttaagagatcagggaactattctaagaaagcagttagagagtcaaaagaatagtcttacttctcaagatgctcgcgaagctgctgaaataattgctttgaagtcacagattgacgctcaagctagggctttagctgctacggctgcagctcgcatgaatcctaataatggtaatcgtcaacaacttagaggcggcggcagttggaatactccttccttgcctgcattaccgctttctaatggtgctgcaaatggtatgaattacgcggttcctgggaattgtcctgctggttctggcaattgctatggtcataatactggtaacacagctggaggttctgcctatccagctcgccaatgcacactttgggcgtatttgcgcagatcacagcttggtcttccagtaggatcctttatgggcaacggtgctgattgggcgaattctgggcgtagacttgggtatcttgtaaatcgcacaccgcatgttggtgctgttatggtatttgctagaggagctgctggatcagatcctacat

SEQ ID NO: 3418 - DNA, 13295 bp, synthetic construct
  misc_feature 1..13295: note = Synthetic
  source 1..13295: mol_type = other DNA
atgcggctcaggcttgcaaggctgctggcgttccatgcattgctgatggtggtattcactattctggcgatattgctaaggctttggtcgctggtgctgacaccgttatgctcggcggtactttggctggttgtgaggaagctcctggagagaaggttttgcttcacggcaagcagtacaagctttatcgtggcatgggttcgcttggcgcaatggctcctcgcggtaagaagtcttattcgaaggatcgttacttccaggcagacgttactagctccgacaaggtggttccagaaggcgtggaaggagaagttccatatcgcggtccacttaacgctgtgctttaccagttgcttggcggcttgcatcagtccatgttctacgttggtgcgcacaatattaaggaaatgcaagagcgcggtcgctttattcgcattacggatgctggtcttcgcgaatcgcatcctcacgatatcgtgatgactgcagaagcgccaaactacagcggtttccacaactaaatcgcaagttgtgtaagttgcgtaagttgcgtaagttgtgcgtataagtcgcaactattttaaacggcgaaaagttaatcaagtttcccacaacttgcatgcttttcgtcgtttttgttttgacaattcgtataaaattattatatagttagtgggatatcccactaaaaacgaggtgattttgtggaagtagtgaaagattatgacgttcgtcttgatagtaaaaagcgtgtaactctgcgcggcgctaaatatccttattacaatgttaaagaatgtgataatggttgtattttattagaacctcgtgagcttactattcctaagagtatctcttctaaaactcttaaaagtatggatgaagcaatccgcaattttaagattggcaaagtctctgaacctgttgatctttctgacttctaggagtaagtgaatgaacttcaatattagaatgggtattccagagatgtctaatatttgggagagattgaagaaagagtttctagaaggcagtataagtaaaaaagatctttctctttataagaaatggggaaaatctatgaaacttttatctgaaaatccaaggcatccaggattgcatactcatgatattgaagaattgacaaatagatatggtgttagagtttggcaatcctacttggagaataaaacaagtagtgcaatgagaatgtattgggtttatggtccagatcatatgtcaataactattatcggtttagagcctcaccctgaagataagaaaaatggatcatattctagaatttcactttctgatatgccagagatgtgattttagctgttagtcgtcgctgggaagatgtaggctgatgggttcgaaaaaatattaggaaaggaacgaaaatggctgaagctaaggaagatcttacgtttacgccggaagaatcgcgcttaatttggattgattgcgagatgacaggtctcgatattttccacgacgaattatgcgaagtatctgtagttccaactgattttaatttgaaagttttggacgacggaattgatttagtgattaagccgagcgatgctgctgtggctcatatgaacgatttcgtacgcaatatgcacacttcttccggacttgttgacgaatggaataaaaacggtttgcctttggaagaagcgcaaaagcaggtagttgagtacgtaaagcgttttttgccggcttgcggaaaagcgcatcttgcaggcaactccgttggctccgacaaaaagttcctcgaccgttacatgccagatttaatggcaaatctgcactatcgcgtaatagacgtaagcacgttgaaggagatttcgcgcagactttacccagatgtttaccgcaataagccggcaaaacatggcggtcaccgtgcgctcgcagatattattgagtcgattgacgagttgcgttactaccgcgatatgatgttcgtgccagctccaggaccaagcgaagcacaggcaaaagctggcgcacagcacattgagagcacgagcttgcttcgtgactatgagcgccgcggtgaagcattagaagacgtaaattccgcagaaaagcgcgactattaaacaaagcgcgactactaaacgcaataaaaggtactgccaatgaagcaatccgaagccctaaccataatcaacgctggtgcaagcgttttcattaccggcgctccgggtgcaggtaaaacctacgtattaaacgaagctattcgcgcaatgcgaaaaaacggtttaagcgtggctgtaacggcttctaccggaatcgcagcaacgcatttaaacggtcaaaccattcactcgtggagtggagttggagtttcaaacgcgcttagcgattcgcttcttaaaaccattagagctaggcgagggaaacgcataaaagccacggaagtgctcgtgttggacgaagtttcaatgattcacgcgtggctttttgacatggttgatgaagtatgccgtaaagtgcgcaaaaactctgctcccttcggcggacttcaagtagttatttcgggagatttcttccagctgcctcctgtgagtgcttctatgcgaaatcgcgatgtgttcgagccaagtccagagtttattgagtcgcgcgaaaagtatgctgctgctggcaagaatccagaaggctatattacggaatctttcgcctgggatgctttaaagcctgttgtgtgctatttaactgagcaacatcgtcaggatgacggcaaattgcttgaagttttgacggatattcgtggcggtcttgtaagcgacgaagataagcaagtgcttgccagtcgcctcggtgagtatccgcaaggcgatgaagtttcggttcatcttttccctacgaactcacaggcagatggcttaaataatgtgcagcttgcggcaattgatgctgagcctcacgaatttgtggcaacagaagccggccctaaaaatctcgtcgagcgtttaaaaaagaatatgcttgctccggaacggcttgtactaaaggctggagctgcagtgatggcgttgcgaaatgatcaagataagcaatatgtgaatggctctgttgggcgagttttgagattcgcacctgaatctaaaggtggatggccgattgttgagtttgaaaacggcaatattgtcactcttaagccggctgcttgggaaatgacggatggtgagactgttcttgctagcgtaaatcaagtgccacttagatgcgcgtggggaattacgattcataaatcgcaaggtatgacgcttgacagtgcggtaatggatttgcgtagaacttttgctcccggaatgggatatgtggcgctttctcgcgtggaaaatcttggcgggctttatttggaaggtattaacgatcgcgcgtttagtgtttcggcggatgctgtactgttagacggattcttgcgtgaggcttctaaacgcgcgagtgagttgcttgctaacgacggtgctgctgctttcgtaacaaataatgcggaagatgattctgcaaatcagcaagagtttgatattttcgcctctagtgattacgcgtataatgacgaattttccttcgacgatgagttctagctttttgtagctctaatcgttgtttttagctacaaagtcgggaaaatcttccgctttttgtagctctaatcgtcgttttaagctacaaagtcgggaaagtgttattgctattgtttaatagtgtaaacaagtgtttatgtcctcatgcgcaaatagattggaacgcatgaattccaatgtacttcgtatgtctcagctgttccttcgtacgctgcgcgaggatccagcagacgcggacgtaacttccgcaaaacttatgcagcgcgcaggctatattcgtaaatctgccccaggtgtgtggacttggttgccgcttggactcaaggttttaaacaaggttcaagcgattattcgtgaagaaatcaacggtatcggtgcgcaggaggtccacttcccagcgcttcttccacgcgagccatacgaggctacaaaccgttgggaagagtacggcgacaatattttccgccttaaagatcgccatgaggctgactatcttcttgctccaacgcacgaagaagtctttactcttcttgtaaaagatatgtattcttcttacaaggatttgccagttactttgtatcagattcaaacgaagtatcgcgatgaattccgtcctcgtgcaggtcttattcgcggacgcgagtttattatgcaagacgcttactcgttctcgattgacgaagatggtttgaagtccgcttatgttgaagagcgcgctgcttacgctcgaatttttgaccgtttaggcattaaatatgtgattgttcacgctgtttctggccctatgggcggatcggattctgaggaattcttggctccaatgccaattggtgaagatacttttgcgctcgctccttctggaaaagcttggaatgttgaggctttgaccacaccagaaatgcaagatgttgactgctcggcaactcctaaaatggagactcttgatactccagatgctaagacgattgaggctttggttaaggtttctaacgatttgcatacacgcaaagacggccgcgaatggcaagcaagcgatactttgaagaatctgatcattgctgttaagcatccggctgatgctgagggtggtgagcacgaggagccatggcgcgaaatcgtggctattggtattccaggtgaccgccaggtagatatgaagcgtcttgaagctcagtttgctcctgcagaaattgaagaagcaactgaggatgatttgaaggctcatcctgagtttgttaagggctacattggctttagcgtattaggtcctcaagctcgcaaagatggtagtggaattgaaaatcctgtccgctacttgatggatgctcacgttgtaaagggcagcgcctgggttacaggagccgacgaagacggaaagcatgtttacaacgctgtttacggccgcgattttgaggctgatggtgttgttgaagcagcccaggttcgcgatggcgatatgagcccagatggttccggtccattgagcttcgaacgcggtgttgagattggtcaggtgttccagcttggtttaaagtattctaaggctttgggcttaagcgttcttaacgaaaatggtaaagctgtaccagtttggatgggctgttacggtattggcgttagccgcgtgattgcatgcttggcagaaacgcatcacgatgatgctggtcttgcatggcctatggcgattgctccagctcaagttcacgtcgttgctacaggcaaggatcaagttgctttcgatgctgctgagaaggttgttgaagagcttagtaagcagggaatcgaagtaatcttcgacgatcgtccaaaggtttctccaggcgtgaagtttaaggatgctgagcttgttggtgtgccgctgattgctgtagccggccgcgatactgtgaacaatggaacgattgaaatccgcgatcgcaacggttcaaacgttgaggcaattccagtggatgaggctgctgctcgaattgtagagcgcgttcgtgaacagttgtaatcgcaataactgttaacaacgaatcagcgattaagcaattaaactattaaacaattaaacgactaagcaatattgccgttggtgtaatgctttgtatattatacgcattattttcagcggcaatattgctatgaatagtaaaaaattatctaaattattagaatagaatgttcataagttttaatgtttaattctattaaaactttctaaaaatcatttacacctccttcaatatcgtcatattggttttcttcgacttgtgagacgaaatctattgtttcttttgctgaagattcagcatcataatggtattcttggctgtcgttttcttgcgaagaatccatagaataagtattagccatagggtttttcatcgccaagctcaaatcttgattggaataagtatcttgatttgcccgattttcttggtttatttgattagtgtgatatttactattgttactctgatcggttcttccacgattataagagtatttagtaaaagcactaattcctcgatttaggtcgtgtccaattgcggtggcttctagtacaactcgagaccggtcttctccatctttgtgccaggattccgtgtttaaatttccgcacacgactatcgcatctcccttatgcacgctttttagcacatttgcagctaaagacttgtatgcttttactgtcatccaagttgtcggtctatctttccactgtctttcctcgctatggtagtaagacgttgtgcttcctattctaagtgagcatgctggtgagttttcgttgcgactaaagttcacagggtcactacctacatagccgctgattgttagtgttgcttgttgttgtgccatattcttaacctttcaaaagtttggactgcgactaatttaaatctcaaaattcatcacgcaacacgtgttgattattgtgattttcaataaattcgccgcagtagaatcaactatgaagtatcaaaaatagttttgcaagttatttttatcaatgtggttaaagcctatgctttatgcacatcgtttaaaaactcttgacaaaatatgtaaaattgagtaggcgagtctaaaatgtgtaaaatatatgtagattgatatacttagcgaaagtagtttttgtttttcattagcattggaaggtgaagcttgagttttttgcctacttgtttgtgttatttgaatcagggattactgaaaagtagttattaatcacgtggagagaggtctacatttatgtggcataagtcgcacgtattttctgcaaagaaatgtttagctgctgcggcatcagctgttgcttgcgtagcaatgattggatctactgccgtatctgctagtgctttggttatagtgcaaaatcacagtgttgctaatgttaatactaattggcaagttaagaatcagtcggctgcaagctacattttaggtgcaattcgtgatgtgcgttcaaagtattatgacgatggcgttacccttatgaacggtatgactcttgcagattatgttacttctaagggtcttacaaaagaacagtatattaatgatattcgctacgatcgtgctaatgaagaggatgcttatcgtcgtgcaaatgagactgttcagcatggaaaacttggacattttgctgcggatggtgtgagccttccaaactacgatggtcgtaaggcttggggcgaaaacattgcttggggtgaaagctcagaagaatctatgtcggattggaccgctggagaggagtctgcgttacaccaatctaatggtgctgaaactacttacaatgctcatctttaccagattttgaatccagaaaacatttccttcggatatggtgaagtagctggtacctcatacggaagagtatctgttttaactctttcaactcaggttggagacactgactacccacaaggcaagttaggtgttgctcctcaccttgattttgcttggattatccgtaataacgatattgctgttggtgcaaatgcttacaccgacaagcagcttgagtatcgttggctttcttacaatttgaatactcagcagtgggctactattgctgattggggtactggaaactgggcttcttgggttacaaagccaggtgactattggctgcattgtgaagctcgtgatccttctactaagaaagttattttagaaaagacaattgctttccactacacagttccaagccaaacagttattactggaacttatgctggttggcaaggcaatagtgttcttcttggtgcatccactaataatcctaatggctctaccaagattaagatttatgattacaatgctaagcagtgggttgaaggatacgatggcccttgggctttgtggagcccacgcccaggcatttactggactcatttcgaagcttacgatgagaatggtaatttgtcggatgttaagacctacgcctttggcgtgtgaatctgattagtaaatctgattagtatcatttaaaaagcctgcaaacgttttaaacgcttgcaggcttttgtttacttatttactttatttgtgttttatttgcaacttaccaaatgtgtacgcgctcgcttggagcaagccacatctcgtcgccgtctttaacgtcgaaagcatcgtagaacaagtcaacgttgcgcgcaatgccattagtgcggcactctcgttattaagttaatgctatgccatagatatttattacgcgaaaatctatagatatttattttatttatataaataattgattatgattttatatatggaaggcaatatttcttatgctatcggcattgacgtcggtttaaattcagtaggtcttgctgcaattcgcttagatgataatggggagcctataagaatacttaaagtaataagtgttattcacgatgctggtattgatccaaatggggcaaaagaatctgatacgcgtaaagcaatttctggtgtcgcgcggcgtgtgcgcaggttatatcgtcagcgcagacgtcgtttgcagaaacttgattttctattacaatcattgggttggccggttgttgaaaacaaggatttagagttttctaattcgtttattccatggatttttcgtgcaaaacttgctgatgaatatattgaggatgaagaacaacgtaaacaaatgttaagcgttgcaattcgtcatattgctagacatcgtggttggcgcaatccttatcagtcaataaaatcaatgatgcaagagactgagtattctgaattttacaatgagttgctaaaaaatattgaaaagtttgcgccaggagtaggttgtgaaggttctacgcctgcgcaattagtacgcgattatcttttatcacaacaaggtaaaccctcacgtcgtttacgtataactacagacgataaaaagaaaaatcatcccaactcattagatcctgttttaccacgtaagctaatgcaaagtgacagcatgcttgagattctcaatattttcaatgtgcaacatattgatgacaagtatgttagagagcagattattaatgctgttttttatgagaaatctccgcgtggctctgcagaaaatcgtgttggcaaagatgctataacaggaaagggtaagcgtgcgctaaaggcatcgttagcgtttcagaaatatcgaatcatatctactatttctaatcttagcataagagaaaattcaaaagaacgttgtttaacaatagaagaaaaacagaatgtttataaattattaacaacttcgactgatgagtcatcaaaaaagaaaagcgctgaagtaccattatacacttggattgatgtagctgattgcctcggaattgaacgctataagttgcgtggagtaggatcacaaataggagatggagaatctgttggtaatcgtcctccaatgttgaatagtgagttagctattatttatgcgaataataaatctttaagacaatcgttgctcacgtggtggttagatgctaatcgtacgcaagaagataaagaagctcttattgagatattgagcaacacggtagacatagaagcaattcatgataatcctgaatatcaagataagtacggttcagcaatagcatttattgattcaatggatgaaacagaaattgcggcattggaaaatatttcattgcctaatggtcgtgctgcttatagtttggaaacattagataaactcaataagcaaatgcttgaaactgatgatgatctatttaaagcgcgcaaaaagttatttaatttaccaaataattggcgtccatctgaagctcctattgcagagccaacaggtaatccttcagttgatcgagtattgaaaattgtgcatcgattccttataagtgctaaaaatcgttggggtaatcctgtacgtattaatattgagcatgttcgttctggattccaatctaaaaaaaatggcgaattcatataaggaattattagataaacgaaccaaaggtaaagaaaatcttaaagcaatgatgcggaattctttgcatttaggcatgagtgattctatttcagatgcagatatacgccgttatgaggctgttcaacgtcagaatgggcaatgtttgtattgtggctatgagattacttatcatacatgtgagctagaccatattgttccgcgtaaggggccaggttctacgaatactcgtgagaatttagttgctacttgcttatcgtgtaacgctcaaaagtgtaatactccttttgcaacttggtgcgagcagtctacatattgcaagaatcatgatattagtgtagattccgctattaatcgggttcgtgcttttattttcccgcctaaatcatacgataaacgcggtgctaatcaattcaaaaaagaagttatatctcgcttgaaacaaaaagttggtgatgaagcgtttgataatcgttctatcgaatcggttgcatggatggcaaacgaattgcatcgtagaattgattggtattataactcgcagaattatcaaacaaacaatggtatttccgatataagtaataaagctcaaacaaatgttggagtttatgctggattgcttactgctatagcaagaagaatgtctggaattgacggaaaactggagttctttgatggtagaaggaaaactcgttttgatagacgacatcatgcagttgatgcatcagtaattgcaatgatgactccaggaatggctcgaatacttgcaattaaatgcaatctgcgtgaaacacagttattgcaaggcaataaagtggttcctggtggtattgattggagagaatatccaacggctaatgatcaaggatatcagcaatatgctaattggtctgttcgtatgaatgcgttattgaaacttcttaatgaagaaatgagagctgatcgtattgctgtggttaattctattcgtttgagatacagtaattcttctgttcacaaagatgatgtacatgcattattaaagttgcacgtcggcgatgaaatcgacagtgaaacaatccgacgtgcttctactcctgcgctttattgtgcgttgacacggaatcctgattatgatgtaaacaatggtcttcctgaaaatccagatagaactattctgttgcataataagaagttaaatgcatacgattcaattacttttttcaaggcacaagcagcacagcttttcgtacgagaaggttctgtagagattggtaattctatccatcatctacgcatttatgaatactttgaaaagttgaaaagtggaaaaattaaaaaatcttatggaatgattcgtgtatttcaaaatgatttgcataaacatattcatgaagatttattctcgtgtgatttgcctgaacaatctatctcaatgagatatgctgatacagaagtcactcatgctgtgcaaacaggtaatgctaattatctcggatatcttgtgcctggcgatgagattatcgttgattttagtcatgctaaattatcaggatatattggtgactttgtagaattcctaaacaagataggtgcagattgtacagcatataagcattgggtggttgtgggtacggacgataaaacaactttgatacttaaaccatcgatgatttcttctgaaggaattgacaagttgtattcgaattgcaagcgcaataacttcgattatacttcttatgaagaatctattaataagattctagctggtaaaggttggcgtgtttcggttaatgtgttggccaagtataacgtagcaactattcgacgtaatgcgttaggtgaagttcgttgggtatcacgttcgcatttacctatttcttggcgttgggatactggagaaaatagagaatagaggaattatgcagaatgcttggcgtgtgattgattgtactaatttacaaggtgaattacggtatattcgcggtaggattttagtgtgtgatcacgcattagagcagaaagttgaaattccgctagcggaaacggcaatattgcttattggtttgcattgtaactgttctacaggtctgcttcatcagtgtgctgaatatggtacttgcgtaatgacctgtgattggcgatgtgttcctatcagtgctatgcattcgtggaccaatgttcctacgagaattacggttcgtcaattgtctcaggcaacaatgagtgtgcctcgaagaaaagcagcgtgggctcagattgttcgcgcgaaaatacgtggacaagcagcttgtcttgatttattaaataaagaagggggtggattattacgcggactatctaatactgttcgttctggagatgtaacgaatagagaaggccaagctgctcgtgaatattggaaacgtatttttcccgaggaagaagattttcatcgtaaaccagggtctggtcaagataggaatgctttacttgactatgcttatatggtgttgcgtggtttttccattcgtgcagttttatctgctggtcttaatccaacaatgggtatgaatcatcataatggtactaattatttctgcttagcagatgacataattgagccgtttagaccagctgttgattacgctgtttcaaaattatcattctcagatactccaaatgataaagcagttaaaaagtatttgatcgacagtgttaatcaacagtttaatggttctggacatacaattcctagcgctttatctgatttagctcaatcatatggtatttatgtggaaaaagacatggaagactttcgagtaccacaatttgtaaggagtgaattatgaaagtcgatgaggacagtggtggcatgtggtgtttagtaatgtttgatttaccagtgaaaacaaaagtagagcgtcacgctgcaactgtatttcgcaatatgctgcttgatatggggtatgcaatggtacaattttctgtgtatgtccgttatagccccactcaaacaggaaatagaacttcagtaaaaataattaaggataatcttcctccacgtggatcaatacgcattttacatgtcagtgatcatcaatggtcatctgcacaacgttattacaatgccaggcaagaaaagaaagaggaggctcccgatattgctatgcttttttaatcataaaatgtcttataatggttggaattctaccattcttgatgatataccaattatatcaagaatggtagaagctaattttcaactaatggtgacattaagcttaagtctc

SEQ ID NO: 3419 - DNA, 12639 bp, synthetic construct
  source 1..12639: mol_type = other DNA
  misc_feature 1..12639: note = Synthetic
  variation 12071: note = note, n is a, c, g, or t
agctacgcttcaatggcaactcttatagacgttgcaatggttggaatgtgcttagggtttattttgcacaattggcatcctgcaaagctttttatgggtgattctggctccatgctaatcgggtatttaataacttgcgcgtctattataatgacgggtcacttagatccatctgcagtgcacacaagcatatatttgccagtatttatgccgattttgcttccgattttagtgctgtttttgccagtgttagacatgtgtttagcaatatgcagaaggcttgcaaaagggcagtcgccaatgcatccagaccgcatgcatttgcatcacagaatgttgcgcattgggcattctgtgcaaggagctgtgcttattttatggggatgggcggcgcttatatctttcgggtcaataatgattctgttctttaaagcaatttacgtgcttgttggcatgattattgcggcagcgctgcttacagttcttacaatgatgccatatttgcgcaggcggctgccagagctacgaaattcgtaaaataatactcgaatactcgcgaatcatagtttatgaaacgcgatttttacaaacgtcatagcaaaaacgtatagtaaccctatggctacaactgatatgaacacggaatccgtgtatgctcctgttccaccaattttcgagaagctcggacttgcttatgatgatgtgctgttgcttccaaacgaaaccgatgtaatcccatccgaagtggatacaaccactcatctgactcgcgaaatcactatgaaagttcctgcaatttctgcggcaatggacacagtaaccgagtccgatatggctattgcaatggctcgaaatggcggaattggtgttcttcatcgcaatctttctatagatgatcaggctgcgcaagtcgatattgttaagcgcagcgagtctggtatgattaccgacccactcactgttcacccagatgcaacgctcgcagatttagataaattgtgcgggcgttttcatatttctggtttgccagtggtagatagcgaaaatcgtctagttggtattattaccaatcgcgatatgcgtttcattgcttccgaagactatgatcgtttgaaagtcaaagacgtgatgactcgcgaaaatctcgtcactggtccttctaatatttctaaagaagacgcgcatcgtttgcttgcagacaacaaagttgaaaaattgcctttggttgatgcagaaggcaagcttactggtttgattactgttaaggattttgtgaagactgagcagtatccagatgctactaaggatgatcagggtcgcttgcgcgtggctgctggaattggcttccttggagatgcttggcagcgtgcgtgcgcgcttatggaagctggagttgacgtgcttgtggttgataccgcaaacggagaggctcgattggctctcgatatgattcgcagaattaaggcagataaggcgtttgacggagtacaaattattggcggaaatattgctactcgccatggcgctcaggctatgattgatgccggcgtcgacgctgtaaaggttggcgttggaccaggctctatttgcactacgcgcgttgttgcaggcgttggtgtgcctcagcttactgctgtttatgatgcggctcaggcttgcaaggctgctggcgttccatgcattgctgatggtggtattcactattctggcgatattgctaaggctttggttgctggcgctgacaccgttatgctcggcggcactttggctggttgcgaggaagctccaggtgaaaaggttttgcttcacggcaagcagtataagctttatcgtggcatgggctcgcttggcgcaatggctcctcgcggtaagaagtcttattctaaggatcgttacttccaggcagacgttactagctccgacaaggtggttccagaaggcgtggaaggcgaagttccatatcgcggtccacttaacgctgtgctttaccagttgcttggcggattgcatcagtctatgttctacgttggtgcgcacaatattaaggaaatgcaagagcgcggtcgctttattcgcattacggatgctggtcttcgcgaatcgcatcctcacgatattgtgatgactgcagaagcgccaaactacagcggtttccacaactaaatcgtaagttgcgtaagttgcgcgtataagttgcgtataaatcgcaagtaattttgcattaaacggcgaagagttagctaagtcttttttgctactttctaacttttcgtcgtttttgttttgacaattcgtataaaattattgtatagttagtgggatatcccactaaaaatgaggtgttttgtggaagtagtgaaagattatgacgttcgtcttgatagtaaaaagcgtgtaactctgcgcggagctaaatacccttattacaatgttaaagaatgtgataatggttgtattttattagagccacgtgagcttactattcctaagagtatctcttctaaaactcttaaaagtatggatgaagcaatccgcaattttaagattggcaaagtctctgaacctgttgatctctctgacttctaggagtaagtgaatgaacttcaatattagaatgggtattccagagatgtctaatatttgggagagattgaagaaagagtttctagaaggcagtataagtaaaaaagatctttctctttataagaaatggggaaaatctatgaaacttttatctgaaaatccaaggcatccaggattgcatactcatgatattgaagaattgacaaatagatatggtgttagagtttggcaatcctacttggagaataaaacaagtagtgcaatgagaatgtattgggtttatggtccagatcatatgtcaataactattatcggtttagagcctcaccctgaagataagaaaaatggatcatattctagaatttcactttctgatatgccagagatgtgattttagctgttagtcgtcgctgggaagatgtaggctgatgggttcgaaaaaatattaggaaaggaacgaaaatggcagaagctaaggaagatcttacgtttacgccggaagaatcgcgcttaatttggatcgattgtgagatgacgggactcgatattttccacgacgaattatgcgaagtgtctgtagttccaaccgattttaatttgaaagttctagacgacggtattgatttagtgattaagccgagcgatgctgctgtggctcatatgaacgattttgtgcgcaatatgcacacttcttctggacttgttgacgagtggaataagaacggtttgcctttggaagaagcgcaaaagcaggttgttgagtatgtaaagcgtttcctgccagagcgcggaaaagctcatcttgctggaaactcggttggttccgacaaaaagtttctcgaccgttatatgccagatttaatggcaaatctgcactatcgtgtaatcgatgtaagcacgttgaaggagatttcgcgcagactttacccagatgtttaccgcaataagccggcaaaacatggcggtcaccgtgcgctcgcagatattattgagtcgattgacgagttgcgttactaccgcgatatgatgttcgtgccagctccaggaccaagcgaagcacaggcaaaagctggcgcacagcacattgagagcacgagcttgcttcgtgactatgagcgccgcggtgaagcattagaagacgtaaattccgcagaaaagcgcgactattaaacaaagcgcgactactaaacgcaataaaaggtactgccaatgaagcaatccgaagccctaaccataatcaacgctggtgcaagcgttttcattaccggcgctccgggtgcaggtaaaacccacgtattaaacgaagctattcgcgcaatgcgaaaaaacggtttaagcgtggctgtaacggcttctaccggaatcgcagcaacgcatttaaacggtcaaaccattcactcgtggagtggagttggagtttcaaacgcgcttagcgattcgcttcttaaaaccattagagctaggcgagggaaacgcataaaagccacggaagtgctcgtgttggacgaagtttcaatgattcacgcgtggctttttgacatggttgatgaagtatgccgtaaagtgcgcaaaaactctgctcccttcggcggacttcaagtagttatttcgggagatttcttccagctgcctcctgtgagtgcttctatgcgaaatcgcgatgtgttcgagccaagtccagagtttattgagtcgcgcgaaaagtatgctgctgctggcaagaatccagaaggctatattacggaatctttcgcctgggatgctttaaagcctgttgtgtgctatttaactgagcaacatcgtcaggatgacggcaaattgcttgaagttttgacggatattcgtggcggtcttgtaagcgacgaagataagcaagtgcttgccagtcgcctcggtgagtatccgcaaggcgatgaagtttcggttcatcttttccctacgaactcacaggcagatggcttaaataatgtgcagcttgcggcaattgatgctgagcctcacgaatttgtggcaacagaagccggccctaaaaatctcgtcgagcgtttaaaaaagaatatgctcgctccagaacggcttgtattaaaggttggagctgcagtgatggcgttgcgaaatgatcaagataagcaatatgtgaacggctcggttgggcgagttttgagattcgcacctgaatctaaaggcggatggccgattattgagtttgaaaacggcaatattgtcactcttaagccggctgcttgggaaatgacggatggtgagactgttcttgctagcataaatcaagtgccacttagatgcgcgtggggaattacgattcataaatcgcaaggtatgacgcttgacagtgcggtaatggatttgcgtagaacttttgctcccggaatgggatacgttgcgctttctcgcgtggaaaatctgggcgggctttatttggaaggtattaacgatcgcgcgtttagtgtttcggcggatgctgtactgttagacggattcttgcgtgaggcttctaagaaagcaagtaagcttcttactaacagtggtgccaattctttcataaaaaacacgttagaaaacgaattcgttagtcagcaggaacttgatatttttgcaagtactagcaatgatgagtttggattcaatgacgagttttagttttatttgttgctgttgaaacggtgttatttttcccgcatttgttcccttttgggtcgatttggaaaacaaaagcaagaacactttcgctttttgcaagtaaaacgttcgtagtttgattagctgtgtaaacaagtgtttatgtcctcatgcgcaaatagattggaacgcatgaattccaatgtacttcgtatgtctcagctgttccttcgtacgctgcgcgaggatccagcagacgcggacgtaacttccgcaaaacttatgcagcgcgcaggctatattcgtaaatccgctccaggtgtgtggacttggttgccgctcggactcaaggttttaaacaaggtccaagcgattattcgtgaagaaatcaacggtattggtgcgcaggaagtacacttcccagcgcttcttccacgtgagccttatgaggctacaaatcgttgggaagaatacggcgataatattttccgccttaaggatcgtcatgaggctgactatcttcttgctccaacgcacgaagaagttttcacattgcttgttaaggatatgtattcttcttacaaggatttgccagttactttgtatcagattcaaacgaagtatcgcgatgaattccgtcctcgtgcaggtcttattcgcggccgcgagtttattatgcaggatggttattcgttctcgattgacgaagatggtttgaagtctgcttatgttgaagagcgcgctgcttacgctcgaattttcgaccgtttgggcattaaatacgtgattgttcacgctgtttccggccctatgggtggctctgattctgaggaattcttggctccaatgtcaattggcgaagatacttttgcgctcgctccttctggaaaagcttggaatgttgaggctcttaccactccagaaatgcaagaggttgattattcggcaactcctgcagcagaagctctcgaaactccagaggctaagacgattgaggctttggttaaggtttccaacgatttgcatccgcgtaaagatggtcgcgaatggcaagcgtccgacactttgaagaacttgattattgctgttaagcacccagctgatgctgagggcggcgagcacgaggagccatggcgcgaaatcgtggctattggtattccaggtgaccgccaggtagatatgaagcgtcttgaagctcagtttgctcctgcagaaattgaagaagcaactgaggatgatttgaaggctcatcctgagtttgttaagggctacattggctttagcgtattaggtcctcaagctcgcaaagatggtagtggaattgaaaatcctgtccgctacttgatggatgctcacgttgtaaagggcagcgcctgggttacaggagccgacgaagacggaaagcatgtttacaacgctgtttacggccgcgattttgaggctgatggtgttgttgaagcagcccaggttcgcgatggcgatatgagcccagatggttccggtccattgagcttcgaacgcggtgttgagattggtcaggtgttccagcttggtttaaagtattctaaggctttgggcttaagcgttcttaacgaaaatggtaaagctgtaccagtttggatgggctgttacggtattggcgttagccgcgtgattgcatgcttggcagaaacgcatcacgatgatgatggtcttgcatggcctatggcgattgctccagctcaagttcacgtcgttgctacaggcaaggatcaagttgctttcgatgctgctgagaaggttgttgaagagcttagtaagcagggaatcgaagtaatcttcgacgatcgtccaaaggtttctccaggcgtgaagtttaaggatgctgagcttgttggtgtgccgctgattgctgtagccggccgcgatactgtgaacaatggaacgattgaaatccgcgatcgcaacggttcaaacgttgaggcaattccagtggatgaggctgctgctcgaattgtagagcgcgttcgtgaacagttgtaatcgcaataactgttaacaacgaatcagcgattaagcaattaaactattaaacaattaaacgactaagcaatattgccgttggtgtaatgctttgtatattatacgcattattttcagcggcaatattgctatgaatagtaaaaaattatctaaattattagaatagaatgttcataagttttaatgtttaattctattaaaactttctaaaaatcatttacacctccttcaatatcgtcatattggttttcttcgacttgtgagacgaaatctattgtttcttttgctgaagattcagcatcataatggtattcttggctgtcgttttcttgcgaagaatccatagaatatgtattagccatagggtttttcatcgccaagctcaaatcttggttggaataagtctcttgatttgaccgattttcttggtttatttgattagtgtgatatttgctattgttactctgatcggttcttccacgattataagagtatttagtaaaagcactgattcctcgatttaggtcgtgtccaattgcggttgcttctagtacaactcgagatcggtcttctccgtctttgtgccaggattccgtgtttaaatttccacatacgactatcgcgtctcccttatgcacgctttttagcacatttgcagctaaagacttgtatgcttttactgtcatccaagttgtcggtctatctttccactgtctttcctcgctatggtagtaagacgttgtgcttcctattctaagtgagcatgctggtgagttttcgttgcgactaaagttcacagggtcactacctacatagccgctgattgttagtgttgcttgttgttgtgccatattcttaacctttcaaaagtttggactgcgactaatttaaatctcaaaattcatcacgcaacacgtgttgattattgtgattttcaataaattcgccgcagtagaatcaactatgaagtatcaaaaatagttttgcaagttatttttatcaatgtggttaaagcctatgctttatgcacatcgtttaaaaactcttgacaaaatatgtaaaactgagtaggcgagtctaaaatgtgtaaatatatgtagattgatatacttagcgaaagtagtttttgtttttcattagcattggaaggtgaagcttgagttttttgcctacttgtttgtgttatttgaatcagggattactgaaaagtagttattaatcacgtggagagaggtctacatttatgtggcataagtcgcacgtattttctgcaaagaaatgtttagctgctgcggcatcagctgttgcttgcgtagcaatgattggatctactgccgtatctgctagtgctttggttatagtgcaaaatcacagtgttgctaatgttaatactaattggcaagttaagaatcagtcggttgcaagctacattttaggtgcaattcgtgatgtgcgttcaaagtattatgacgatggcgttacccttatgaacggtatgactcttgcagattatgttacttctaagggtcttacaaaagaacagtatattaatgatattcgctacgatcgtgctaatgaagaggatgcttatcgtcgtgcaaatgagactgttcagcatggaaaacttggacattttgctgcggatggtgtgagccttccaaactacgatggtcgtaaggcttggggcgaaaacattgcttggggtgaaagctcagaagaatctatgtcggattggaccgctggagaggagtctgcgttacaccaatctaatggtgctgaaactacttacaatgctcatctttaccagattttgaatccagaaaacatttccttcggatatggtgaagtagctggtacctcatacggaagagtatctgttttaactctttcaactcaggttggagacactgactacccacaaggcaagttaggtgttgctcctcaccttgattttgcttggattatccgtaataacgatattgctgttggtgcaaatgcttacaccgacaagcagcttgagtatcgttggctttcctacaatttgaatactcagcagtgggctactattgctgattggggtactggaaactgggcttcttgggttacaaagccaggtgactattggttgcattgcgaagtacgcgatccttctaataagaaagttattttagaaaagacaattgctttccactacacagttccaagccaaacagttattactggaacttatgctggttggcaaggcaatagtgttcttcttggtgcatccactaataatcctaatggctctaccaagattaagatttatgattacaatgctaagcagtgggttgaaggatacgatggcccttgggctttgtggagcccacgcccaggcatttactggactcatttcgaagcttacgatgagaatggtaatttgtcggatgttaagacctacgcctttggcgtgtgaatctgattagtaaatctgattagtatcatttaaaaagcctgcaaacgttttaaacgtttgcaggcttttgtttatttgtttactttatttgttttgacatgcgattcaccaaatgtgcacgcggttagcagggtcgagccacatctcgtcgccgtctttaacgtcgaaagcatcgtagaacaagtcaacgttgcgtgcaatgccattagtgcggcactctcgttattaagttaatgctatgccatagatatttattacgcgaaaatctatagatatttattttatttatataaataattgattatgattctatatatggaaggcaatatttcttatgctatcggcattgacgtcggtttaaattcagtaggtcttgctgcaattcgcttagatgataatggggagcctataagaatacttaaagcaataagtgttattcacgatgctggtattgatccaaatggtgcaaaagaatctgatactcgtaaagcaatttctggtgtcgcgcggcgtgtgcgcaggttatatcgtcagcgcagacgccgtttgcagaaacttgattttctattacaatcattgggttggccggttgttgaaaacaaggatttagagttttctaattcgtttattccatggatttttcgtgcaaaacttgctgatgaatatattgaggatgaagaacaacgtaaacaaatgttaagcgttgcaattcgtcatattgctagacatcgtggttggcgcaatccttatcagtcaataaaatcaatgatgcaagagactgagtattctgaattttacaatgagttgctaaaaaatattgaaaagtttgcgccaggagtaggttgtgaaggttctacgcctgcgcaattagtacgcgattatcttttatcacaacaaggtaaaccctcacgtcgtttacgtataactacagacgataaaaagaaaaatcatcccaactcattagatcctgttttaccacgtaagctaatgcaaagtgacagcatgcttgagattctcaatattttcaatgtgcaacatattgatgacaagtatgttagagagcagattattaatgctgttttttatgagaaatctccgcgtggctctgcagaaaatcgtgttggcaaagatgctataacaggaaagggtaagcgtgcgctaaaggcatcgttagcgtttcagaaatatcgaatcatatctactatttctaatcttcgcataagagaaaattcaaaagaacgttgtttaacaatagaagaaaaacagaatgtttataaattattaacaacttcgactgatgagtcatcaaaaaagaaaagcgctgaagtaccattatacacttggattgatgtagctgattgcctcggaattgaacgctataagttgcgtggagtaggatcacaaataggagatggagaatctgttggtaatcgtcctccaatgttgaatagtgagttagctattatttatgcgaataataaatctttaagacaatcgttgctcacgtggtggttagatgctaatcgtacgcaagaagataaagaagctcttattgagatattgagcaacacggtagacatagaagcaattcatgataatcctgaatatcaagataagtacggttcagcaatagcatttattgattcaatggatgaaacagaaattgcggcattggaaaatatttcattgcctaatggtcgtgctgcttatagtttggaaatattagataaactcaataagcaaatgcttgaaactgatgatgatctatttaaagcgcgcaaaaagttatttaatttaccaaataattggcgtccatctgaagctcctattgcagagccaacaggtaatccttcagttgatcgagtattgaaaattgtgcatcgattccttataagtgctaaaaatcgttggggtaatcctgtacgtattaatattgagcatgttcgttctggattccaatctaaaaaaatggcgaattcatataaggaattattagataaacgaaccaaaggtaaagaaaatcttaaagcaatgatgcggaattctttgcatttaggcatgagtgattctatttcagatgcagatatacgccgttatgaggctgttcaacgtcagaatggacaatgtttgtattgtggctctgagattacttatcatacttgtgagctagaccatattgttccacgtaagggaccaggttctacgaatactcgtgagaatttagttgctacttgctcatcgtgtaacgctcaaaagtgtaatactccttttgcaacttggtgcgaacagtctacatattgcaagaatcatgatattagtgtagattccgctattaatcgggttcgtgcttttattttccctcctaactcatacnagaagttatatctcgcttgaaacaaaaagttggtgatgaagcgtttgataatcgttctatcgaatcggttgcatggatggcaaacgaattgcatcgtagaattgattggtattataactcgcagaattatcaaacaaacaatggtatttccgatataagtaataaagctcaaacaaatgttggagtttatgctggatcgcttactgctatagcaagaagaatgtctggaattgacggaaaactggagttctttgatggtagaaggaaaactcgttttgatagacgacatcatgcagttgatgcatcagtaattgcaatgatgactccaggaatggctcgaatacttgcaattaaatgcaatctgcgtgaaacacagttattgcaaggcaataaagtggttcctggtggtattgattggagagaatatccaacggctaatgatcaaggatatcagcaatatgctaattggtctgttcgtatgaatgcgttattgaaacttcttaatgaagaaatgagagctgatcgtattgctgtggttaattctattcgtttgagatacagtaattct

SEQ ID NO: 3420 - DNA, 10154 bp, synthetic construct
  misc_feature 1..10154: note = Synthetic
  variation 9042..9202: note = note, n is a, c, g, or t
  source 1..10154: mol_type = other DNA
catcccgacaaaatgccccaaaaacatcgcacttaaagccggacgatctccgccagggggggttaggggggggccggcacgtctctgggaattgcccccaaattggtctgaaacacctcgcacagcgaggcgtctgggacagtcgaccagaggggatagcggaggcgaacacacaggttcgcgctcccgtcatccgcgatgtggtcccagaccgcgcgtcgcttcggaggtgagcgcatcgggatgtcccagaccaccgtcgacgtccccggacggcaccccgggctgggctctcatcggctcgccgacacctgccgtcggggcaaacttcgaaattcgccccctggcaagtccagaccggttctcaacctccacccggctccctcccgccacccggtccgtgctcggcttcccaacaaggtcccgtcatcgcgctcaaacggcccggtgcgtctgttcacactccgctgttccccctttccccccatcccgtaccccccttagaatactggtgcacgacggtctggccggggttcgggctggggcgtcgggtggtggcgactgtcttcagtggctggttcgatcgaaggggcgtggtgtgatgagtcaccgtctgctcgtctgtggcctgttggccttcctgctcgtggctggcggggtctccctccgtcccgcccacgccgccctcacccccgatcagaaaaaagagatcgaggagatccgcaaggaactcggcaaggtccaggccctgatcggcaagaaagatcagcacgaagaggccgagaaactgctgactgaagccgagaccaagctcaaaaagatcggcaaagatgccggcgatgagaacaacaagctcatcaccggcctgctgcggcagatcgagttgaaaaagaccgccctcgcccggcgggacgcccccgccaagggggtcgccgcggctggtgcggccctgtcgttcgagaaggaaatcgccccgatcctggtcaagaactgcctcggctgtcatgacgacaccgccagcggcgggctcaagttcgacaccttcgcctccctcgcggctggctgcggcggcaaactggtcgtccccgggaatcccgatgccagcatcctcacccgacggcttgtcgcggcgggggaagcccgcatgcccaagggaggcaaagccctcgcccccgatgagatccgcaagattgccacctggattgccgggggagccaagttcgccgggaacaaagacaccctcctctcggaactgaccgccgacgccaacgccaaggtcgacaacaccccagtcgcgatcgccacggccaccggcagcgaaaaggtgtcgttccagcgggacatcgccccgttcatggtcaatctctgcgtgaactgtcacagcggggcgaatccgcgggctggtttttcgctggagacgttcgagaagctgatgaagggggggcgcagtggacgggtggtgctgccgggaaataccgaagacagccggctgtggcacctcgtggggaagcaggatccgatcaagatgccccaggggcaggcgctgatcacccggaccaatcacaccaacctgcgggtctggatcgaagaaggggccaagtttgacggtcccgatccgaaggctccgctgcgcagcctggtgccgaccgaggccgagctgcgggctgccgaactggcgaagctctctcccgaagaactggtcaaccgccggatcgaacgggccaccagcctctggaagaagaccacccaggaagccccatcgacgattgcccagggagagcaggtgatggtgctggggaatgtttcggaagaccggctcaagcagtacgcggcctggggcgacgatgccgcgaaacaggtcgcctcgatcttcaaggcgagcgagacgccgttgtggcgggggaagctggcggtgtttgtcttcagcgaccgcttcacctattcggaattcgtccagaccaacgaggcgcgcgaactgctgcccgagatccagtcgcacgtccgcatccgcgatccggaggatgcctacctctgcctgatggacattcccgacgacacgaccgacagcccgggggcaccggggatggtgctggcccaggtgaccgaggcgtttctgcagcgggggggaaagaccctgcccgagtgggtctcgcggggaacgggcctggctcttgccgcccgcaatgacgccaagaacgagtactaccggcaactgggggtgagtgccggggcccggctgcaaaccctgcagaagcccgacgacctgctgaaggatggcaccttttcccccgccgacctgggtccggtcggttattcgctggtcgcctacatgctgcggcagggagagccccagtacgtgcagtttgtctcggccctgctggcgggaaaaacgctcgacgaatcgctgaagggggtctataacgcagatgcggccaaggtcgccgcatcgtacctggcgtcgggggcggccggtccccgcaacgccccccgcaagaagggaaaatagcctgggttcaggcggggttttccggtctctcggcttgccttccgcgctggtcccgggcccctgggagaacggttcccctcgaggggacagttcccccaggggttgggggttccgggtgggggaacaccactttcacgtgtctgggtcttcgtgcacgattgcctgatcattggcggcggggtgattggcctgtcggtcgcctgggaactttctcgccacggcctctcgtgtgccgtgctcgaccagcaggccttcggccaggagtcgtcgtgggcgggggcggggatgctgccccccggcaatccggcgaaggccgagacgtgtgaagagcgactgcgttcgcacagccacgtgctgtggcccgagtggaccgctgcactgcgtgaggcctcggggatcgacaacgggtttcggcgtgactcggcgatcgaagtgcggtttggcggagagccgggggaactcgacgacgaaattcgccgctggcattcgaccggcgtcgcgtgccagccgttgacggcagccgaggcgcggggcctggagccggcactggggccggggatcacgtcggcctacctgctgcccgagcatgggcaggtgcgcaatccccggcacgtcaaggcgttgcaggcggcctgtgcgggggccggggtcaccctgctgcccggaacgccggtctgggagattgtccgccagggggggcgtgtcacccgggtcgaaaccccggccggggggttctcggcggggcagtacgtggtggcgagcggggcgtggtcggaacggctgttggccccgttggggaacgctccgtgggttcgtccgctgcgggggcagatggtgctgctgagccagttgccctgtccgctggggcgggtcatcaacctggggcatcgctacctggtgccgcggggggatggacgggtgctggtcgggtcgaccgaggaggatgtcggcttcgaccgccggaataccgccgagggggtgtacgggctgctcgagctggcccggcaggtggtcccggcaatggcgcaggggacactggagaggacctgggcggggttgcgcccccggtcgatcgatgggcagccgtatctggggcgttggccggggttggagaacctgattgtcgcgaccgggcatcatcgggcggggctgcagttgtcgccgatcacggcggtgctggtgggggaactggtgcgggggcaggagccgcgggtcgacctgcacggttttcgacccgaccgggtggggagcgactgatgcgggccgttgtacagcgggtccggcgggcccgggtgactgtggcgggggagacggtgggggagattggccccgggctgctggtgctgttgggggtggggcacgacgacacgtcggcggacgtggcctggatggcgggaaagctgaccgggctgcggatcttcgaggacgaggggggcaagatgaacctcgggctggccgaggtggggggctcgatgctcgtggtgagccagtttacgctgctgggggattgccagaaggggcgtcggccgagcttcatcgcggcggcccggccagaggttgccaagccgttgtatgagcagttcgtggcggcggtgggtcaactgggaatttcaaccgccacgggcattttccaggccgagatgcaggtggaactggtcaacgatgggccggtgacactggtggtggagagtcggccggtggtgcccggggcctgatgcctcgacagcgacacaacgacttcgaatctgagacgcagtgcgatgcgcagcagtctcgggtcccgctcaaaaagacttcgacaaaaaaggtgcagccgtcactcaccaaccggatggcaccaataaaaaacgccccttctagaggggcgtcaaggctaccgcaaccgaagttgggtgtcggctaatgaaagccacctttcggacgaaagtcttactgtgataggcaagccaatcgccgctcggatacactgatgaaactctacaacgtccggcaacgcaatgcaagctttcggagttcgacgtgcaacgcctcaaagaatacgttctcgggattgatattggcaccacctccattggttgggcagtcgttgagacacacgatggacagcccaccgacatcgtgcgaaccggcgttcgtatctttgaggcgggtgtcgatgggacgattgagaagggcaaagacagttccagggccgccgcgcgacgcactgcaagacaacaacggcggcaaacgtttcggcgcaagtgtcgaatccgtcgcgttgccaggtgcctcgaaaatctcgggctattgccgaccggtgctggtggtgacggtcaaactcgacaccgggtcctcgatgacctcgattgtgcactgagggaagtctattgtcccgttgggcacgacatcagccaacaggtttgggtctacactctgcgtgcgaccgctggcatgcagcctctcccacgttttcatgtgggacgggccttgttgcacctcgcccaaagacgcggttttcgcagtggttccaagcaaatggaaacaaaagcggatgacaccgaacaaggggagatcaaagaggcaatcgaaaagttgtcgcaggaactgagtggacgcaccctggccgaggtgttctgtcaacgcaaccctcaccaacagcgaattcgcaagaactggacagctcgtgaaatgtaccaggccgaatttgcgaagatctgggcgacacaagcctcatcgttgggcttgaccgatgatgcgaaacaggaactcgccaaggcgattttctatcaacgcccgctgcgctcttcgaaggggttgattggccgctgcagtctcgaaacgaagcatcgacgcgcccccgcagcatgcctcgcggcccaggagtttcgaattctgcaaaccgtgaaccatctccgacttcaatttgccgatggaatgacggcaccactcattccagaacagcgtgaccagctgatttctgccttgaatgaaaaatcgaaactcacaaccgcaacagcgaaaaaactgctggcaattccaaaaactgtcaagttttccatcgaatcgcacagcgagaaagaacttcccggaaaccgcacagcgacaccaatcgtcgagattcttggccaacgctggctgaaatggaccgaaagcgaacaagacgccctgatcgatgcacttctgtcatttcagaaggcacacgcgctcactcgtcatctgcagaagcgttggggcctgagcgtttcggaagccgagcaacttgccgaaattcgactggagaccgggtattgtcgacattcgcgccaggctcttgcagcgctgttgccacacatgcgacagggactggcgtatgccaacgctgtcgaggctgtttacggcagtgtgcgtcgtcctaccaaaccgcgacggcgtctgccggttgtctccacagcgatccccgacatgaccaatccagccgtgcatcgagctctctcagagttgcggaaagtggtcaacgcggtcttgcagcaatttggtaagccgacccggattcgaatcgaactggcgcgtgacctgaagcgttcacgtgtcgaacgcaagcgactcagcgagttgaacgacaagaaccaaaagcaacgcgaggcggctctcagaaagttggttgcagagtgtcctggggccagagaatcgagagactccattgaaaaaatcctgctcgccgaggagtgcgggtgggagtgcccatttacgggtgacggcatctcgatgcagaccctgtttggaagcacaccacgatttgatgttgcccatatctacccgaggagatacctcgacaattcatttgccaacaagacactgtgtcgcagcgacgtcaatcggaatcggatgtatgacttgctgccacgccaggcctttgcgtcgaataccgaggaatggaatctgattctgacgcgtgtcaaaggcttcaaatcgacatcggctgcggagaaactgcgtcgttttcaggcagaggcagtcccggatgactttgtttcacgacagttgaatgacacacgctataactcggtgatcgccgcgcagtatctctcgctcctttacggaggacgttcggacgagcaggggcagcgcattgaagcagtcacaggaggcatgaccgccgtgctgcgatcggtctggcgactgcacaaaagccgcgacgaccatcgccaccatgcattggacgcggtcgtgattgcgtgcacagatgccggaaccgtacggctgctgcaatcggccgccgccgaagccgatcgtcataagacacgattgaccgaaatcgcctttccggccccattctccggattcgcagcccgggtggaagagagcttggggtgcgtggctgtttcgttccggccagaccgcagagtccagggtgcatttcatgaccagacgctttacggtcgtcccgtttcgaagtcgggaaagccggagaaaacacggcttcgcaaggagcttcacaagctgtcgcgcagcgagattgaaggtgaacagattgttgatcctgtgatccgacgaatcgtgcaggaaaaatgggcctccctgggcaaaccagatcccaaacgcgtcttcgccgatccggcgaaccatcccgtattgcgggagaaaagcgggggagttcggccgatccataaagtgcgggtttggcagaatgtgaaaccggcaaagatcgccaccgatgaccgagaacgttttgtgcaattgaatgccaacgatcacacggtgatctatgccgaattgtccgaggatggaagtgaccaacggtggcgtgagtctgtggtgacccgatttgaggctctctcccgggtgcgatttggcgacccgccggttcttcggacgctccaacaggggctcgtatttcgcttttctcttcgcagaaacgattgcatcgaacttgccgatccggacgggatgcgccgactttatcgcatcatgaatgtttcgaaaggtgatatgcagatccagcaactcagcgacgcccgttcgtccaaagtgcttcgcgataacaagttgcgattgcgaatcacaaatgtcgacgagttgcggcgacgttgctgccgtaaggttcaggtgagccccttgggggatgtgtttgcggacaacacatgaattctttgaccgggcggtttggcggttgcacgcgctcctgaggtgggcttaacctcgaccgacaatcatccaaacagtgtttgtcacaccgcgccttccggccggagccagcgatgcggattctcgacattaccgatacaggagcgaggctctcgctcaatctggaacgtctgcacattgcggcaatgcatgccgcaccggtaacggtaccgctcggtgaacttggcgttgtcgtgctgggaaacccggaagttgtgatcacgcaacccgcaatcgatggactgatgcgggcgggtgccgctttgattgtctgcaaccagcgacgtcttccaagtggcatgatgcttccgattgagggacatcacctccaaacagcccgcatgcgtgctcaatcgactgcgggcttaccgcttcaaaagagactctggcagcaattgattcgggcgaaaatcggattccagggcaccctcttgaaggaagtgaccggtgcagattcgggattgctgctgatggcgagtcgggttcgaagtggggatcctgacaatgtcgaggcccaggcggcgcgacggtattggggcgctttgccattgacggatggattccgacgcaatgtcgaagaccgcgatctgaatcagtttctgaattacggctacgcgatcctgcggggtattgtgggccgtgccatttgcggtgctggtcttcatccaagccttgggttacaccatcacaaccaattcaacgcctattgtctcgcggacgatttgatggaaccctttcgtcctgtggttgatcgcgtgattatcaaacatcgctgcgagttcgaagccaaatctacgttggacaccgaaagcaagcggttgctgatcgaagcaatcctgcagaccagagcgattggtgaggtgaaacgaacgctgacggacgcggtccaactgctggcaacctctctcgccaacgttctggtggaacgcaccggaaaactggtcttaccagatcggctcgaacatgccatcgacgaatgacttttcgggataccaagcgatgtggctcatggcactgttcgacttgccggtcggcacagacattcaacgcaaacacgcgacccaatttcgcaagttgctgctttccaacggctttctacgcttgcagtactcagtctacggccggtttttcccaagtgaagaagccagcgttcccgtccgaacggcggtgcggcaagccgttcctgaagagggacacgttcgccttattctgctgacagatcgacaattcggaaaaatggaggtgtttcatggcgaaaaccgactggaatccgaaacggcacctcggcaacttctccttttctgaaactggaaacgctgcattctactttgtggcaacgacttgtggccgagggagtgtatccgagcggcgattggccacaaaccacagcnnnnnnnnnnnnnnnnnnnnnnnnnnnnnnnnnnnnnnnnnnnnnnnnnnnnnnnnnnnnnnnnnnnnnnnnnnnnnnnnnnnnnnnnnnnnnnnnnnnnnnnnnnnnnnnnnnnnnnnnnnnnnnnnnnnnnnnnnnnnnnnnnnnnnnnnnnnnnnnnnggcgattggccacaaaccacagcttggccaagctggcggacgacctgcacacgagtgtatccgagcggcgattggccacaaaccacagcaggtcactcgcggccagcctatcgggttccagtgtatccgagcggcgattggccacaaaccacagcaccacaacagcatcagggacgcgcgagacgtagtgtatccgagcggcgattggccacaaaccacagcatccatgcactcgccgagagatgacccgaagtgtatccgagcggcgattggccacaaaccacagcgtaatgtatccgtcggtgtcgatcagttcgagtgtatccgagcggcgattggccacaaaccacagcgtgttgcggacgatctcggcgatcagcttgagtgtatccgagcggcgattggccacaaaccacagcgttcggagcgctgaggcaaagtcccccgttagtgtatccgagcggcgattggccacaaaccacagccgatttgtctcgctgagtatgcgaggcgaaagtgtatccgagcggcgattggccacaaaccacagcaagacctgcacccaccggggatccgccgtcagtgtatccgagcggcgattggccacaaaccacagcgagcaggcagtacgctggattcagatgcacagtgtatccgagcggcgattggccacaaaccacagcgggtgagggagttgggtgagaggctgctggagtgtatccgagcggcgattggccacaaaccacagctctcccggatcggtaaactgacacaaggcagtgtatccgagcggcgattccctgcgagccacagcggctgctcttgctgatgctgccacgtgcccagtgtatccgagcggcgattccctgcgagccacagctggcaattgagatcagtaacaattcaatgcagtgtatccgagcggcgattccctgcgagccacagcgtggca

SEQ ID NO: 3421 - DNA, 15475 bp, synthetic construct
  misc_feature 1..15475: note = Synthetic
  source 1..15475: mol_type = other DNA
gggctgcgaggcctgcgcgtaggacggggagcgcaccaaatccgttcgctcgtgatagccgagcacttcctcgcgccagggcagtccgagaaattccaaaaccccgcgcgcctcacccggcaaatctttcaccagattctcataccaaacttcgcgccacggatgtgcgatgcgttcgcgcaacgtcgtccaatttttcatcatcgtggcgatgtgcgcgctcgcagtttcgagatcgaaaaacgcggcactctcagcgttgaccttgaaaggctgcgtgtaacaggaccacagcaacgcccgtgggtcgcgccgggccacaagcatcggggcttcggggtgaatgcatttgatgacggacagaatcgccagagcggatggatttttgtccagcaccagacgcccgtcgaccggttgctccaatacgtccggcaaaagcgaccaatgcgtttcgcgtgctgctttcaactgggcgatcgtaatgcgccggagggcatcgcccattccctcgatcttgcgctccgcattcagggatgccaacagcgggccccacacttcgctgccgaaggtggatgtttcggatgcggaaaccaatccggggtgggcctccagcacgcgctccagcagcgaggtgcccgagcgcgggcagccgacgagaaaagcgatgcggcgcgacggatcgtgcagcggttgcgcagcctcggcaaagcgcacgaagtcctcctgtgttggtaaaaagtcggcattcgcgacaacggcctggctctcgtgccaaagggccacgtaacgggcctcctcttttttctgaatggccttggcctgcgtgaaagcggaaaaagcctcggcgtatctcccctgcccttcacgcagatgccccaattcgtagaaggccgccgttttcgtcgcagcagaagcggcgggtgaatggatgacttcatgcagcgcggcctgcgcctgatcgtggtcatccatccggcgcaaaatgcgtccgcgaaccagagtgataccggggtgcatgggaaaacgcgccaacccgattcgcgtggtttccagcgcctccggaagcctccgcaaatgctccagcgcatcggccagttgctcatacacgaggggtgcggcatccggtttgcgcaatgcctcgcggaaaagtggctcggccaaatcgtagcgaccaatttcgcaccagccgaaaccgaacacaccgctccaatggagccggctcgcctccgtcatcaccgacaaaagctgcgcaatctgtccacgcgccgtcgtgaaccgcgagcaatgggcattggccgtggcgagacaggcgcgaaggagattgttcgacgtatctgctcgcaaggcacgttcgatcaaatcacgtgcatggacgtaatcctgcaggacgaatgcttcctgaatcttgttttgaaggattggatcaacggccacgctgtggacgtatcattatttacgaaggaacaaattgttttctgcaaaagcgcgaacctaccaaggttttcgccgtccgcaaaaaaaggcagttgcagcgcaagcatctgaatcattgtaaaaaataatgatatagggtgttgacatagcgacggggggggtaaacgcgctgcgtattgacgtgttgaaaccttaaaacaaaggtaatcactgaccaatttctcctacacagaacaacatctcctcgcccagccaaacaaaactcagagcaccacacccaaacaccatgaaaacaaaaaatacaaaatacaaaaacatcctgatgggcgcgattctcgccctccctgcaatctcgatggcggatgtttcagtaaccaccagtatcactggttctgccaacgatgttgtcggcggcggcggcacttatgtcggtaaactgaccttcggtggcaccgcccaaacgatcatcgtcaacagcggcactgtccaagacaacagcaccggcggcggaagacattttgatttattgggaaccaacaacgtctttacttttacgggaagttctactcaagcgatagttcacgggcaacaagcttgggccactggttcaaccaggattaacggatccggtaatacactgaacatcttggctggtgccacattctctgcctctggctggaacggctatgacggatcaaacaatacaatcaacattgacgggactggttcaaaagcagactggagcgtgggtggcggtgatggatttggcaacagttcaggcagcgatgtttacgcgtcgaataggatctctatcacgaatggtggaaccatgtatgtcaatggaaacggcatggacaacatgacggcgaacactgtgggacaatacaccgtcaatgtagacggagccggaggccgttcggttttaggctttacctttaccaagtataacgggccggcaaatggcgggattgcacacatattcaacaacggtgccatcgaaacgcacccaggcaatggtaacgaaaactcgttcgctggaagtaatgacgcctcccacttggaaaaaatcttcattgatggcggtgtgatttcttacaaagacgcgagtgccgttcaaatgaacgaaagcacggcaggtgccgccgcctcctttacctacgctggcaataatgccatgcgcctgaacaactctgcctccaccgacacgggcagctacacactcgccaataacttgggcacgaaaaactatgtccgtctggaaatgatcggcaccacgacctcggtcgcacgggccatcaccattgacggtgccaacggcggttcaatccttctggatggaacctcggccaccattacgaatggtgtcacgctctccggctcatcaacgttcactgcaaccggcacggattccactctcaccggtgtgatcagcgggagcggcgctctattcaagaacggcagcgcaaaattgacgcttggcacctctgagtcctacaccggcaatacacagattgacgcaggcatcctgagcgttagttcgaccttttttgcggacgccagcgatgtttacatcgccgcatcatcgttcttgaatctgaacaccggcggagcgactgacacgattgatcagctgttccttggtggcactgagcaggcaacaggtgtttacggtgccatcggcagcggggcgacatacgagacttcattcatcaccggcagtggaaaactcaatgttgtcaccggtgtccctgagcctggaactgctgtttcactgcttggcggactcggaatgctgctcggactgcgccgccgccgcaacagctagacgttttaagagcgctttcgcaatggaagcactgaatggttttgatgccctgctgttgcaaaacagcagggcatcaatctttttcgcctctgttttcaccacgttcctgattttgtcggttttcacaattttcgtatgattcaaaatgttctcgtcctaggcgcgggtagcgcaggtctactcgctgccatcacgctcaaaaaaaagctccccacgctgaacgtccgcatcgtgcgcagcagcgacatcggagtcatcggcgtgggcgaaggaacgacgcccgcctttccgcagcatttgtttgattatctggggctcgacgtggcccgttttttcaaagaggcggagccgacatggaaactcggcatccgctttgtgtggggaccacgggagtattttgactacacctttcaccagcaatttgaagggcgctggagccatctttcgcgggagccgggattttatgcatacgaagactttcgcggggctgacattccctccgcgctgatggaagcagggaaggctttcatgttcaaaacggacgggagcggcgaccccgacatgaatatgaaattcgcgctgcacatcgagaacctcaagctggtcgccacgctggaaaagatcgcggaggaattcggcgtgaaatttctggagggaaaagtgagcggcgtagagcggggcccggctgggcttaccgcactgcgacttgaggacgggcagcgactggaggcggactttttcgtagattgcagcggctttcgaagcgagctgcttggccgggcaatggaggagccatttgtgaactacgaccgcgcgctcttttgcgaccgtgcggtaatcggcggatgggatcgaaccacggagacgaccctcgcttacacgactgcggagacgatggaggcgggctgggcgtggcagatcgagcacgagcatcacatcaatcgcggctacgtgtattgctcgcaggcgatttccgatgaagcggcgtgcgaggaatttctccgcaaaaatcccaaggcaccgaagagtccgcgcgtggtgaaatttcgctccggtcgctatcgccggatgtgggtggagaacgtagtcgccatcggcaatgctgcgggtttcgtcgagccgctggaagccagcgcgctgatggcggtgacaacccaatgccagaaactggtggatatgtttgtgaactcctcgcttcaaccgaatgaatccttgcgcgcactctacaatcatctggcaggaggaagttttgacaccatccgcgattttctctcgctccactacaaattgaacacgcggctggataacgaattttggcgtcactgccgcgaagacactgagcttggtgggatcgcgccgctggtggaattttaccgagaaaacggccctgtgattctcggcacctataccctgccccagttcgtggatccctacggcctcgaaggctacctggtgatgctgatcgggaatcgtgcaccttacaaagcacgctatcaaccgaccgcagccgagatgaataattggaaccaaatccgaacaactttgattgcacgggcgcgacaaggaatgtcagtggatgaaagcctccgcttaatccgctcgcccaagtggcggtggcaataatgtcggggtttttgctgactggacacacagcatttatcaacgagcttgttcccacgactacacaacaaaccgcaatcgcgccatcgccacttacacaaacgccaaacactaaatgaggatcatttcccgcaacaaaaaaacctcgcgctttctcgcgggctccatcgcagtatttgcagcgctcccgacaatagccatggcggcgaacatcaacgaaagcaccaattacactggagatgccagtagtctcgatcccatcaatgtcgcgggcggcaactggggcatcaacagacttctcctaggcggcggtgccaccggcattacgataatcatcaacagcggcacgctctctggaacgaacaacagcgctccttcattcgatgtcaccggcaccaataacacggtcactttcaccggcagttcgactcatgtgattgtcaattccaacaagaactggtctaccggttcgactcatatcaacgggaccggcaacacgatgaatgtcctcgccggtgccacgttcaccgcgaatggctggaacggcttcgatggcactaacaatacaatcaacatagacggggctggctcaatcgctgacttcagtgcggacaataacgatggatttggcaacagttcgggcggcgatgtttacgcctcgaaccggatccatatcacgaatggcggccttatgaacgtgggtggaaacggtctgtgcaacatgacgtcgaacacgccgggaatctacacgatcaatgtggacggggccggaggtcgttcagttctgggcgttacattcatacactataacgggccaaacggaggcggaattgcgcacatatttaacggcggggcgttggaaacgcacgcaggagggggaactgatgggaaccaattctatggaagaaaccaagcaggccaatttcaaaaagtcttcatagatggcggtgtgatttcctacaaaggtgccaccgccgcgcgaatggacgagagcacggcaggcgaagcctctttcttcacctacgctggcaacaacgccatgcgtttgaacaactccgcatccaccgacacgggcagctacgtgctggccaataatttgggaaccaagaactacgtccgtctggaaatgatcaacggcaccacgtcggtcgcgcgggccatcaccattgacggcgaccacggcggctcgatgctgttcgacgcaaccaacgccatggttgccaacggcatcacgctgtccggagcatccactttcacagcaacgggcgctgcatcaaatctcacgggagtgatcagtggcggcggcagttttgtcaaagagaacactggcacgctggcgctcttgagcgcggaaacctatctcggcagcaccaccatcaacggcggcacgttgcaattgggcaacaacaccgcaacgggatcactcaacacagtcagcgccatcattaacaacggcaccttcgcattcaatcgaacgaacactctcacacagggtctcgatttcaacagcatcatctccggcacgggtggagtttcgcagcttggcagcggcaccaccgtgctgaacggcgcgaacacttacaccggcctcacgctcgtcagcgcaggcacgctgtcctacggcgcgagcgatgtcattgcgagcggccccgtgacggtaaatggagcaacggcggttcttgcgctgggcgcaaaccagagcgacaccgtcggcaccgtgacactggacggcggcggcagcatcaccggctcgggcacatccacactcacgagcaccggcactttagaaatgaaaagcggctcggtaagcgcgatcctcgcgggcaacggtgtcgcgttgaataaaaccacagccagcaccgtgaccctcagcggcgcgaacacctacctgggtgcgacaacggtaagcgcgggcacgctgaccggaattggttcctctccttttggtgcaacaacaggcacattcgtggtgaacaacccgaacagcggagccggaaccgccgtagtgctcaatctctcaacgaccgcgccgaccacaaccagcggtttgagcggcacaatcgccacgccaaccagcggcgcgaataccgcgaccatcaacaacggcgggcagctcttcaccgtgaatcaagtctccaccggcactttttcaggaacaatcgcgggtgcaggcggcttcaccctcagcagcctcagcacggcccctctgacgttttccggcgcgagcacctacaccggcgcgaccaatatcaatgccagttcgctcaatctgagcagcacgggttcactgggcaacacggccattagcgtggccagcggcgctacatttgcagtgagatccggcaccggcaccgtctccgccggcaccacgggcgctggctctctcggcgcatccctgactctcaacgcgggcagcgcatttacgatggcggacaacgccatcggaatattcaatcttcagcagaatgcgtccttcggatccgacgggttggtcgccagcgtgcctagcggaaccgcaccgacactcaacttcgatatcggcaatgggacgattgacgtgctcaacgtgaccaagggtgtcacgaccaacctcgctgtgaagggcctgctcaacttctcggcactgaccgggctgaccagtctcacaatcggcgactacgtatttatgaacgccctcggaggtctgggagcctcggctttcaccctcaccaacccgaccctcgtcgttggcaccaacgcctataatctgtcgctcgccaactcgacgaacacattggaaaaactgaccatctccctttatacagggaacggagccatccagtcgttcacccctttgactccgggcaacccgatcaatgcgcgccccggaacgaccttgaacttgagcgacacgctcaccaactccggcgtgaacaatctcgccgtcagccttgcgagcatcggtgctttgagtgtgacgaacctgaatacgagcagcaatccgataaccaacggagccccgggtagtgtcaccggcctgatcaacaccggcacaattgccggctcgcgtgtgtggaagatcacgaactccgacggtgccgccgccaacatcacagcgagcatcagcggcacagtgaacgtctatgatctggccaacgcaaaatacaccgggaccactgtggccttcggcaatttgcgcaggcaggccagcgtgagcagcaagtcggtggccattggcaaccagacagtgagcgacgcgagttttcaggatttgctgaatgtttcggccaccactggaaatgccaacgtgacggcgacgggcttcacgggattggtcgcaagcgcgaacggcatcatcacgaacaacctgattttttccgtcaacacttccgcgtttggcagtctggccagcacggcaacgctgctcctggtcagcaaccacaacggagtggccgggctaagcgatggaaccgcgacggtggtgggaacaccggccacgatcacgactaccgggcaggtttactcggggctgatgatctggggcggcgcatctggaaactggatcaccgacgccaactggaacgactcgcaagcagccgccgtccacgcgccgccgggattggatgcgggcttcaccaacgtggacacggccaccttcggcaacaccgccggttcggtgagcgtcaatctgaacggcgtatcccccagcctcaacacgatcactttcagcagcacgggcagctacacgatcaccggggcaagcacgatcacgatggcaggcgcgaccccgtccatcacggctgcgggcacgcaaatcatcaacgcgcctgtcacgctgggaaataatctcggcatcacagtgaccaattctggcgacagtctgaccatgtccggcgcaatcggtcaggtcagcagcgccagcctgacaaaagccggggccggcacactcgtgctgagcggagcgaacacattcaccggcacgaccacactgaacgcgggcacgctgagcgtgggagcggatgccaatctcggaaatggaaacacgctgatcttcaacggcggcacgctgcaaatcaccggcacgacattaaactcgtatgcgggaggattcatcggcacccatgcagtcacattgacggcaggacaaacggcgggcttcgacatcgccggtgcgacaaacacattcatcgtcggccagattttaaatcaaggcgcgggcggactgatgaaaaccggccccggcacgctcgtgctcggcggtgcgaatacctacaccggcgcgaccatcgtgaacggcggcacgctcgcggtgacaggcggctcgatctccggcacgacgacggtgaacagcgacggcacactggccggcgacaacggcacgttggcaaatgtcaccgtcaacagcggcggcacactttcccccggcggcaccggcggcgtcggctcgctcaccatcaacggcgatctcggcctgaacggctcctcgattttcagcgtgcagttcgactcgactgcgattgcggtggacgggatcaacctcaacggcaatctgaacatcgccagcggagcgacattgaacgtgagcgacatcgggtcgaatccgagcagcatctttggcgtaacagcgccggtcgtcacctacagcggggcatggaacggcggcatcttcgcgggtctgcccgacgacagcttcttcatgagcgcaggacaggcctaccagatttcctacgacggaggcgtagtcaccttgacgatggtggccgctgtccccgagcccggcacggcggcttcgctcctcggcggactcggcctccttctcggcgtgcgcagacgccgggcgtgatctgtttcgctgggtcgcgcaaacctacggcttcggcgtgatgtccacggtgccgacggcttttgcgctgcggatgatgcccacgccgccgttcagccccgtgccttgcagcatcactccgaaaaaagcagcccccggtctttcgaccggaggctgagtgaatgcccgtaggctttcaaacattccgggttggctttcgccgaacccttgctgtggaaagcggaacaggcgcaggtctgatacacctttgcggaaaataggcttggctcacgagaggacaagtttattttcccggccctatggaaacctccaccctcctcggcttggatctcggcacgcactcaatcggctggacgctcatcaaaacagatgcggatgaaatgccgacaaacatcatcgccactggtgcacgcatcttcaaccaggtgctcgacgacaaaacgcaggcaccgaaaaatcaaaagcgccgcgaggcgcgactgcgacggcggcagacggcgcggcgcgcgtatcggcgcgagaaattgaaacgccttctcgtcaaacacggcctgctcccggcgcagctactcgatctgcacgcggacggcgcgaggctctgcaacgacatcggcgacccctacacactccgcgtcaaggcactctcgcactcactggccccgcacgaactcgggcgcgtgctgctccacctcatccaacggcgcggcttcaaaagtaaccgcaagactgatcgcggcaacaaggacaccggcatcgtgaaggaaggcatcgccggactccgctctgcgctcgcgcaaagcggcgcacctactctcggcgcgcatctcgccactctcgatgagaaacgacggcggcataccgctcgggagatgttcaccgacgaatacgagcaagtccgcaccgcacaggccgcgcatttccccgctgtcctcgcgccggattgcgaagttgagaaacgaatccatacgctgctctttcaccagcgcccgctgaagctcgccactggcacgcttggtgattgccagttcgagccgcaccgccctcgcgcgtgcaaggcgcggctggaggctcaggacttcatctcgctgcaagtgctcgcaaatctccgcatcttccgccgcagtgcgctcgacttcgcactgcccacgccggaggagcgacaggcgatccgcgcgaaactcgcagacagtgcgaagctcacatggccgcaactccgccgacttctccaactcggcgcagacgagcgcatcaaccttgaggaaggcggcagtctcgaacatctccccggcaacggcaccgcagccgcgctcgccaaggcgctcggtaaaatgcaatgggcggcactcgacacgactcgacgcctctcactcgtggaagacctgctcactatcggagacgaagccgcgctcatgcgcaggctccgcgagcactggcagtttgacgaagacacgaccgaggcgttgcttgatgcgaagctgccgggcgaggacgactacctccgcgtatcgctcaaggccgtgcggaaaatcctccccctgctcgacgcgggcgtcaccaaaccggaaggctgcacctacgcggaagcagtgcatcaaatctacggcgcgaatcgcggcggcacgaatcgcccggtggtgcgcgaactgccggaaccggaagacctccgcaaccccgccgttcgcaaagtgctctacgaattgcgcaaggtcatccacgccattatccgcaagcatggcgttccgacgaaaatccgcatcgagatggcgcgcgacctcaagcactcgaaaaagcagcgcgcggaaatccaagcgggaatcaccaagaataaaaacgaaaacgacgccgcacggaatatcatcaccgcagagtttcgcatcgggaatccgtcggacaccgacgtgctgcgctaccggctgtggaaggaacttttcgaggcgaacggtggcttctgtccctacacaggccgcgagatttccaagacgctccttttctccgaccaaattgacatcgaacacatcctgccgctctcgcgcagcatggacgactcgaaggcgaacaagacgctctgcttcgccgactacaaccggcagcacaaacgcaaccgcactccgtgggaagcctgcggcggcgacccggcgcaacacgcagagatgctcctgcgcgtccgcaagctgagcaaagcaaagttccgccgcttcatgcttgggcgcgacactgcgcagggagaaatcgaacgcctgctcgccgagcacgccacgcggcagcttcaggacacccgctacatcgctcgcgccgcagccgattatctcgccgcactcggcgctaaaattgaaacgtcatccggcccgctcaccgccgcgctccgccgccggtggcagctcgattcgctgctgaatcccgacggtcgcggcaagaaccgcgaggatcaccggcatcacgctgtggatgccgccgtcatcgcctgcaccacacgtgcgatggtgcagcgcgcggcccgtgtggcggcgagcgaacaattccttaccgccaatgacgaaggccggggctttttcagcaaccgtttcgctgtggatccgccgtggccggacttccgccgtgacctcggcgaaaaaatcgccgccctcctcgtctcgcacgcgccgactcactcggtgagcggggcgttacacgcggataccgcctacggcgctcatcccgacccggaaacaggagaaatgcgctaccacgtccgccatgatctctccgacctcacacccgcgatgatcaaacgaattgccgatgcggaagtggcgcgaagggtttgcgcttttttcaatcagcatggaggcgacaccaatgcgcggctcgaagaaggcgtcttcccacttcacgccgacggcaaaaccccaatcaagcgcgtccgcattgccagcatcttttcgcccgaaagcctcatcgccatcaccgctcccgacggaaatgtgcgccactacgaaagcggctcgaatcatcacgtcgaaatcttcgagaacctcgacaacggtaaatggacggggcgcttcgtcaccgccttcgctgccgcccagcgcgcacgacgaagacaaacagtcgtggatcatacgccggaacccggatggcgcttcatcatgtcgctttccgccaacgattgcatcgaagtagatactgacagcggtcactgcatctatcgagtgcagaaaatgagttcacgaggtagcgcgctcatccttcgcgtcttgagcacaaacatcgttagcgacactgacaaccggggcgtgctgcgcaagacacccaacacacttcgcgaacttaacccccgcaaacttgacgtgacgccgctcggtgaaatacgccgcgccggaggctgagcaatcccggcgacacgacactcgccatgaaccgcgtcctcgaaatctcgaaccccgcgcacctgcgctgcctgcacggctgcctcgtcgtcgagccgcgcgcggagacgaaggacacgcccgcgccgccgcccgtcacacttacgaccgaagacgcgggcatcatcgtcctcaaccacccagccatcaccatcaccgccggttttctgcaagcgtgcgtcgcgggcaaggtgcccgtgctcgtatgcgacgaacgccatctcccgcgtggcctgctgctcgacccgcaatcggccagcctgcatggccgcgtcgtccgcgcacaggccgtcatttctttgcctgcccgcaagcgcgcgtggcagcaaatcatccgtgccaaaatcaccgcgcagcacgaaacgcttgtccgccttgtggggaaaagccatctcggcccactgcgcgatcaagtccgctccggcgatccggataacatcgaggcccgcgccgcccgcatctactggcccgcacttttcggcccggagttttcgcgcgacacgaacgcgctcggcgcaaacgccctgctcaattacggctacgccgtcctacgcgccgccgtcgcccgcgcgctagccagcgccgggatgcaccccgcgctcgggctgtggcaccacaaccaatacaacgccttcgcgctcgccgacgacatcattgagccgctgcgccctctcaccgaccgcgccgtctggcaactcctccgcgacggccacacggaggtcgcccgccctgccaaagccacgctcctttcactacttgaagcaccggtgcgcatggacggcgggacgtatccgctgcccgtcgccctggagcggtgtgccgcctcgctcgcacgcttttttgaaaacgaaacccgcgacgacggcaccgcgcccgacgaggccgcacgcccgctgcgactaccggaggtctgctgatgccgcgccgccgctggcccgcgctcagcccgttccgccatatgtggacgctcgtgatgtttgacctgccgatggtgaccgacgaggagcgccgcctatacacgcatttccgcaaattcctgctcgaagagggctatttcaaaatgcagttcagcgtctatgcacgccacgccgatagcgaggaacgcgcgaaggcatttaagcggcgcgtgacatcgaatctcccgcctgccggggaagtgcggatgctgctcatcaccgatcatcaattcgggaagatggagcgtttttctggaaaaaattcccgtcaggccggggagaagccgccggaacaactcacgtttttgtgacgcctccagcggcggcttctccccggcatgacgttgcttgcgatgcacgaggtgtatcagacccgcgcccgcccgcaagccacagctgttctgcaaagatgacttgcaccgcttatggtgtatcagacccgcgcccgcccgcaagccacagctctaggtgttcgggcgtgttcatttgttttggtgtatcagacccgcgcccgcccgcaagccacagctcgcgctcggtaatataccaggccggaccaggtgtatcagacccgcgcccgcccgcaagccacagccacaagcggctcctttgtcatagacctccgggtgtatcagacccgcgcccgcccgcaagccacagcttttgctctttggttgtttgactggtgataggtgtatcagacccgcgcccgcccgcaagccacagctgtgttccatagttctaggtttaggtttggggtgtatcagacccgcgcccgcccgcaagccacagccccggatgtccctgcggagattaacggggtggtgtatcagacccgcgcccgcccgcaagccacagctgtagtaatcacaggccgcaatcgtcgaacggtgtatcagacccgcgcccgcccgcaagccacagcggttgtctcttttggctgtgctttatgcacggtgtatcagacccgcgcccgcccgcaagccacagcttgaactttgcgctcgttggcgtgctacttggtgtatcagacccgcgcccgcccgcaagccacagcccaaagctcgcattatctggaaactaggaaggtgtatcagacccgcgcccgcccgcaagccacagctgtccgcttgtcgttcctgcggagtctttcggtgtatcagacccgcgcccgcccgcaagccacagctggttgtccttccggcgttgaatcagatcgggtgtatcagacccgcgcccgcccgcaagccacagctgtgtttcgtgtgcggccaatgagacccagggtgtatcagacccgcgcccgcccgcaagccacagcaaaactcttcaacgatccggcctgcttgcggtgtatcagacccgcgcccgcccgcaagccacagcgaggcttttgagccagagatatgcggcg

SEQ ID NO: 3422 - DNA, 5688 bp, synthetic construct
  misc_feature 1..5688: note = Synthetic
  source 1..5688: mol_type = other DNA
cagatacgctaaaaatgcggattcctttctagcggcaattcatatcaggtgtatttttttatgggctacaatctcgtgactatgctatctagtaactcttcaaaactaccacggtttttcgctcctgctgcatttgggctgaatcttgagactgtttctaaatcaaatcccttctgataaagctcatgtatggatttatgatttgcattaatcattactataaaagcccctctgcttcgagcgtctcgcacgaaatatcgtaaacgtttttgatcgttccacgcaaaaagcttctcattgtacttcgcaaatccattttgattgtgtcggacggtgtaaggagggtctataaatactaggtccccttttccttgattgagattcatttctctattcaagaaaaaaaccattttcgcctgaggcaaaatatgaggatgtggcaactaaacagttaaaattacactgtcttgaaattaaaaaggagaggtgttaaaagggaggtgagttttacagccccctttgcaggaggctggcggttctccgaagagttacctgcgaagcaatgcttcttgttatgaatgcataaagcaacacgggcggatatcggacgattgcgggtttattttataaccaatttagtctaaagggaagctaaaaatgagcaaacgtatcttaggcctagatttaggtgtggcatctgtcggttgggcattgattgaagaatctgaaacttctgaaacttctggaaacatattgggaggtggctctcgaatctttccttcggtgctcgaagccaaaagcgaacttcctaaaaatgcggcccgtcgccttaaacgcgccatgcgtcgtactcttaaccggcggcaaatgcgtcgggacaccttaaccaatgtattaaccagatcaggtctctggcccgaatctaaaaaagaccgtgatcaattgatagtctttagcccctatctcttccgcaaaaccgggctcgatcaccctttgtccctttttgagttggggcgatgtttccttcatatgaacaaacgccggggctttttaagtaatcgaaaaagcaaattaaccgggtttgaggatgatgcccgcattctcgaactaatccaaagagacgaacaagcggatgctgaggctacccccaaaaaagcccaaaaaaatgctacccaagaggaaaaagacctgggggctgtgcttggggaaatttctcaactcaaagccgcaatgcaagtggtcggtgcaagaaccctcggagagtatttggccgacctacccaaaaagcggggcactcacactgaacgagccatgtatcaacatgagtttgaacaactgtggactgcccagcaaacacaccatccaaacacacttagcgagggcctgaaagcggaagtatatcgggcccttttcttccaacgcccccttaaactgcaaaaatttttggttggcccctgcaccttggagccccagcgaaaacgagcggccaaggcttgtttagaatttcaggaatttcgtactcgccaagagctgaatcatttgctgattttcaaccctgatgagagggcgtaccggtgtttaagtgaaacggaaagggaggctatttttcagcacctccaaacccacgaccaaatcaccctaggccaaatccgcaaagccctatctttacatgcaggtgaacacttaaatttcgaggataaggagcacaaaatccctggaaatcgaacgtccgttaagttgcaaaaaatattaggaaccctttggcaaacattgggaaacaaacaatttgagttaattaccgatctcctcaccatcaacgaccgccgtgaccttttcaaacggcttgaaagtcattggaaactccctttagagaccgcttatcacctcaccatattggaactggaatcaggttattcaccactgtcgcgcaaggcaatttgcctgctccttcctcatctacgaactgggctgccctatgcccaagctttacagcaagcgggctatcacgccggggcaaaacctatcggagaggcggaagtcctcgcgcccccgcccaggaccaacaaccccgtggttggaaaggcactgaaccagacacgcaaaatagtaaatgccctaatcgccacctggggcctgcctgacgtaatccgggtcgaactgactcgggacgccaaacagggcaaaaaagcccgcgagcgtatccaaaaacagcaaaaagtgaatgaaaaattaaataacgaggcaaaagtccaattggaggaattggggattttgcagatcaccggtgaagccttactcaaatatcggctttgggccgaatgcaaaggagtttgcccctataccggccaaacgattactccagcaatgctctttggctcagaggtggacatcgaacacattctgccttactcgcgcagtttggacgattcatacatgaacaaaaccttgtgtatgtcctttgaaaaccgccaagtaaaaaaaggcctcactccctttgaggcctatggtgagacagaccggttccctgaaatccggcagagattgttggatttggaatcaatgccaagagaaaagaaaaaccgcttttttttaaaggataaaccgttagaagattggttggcccaatttactaatcgacaactaagtgatacccggtacatcagtttggaggttaaaaattatctccaacaattgggttgtaagatagaggtcaccagcggttcctatacggcagccttgcgccgcaaatggagtttaaacaacctttggcgcgggaagaaagacgacattcaagacgccccaaaatctcgcgacgaccaccgccaccacgctctcgacgccttggtgaccgccttgaccgatgtggggttgatgcagcggctgggcaaggcttcggcgaaatacggtcacttagccctggacgaccggcagttgcccctgcccgccccttggcccgatttggccgaacaaaccgaaaaatggctcaagaacatcattgtttcgcatgcccccatgcgcaagttgagtggggcactcacggaagaaacagcctacggcaaaggtaaagcttggctgaccaagggtgctaaaaaagcaaaagccgatgaacccgaagaaaccgagttggtcgaggttttagttcaccgcaaatctatttcagagcttaaagataccgaagtgcccaaagtccgcgatccctggctgcgaggtcttttagcggctcgtctggccgaatatggcggcaacgccaaaaaagccttcgccgagcccattttccataaagacggcaaaactccaatcaaaaaggttaggttagcaaatcggtttacagagggagccattttcccggtctccaaaggccaccccgagggaaccgattacaaattttatatattcggcaacaaccatcacattgagatcatcgaagacctagccaccgggaagcgtagcgggggcgtagtcaccgcgatggaggccgcaaagcgggtgcgcatcgaaaaaaagcctatggttcaaaccgatcacggccctgggaaacgtctagtctgctggctttgtattaacgacctgattagggacccaaaacctggatatgaaggaattttccgagttcaaaaaatggacaaccagctccatgtccatttccggcttcacaccgatgccacactggaaaagaatctaggcgcggggtctttcacgcccggttcctatcgcgggaccaagctttacattgatcctttgggccgcatcaaagaggctcgtgaataagcgaatcattgagattggacatgccgcatctttaggggtgtggcatcgacaattaaggatccaacgacctgaaatggacgaggtcactgctcctttggaagatctaggggtcttggtgctggaccatcctgccatacacttgagctttgcgttactgcgcgaatgtgccaaggaaaacattgccctaatcgtcaatgatgagcatcaccttccagtaggaatcctctctccgctggcgggccacagtctccatgcccaaagtttacacgcccaggttgccctcaaagccccacaaggcaaacggctttggcaagcaatcgtaaaagcgaaaatccgcgaacaggctaaggccttggctttggtatctgcccatcccataaacgaggttgaatatgttaaaaaagtagttagcggcgaccccagcaatattgaagcccaatttgccaaactttattggccaaagatgatgggctctgggttccgacgaggaggacaccagggcggggtgaatgcttgtttggattacggttacgcattattgcgttctttgtgcgcacgcgctctttgtgccactggactgcatcccgcactaggccttcaccatcgtaatcaatatgatgcccatgcattggctgacgatctaatggagccacttcgtcctttagcagacttggaagcattcaaaatcagggtagaaaaagagagtgaagattttgagttggatcaactagttcgccatcggctcttgggtttgctaaccggaacctgccttctcaatggggcgcagatgcccatttttgtaggggtagagcgctatgcagccagtttaaaacaggtaattatgggtgagactaaaaccttggagatacctgagtttgtacgccatcaaagtgagaatttatgattttcggaggaatgcgtagcatgtggattctagtcatgttcgacctacccgtcgatactcccgaggccaaagccgcttatcgggagtttcacgacttccttttagatgagggatacctaatgttgcaatattcagtttacgcgcgaccctgtgctagcgaagaagtgctggacgtacacgagtcccgcgcagaaaaacgcttacctgacgacggacaggtgcgcatcctgaaattcaccgattctcaatacgcacgcatgaaaactttttacggaaaaatacgtggacctactgaaaaagcgccagaccaactcacttttttgtagcccaaccgactgcgaagccttttgttgtctagattgccaagcgattagttacaatcatccgatatccgcccgcaattcacaacaggttggtcggagaccatcctttagaaaatgttacaatcatccgatatccgcccgcaattcacaacgtttcgctgtttgtgggtggattcgcaagggttacaatcatccgatatccgcccgcaattcacaacgtgttttaaatcgtactttaggggcgaaatgttacaatcatccgatatccgcccgcaattcacaacacctcgttacgcacgttgatcacgcccccagttacaatcatccgatatccgcccgcaattcacaacaaatgtgttggccgatgccgccgggctggggttacaatcatccgatatccgcccgcaattcacaacgcccccccggggggctggttggagatatggttacaatcatccgatatccgcccgcaattcacaactgtctcacttagcccgcttcggcggccatagttacaatcatccgatatccgcccgcaattcacaacagcaggcagcgctggccgccgacgctatctgttacaatcatccgatatccgcccgcaattcacaacccgactcttgccgaccccgcccttaagattgttacaatcatccgatatccgcccgcaattcacaactggtatttcggcaa

SEQ ID NO: 3423 - DNA, 24098 bp, synthetic construct
  misc_feature 1..24098: note = Synthetic
  source 1..24098: mol_type = other DNA
gtgccctgaccggcccgcggccctccgacccgttcgcatcagtagcttgcacccatggccatctccatcacctaccacggcgccgcgggcacggtgaccggcagcaagcacctggtcgaggtccggcatcgcgacggcgatgtgcgccgggtgctgttggattgcggcatgttccaaggcgaggcggtggaccggggcaaggtcgaccccaaccgccatttcggcttcgaccccgccgcagtggatgccgtggtgctgagccatgcccacatcgatcacagcggcctgctgccgcgcctggtggccgagggctttcgcggggccattcacgccacagccgccacgcgcgacctgtgcgccatcatgctcgaggacagcgcgaacatccaggaggccgaccacgcctacgacctcaaacgggccaagcgccagggccgcgccctcgacgaaccggggccgctgtacaccgtggacgaagtgcgccctgcgatggagcgcttcgaggcccacgacctgaacagacccttccccgtggtgcccggcgtcacctgcaccctcaccgatgcgggccacatcctgggcagcgcggccgtgcacctcaccatcgacgacggggagcgtgtgctgcgcctgaccttcagcggcgatgtgggccggtacgtggaccgcctgctgccggaacccgcccccttcccgcaggccgacgtcattgtgtgcgagagcacctacggcgatcgcgaccatcccgaggtcgcacaggccgaggaggaactgctgcaccatgtccaagaggcctgcgtggtgcgcaagggcaagctgctgatcccggccttcagcatcggcaagacgcaggagatcctgtacacgctgaaccggctgagcaaccaggggctgctcccgcgcatccccgtcttcgtggacagcccgctggcgatcagcgccacggggatcgtacgccggtacagcaaggccttccggccggcggtccgtgccgagctggaccgcgatgccgacctgttcagcttcccgggcgtggagttcgtgcgcaaccccgagcgcagcaagcagctcaacagccggcaggaaccctgcatcgtcatcgcggccagcggcatgatggaggccggccgcatccgtcaccacctgcgccacgggctgcccaacgcgcgcaacacggtgctggcggtgggcttctgcgcgccgggcaccctgggccacgagatcctcgagggccgcgaggtggtccacatcttcggggaaccggtgccggtgaaggccgccgtgcaccgcatgggtttctacagcgcccacgccgaccgcggcgaactgctgcgcttcctgggctgccaggacccggcccgggtgcggaagctgttcctggtgcacggcatcaagtcctcgctggaaggtctgcgcgaccaatgcgccgccgccggccatcgcgacatcgcgatcccgcacaaggggcagcgtttcgagctctgatcccgacggccaacggcggcacgaaccaccggtggctgtcccctggtccgatcccaggccgggggcggccgctatcgatcgccccctctgccgatgaccacgccggccgtggcgtaccaggtgaggttgtgcgggtcgtcgtaggcgttgttcagcccgtcgtcgtccagcaccttgctgaggcccacgctcacaccgccctcgagcgcgatgaaccagatgtccagcccggcgccgacatccaggttgaaggatcctgcggacaggtcgtcccggttccacgcgatgtcgtcgtcgctgttgtccacgctgagcagcacgtcgtaggtggggcctgcgttcagccgcagcttgaagccgtccttgtgcaccaggttgaagcccagcagcgccttggccttgagcaccgtgcgcaccaggtcgttctccaccaggaaggtgtccagcagcagggggacctgcacctgcacgatggtggcctggcgcccgatgtgcagcccgggctggaagtacacccgtccgccgatccgcaggtccactccggcctgccagcccaggtcgcccttgtagtcgccgtggtccgggtcgccctgcagggtctgcacgagcaggcccgcctgggggaccacctgcagctgggcatgggccggggcgctcatcaggagcggaagagcgacgaccggcaggaggcggaggctgaagcgcatgcggcggaaggaaagggtgaagctacgccacctcggatcaggtgcaccacggcggagcacccacggtcgccctggcagtgcccggtcaggcccggaagccgagcgcctggtgcacagggtcgggcaggggaggcagtttgcgccgctcgaacaggaagctgctcaggtcggcgatctccttgaagacgtagtggctgtccagcgcacccttcaggtagccgctccccgagctgccgcccgtgcccatgcgcagcccgatcatgcggtgcaccatgtcgatgtgccgcgcacgccagcgtgccaggttgctgtccaggatcaccagggcgtccaggaagcgatagggctgctggaagatgggctcgtcgcggtacagcatgatgaacagcgcgctccttgcggctcgcggcgagaaatggcgcgtggccgacccctggatgaagatctcctcccacaaccgggcgttgccttcctcgccggccaccagcgagcccttgtacaggctgctcagctgttcgaagaaggccgccccttcgggccagtgcttctcctgcaggaaaggcatgcgctccagccaggcgttcaccagctcgcgcagcgtgcgcttggactccagcgcttcgatgtccgccttgtgctcgggacgcagctggctggtgtagtactgcttgccatggcggtcctccatgcgcaggcccagccgagcttcgagcaccttgaactgcaggctctggaaaccgctggccgggcgcagcatgtcccggaagtccaggaagtccaacggcgtcatcgtgtccagcacgccgagctgtttcaccagcacgtccaggatcgtgttcacccggttcaggcggtgcaccgcgatgttcagctccccgccgttgtcgtccacccgctggtgctcgaagatcccgatcacgctgcccacctcgtgcaggatctgcttgaaccacagttcgtacgcctggtggatgacgatgaagagcatctcgtcgtgtgcgggcttgccgtgcttctcgctctccagggcctgcgcacccaggatcttgtccagttgcaggtagtcggggtagtacacgttggacatggttcgtcggggtctggtccggcgggccgatcggtcgtgaggcccgctctgggtgcggcgaaaataggtgctgcaggaccgggccgctacctttggtccatgcgccgccccctcgtgctgttgctgccggcccttgcgccgatgctgctgggcgcgcaggacggcggggcgcccgtgcggcaggacgccgaccgcgggcaggcgttgttcgaccagggcttccgccaggagcacgcggcggacagcgtggtgccgcccgcatggccggagggccgggccgcgctgctccgcgaggtgcaggcccggatgcgttatccgcaggaggcccgggctgcgggtgtcgccgggcgtgtggtcgtggccttcaccgtgagccccgagggaacgccggaacagctgcgcgtacagcgtccggtgcatccgctgctggacgccgaggccttgcgcgtggtgggcaccctcaccggatgggtcccgggcgcgcggaacggtcgcccggccgcgatgcgcgtgcaagtgcccgtcgccttcggcaccacgccgtgacggcgggcgcaggtctgtacgaaggtcaggccacgcgcaccttcagcacgtcacccgccacctccacgggataggtcttgagcccctgctgggaagggcccttggtcaccttgccgtccatgtcgaagatgctcccgtgccagctgcacaccagcgtatcgccggaaggcttcaccggaccgcccttgtgcgggcagtgcagcaccagcgccttgtaggtcccgtccgtgcccttgctgatgtacagcttgttgtcgaggcccttggcgctcaccaggcccacaccgttggaaaggctggcgaccggtatgctgagcacgccgttctccacggccagggccgtggaacccgcggccttcgcggtggaacagctctcgagcgaggcgatcgcgggcacggcggccagtgcggcgcaggccttgcagcccgcaaggaggaaatggcgtcggtccatggtgtcgggtttgatcgagcggcaagatagcggcccttccggaccgcggccccaggaccgtcgttcacaaggcttaacacggcaacgggccaaggggcggcggatcaccgtaccttgcgctaaaatccgacctcaccccatgcgcatcctcctgaccttcgccgccgccctggccttcctggccacggcttcggcccagaacaccgccacggacaaggcggccaacgacaaggcacctgccgagaaggcggccgccgtggcccccgaagcgggtggtaccaccctccaaccggccggtgagaacaaggcccattcctgcgcgggtgccgccaaggcgggctgctgcgcgggcaaggccggcgccaaggccgatgccaaggcttgcgccgggcacgaccacaaggcccacggtgaggcccatgccgggcagggtgcccacggcgatgccaaggccggttgctgtgcgggcaaggccgatgccaaggcctgtgccgggcacgaccacaaggcccacggcgaagcccatggcgagcacggtgcccatggcgatgccaaggccgccggttgtgccgataaggccaaggccggttgctgcgcgcacaaggccggtgccaagaccgatgcccagccggccccggcgaacaagtaagcggagctcccgctgtgccatgaggccctccgacccggtcggggggcttcgtgctttcagcccaggaagaccagctccatgcgctcctcagggcgtagccgcagatcgcgcagcttcagctccagcagccagcccagcaccgggggcgcatccgcgcgcagttccaccggcacatagttccagttgcggatgttgcggaacagcgggtcgggccaggtggggttgaacagcttgctgaagcggaacacctgatggtcgatggccagctcacgaccgctcccgtcgtatgcactggtggtgaccacgagggccgcgcggttcaggcgccgctgccatgcggggtcggcggtggcgaagaaggcctgccgcagcacgatgcgcggccgctcggaggcgctgaaacgggcttcgggccgtgcggggtccagggtgatgtgttggacgcccatcggtcagaaacgaacgcgcagctgcagcttcacatcgctgcgtgtgccgccggcgatctcctgcagccccgaactgatgcggtcggtgtcctggaacaggaaggcgccgtagcgcagccacaggtccacccgccgcaccggggtgaggcgcagcatggcgtaccagcgcatgccccgcccgtagtgcggtgggatgctgaacacgccgatcaggtcgttctcgtaggcgtacagccgggcgtcgtacccgtcggtgtcgaagagggccaggcgcagggtgagctcccaccagctgcgcagcggccggtgcaccaggtcctggtacacgatgaagccgtgctccacggggctgtcgccgcgctgcacgtccaccgcctcgacccgggtgcgcaggctcaccgccgggctcaccttgtaggcggcgttgaaccgccagttggtctggcgccgccgcaccagcggatcgatgccgttcaccggttcctcgctgttgtaccctttctgctcatgccggccgcgcaggtacagctccacctgccggctgggccgccaggtcacctgcgccagcacgtcgtggccatcgcttgggccgttcacctggtagcgcagccacgggaaacggtagtggtcgaagtaggcgttgatggtccatttgcggtccggccgcacttcgatgccggtgtacaggccgcgttcgttccaggggttgccgccctcggcgaagcccacgctgttcaacccgtggaagtcgcgctggtagtcgcggtacaacagggccagcgtcacccggcggtccacggccaccagggtgcccaggttcagcgcccagcccgtgttgccgtcggcctgcggcaggctggcggccacttcgccgaaaaggctcgcgttgcggtacaaccagctgaagtcgctgcccaccgtggtgttgtgctgcccgttgaactcgaagcggttgtacggctgcagcgtgcgcgcaagcaccccgtcgtagcccacgtgcgccccggtgagcccccagctgaagctgcgccggcggtagcgtaggtggccgccccaggcctgttcgaggatggcgtccttcttggccagctcattgaaggtgcggtgatagccgtcctcctggaagctgctgaagctcacctgcgcatcgtccacatcgctgctgtccacctcctgctgcacgttggcgtccaggcccttgaggctgtagaacacggtgaggtccaggtcgcggtgcagggccacggtggcggccagcccgcggttgaagaggttctcgttgacgctggtgtacggcatcagcccggcggcattgcgcttcacgttgaggctgaaggaggacttgctggccaaggccaggccgctccagtaggtgaggcccagcccgaactgcgcctggtagtcgcccacggccagcgccttcagccgcccgaaatggcgcaggaagaggtgcgcgctgtagaagtcgaagccctgttgctgcgtgccgcggaagaactcctcgccctcgtccttctcggcggtgaggccgatgctgatgttgttgcgatagcggaaacggtagcgggcgtagagcttgtacgggtcgcccaggtagaggcggctctcgcgccgcaggctgtcgcgcacggccgggtcgcccgtgtcgggcagggcatcgccgtccggatcggtataacgcccgccgaacagcccgcggcggtccatgcctccgcgccgcgcctccacgttcacgatcgtgcgcagcatcacctcgtgctcgccgttgcgcaggatctccttgaggctcgcccgcgaccgcagcgcgtcctcgcgcacggtgatgaagggccgcaccaaggccagcgtgcgcgcgtcccacgcatcgatggtctgcacctcgtacacgctcagcagcctgccgttgcggcggatgtggtcgaacagcgcgccgatctgcacgtcggtgagcagcgccaggctgttcagctccccggcatcggtgtggttcaggtcgatcgggtcgcgccagcggtcggtgaggacgtcgaacaggttggtcaggtccacgtcgctgtcgtcgcccagctgctcggtggccgcctcgatgcgttgctcgatcaggtcgcgcggcacgccctggtcctcctgggcccggaccgtgacccaggccgtggtcgcgagcaggacggcggtcaccgttctcatggaaagcggtagctgaggcccagctggggcgtggggccgagcaggctgcggaaggccaccgccaggtccaggtcgaagcccttcaggcggacgcccaccccgaagtggccctgcacggcgccggtgctcacgcccgtgcgcaggaacagggcgttcaccggatggtattccagccccgcgtggaagcgctcggcctggtcgatgtccttctccacttcgccggtgagcaccagcttctcgctgaaggtgtagcccagcccggccttgaggacggtgggcacccgctcgtcgtacggcccgcccaacgcggcgcgcgaagggttgtacaggtgtgcgcccacccacaggcccccggtgagccgtgcctgcacgcccacctcgcccgtcacggtgctgcggcttccgtagccctcgcccaggcgcacgctcaggtagtccagctgcacgcccacccgcagcccttcgccgaagcgcatggcataggccacgcccacgctcgtttcgcggtacaggtcgtagcccagcgtgctggcgttcaccgcaatgctgccccggcccaggggcagcgcggcggccagcgcctggtggtcgagcgattcgctgagccagtgccgctgcatgaagacccccacggcaggacgggtgaggcctgccaggccggcctggttgtgctgggcgctccacaggtccaccagcgtgaggcccgcctggcccatgccggcgatgcgcgcccccaccggcgtgtggtcgcctccggcccgcacggcggtggccagggccagggcgagaaggcacagcgggcggcgcatggtgccgaatgtatgcggaatggcgcaggccccggcgtcccgcccccttgccgccgacccacccgcgcttgcaccgacccccgcaccgttgcctaccttcgcatccctcccgcagcgccccggcatgtccgagccccccacagccgcccgcgtacgcctgcacgacaaggagttcgtgccctacatccccgcagccgacctggatgcggcgatcgaccgcgtggccgccgcgctggaacaacgctttgcgggacggcggcccctcttcctgggtgtgctcaacggtgccttcttcttcgccgccgagctcatgaagcgcctggagatggagtgcgagatcagcttcatcaaggtggccagctaccacggcaccagcagcagcggcaccgtcacccagctcatcggcctcagcgagcggctggacggccgccacgtggtgatcgtggaggacatcgtggacaccggtggcaccatcgcccacatcatggacgcgctctccggccttcatccggcgagcgtcagcgtggcggcgctgctcttcaagcccgaggcctacacgcgtccctggcccatcgagcacgtggccctgcgcatccccaacgccttcgtggtgggctccggcctggaccacgacgggctgggccgcaacctgccaggcatctggcgcatcaccgaatccgcaacatgagcaagctcaacctcgtgctcttcggcccgcccggcgccggcaaaggcacccagagcgcctttctgatcgaacgctacggcctggtacacttcagcaccggcgacctgctccgcgccgagatcaagatggagacccaactgggcatccaggccaaggagctcatggaccgcggcgagctggtggccgatgccatcgtgatcggcatgatccgcaacgccatggaggccaacctcgaggcccgcggcttcatcttcgacggcttcccccgcaccaaggcccaggccgtggcgctggacgagatgctcgcctccaagaacgaacccatcacccgcatgctggccctggaggtacccgaggccgagcttgtgcagcgcctgctggggcgcggcgcctccagcggccgcagcgacgaccgcgacgaggccgtcatccgcaaccgcatccgcgagtacgagcagaagacggcgcccctcaaggaccactacgccgcccaaggcaagttcaccgccatcgacggtgtgggcagcgtggccgagatcaccgcacggctggtgaaggcgatcggttgaggcggcccggcgaacgaccgcggcgcctgtgccccggcacatgcgcacccgtgcactccttcaccaagcgtgcggtccgcacctggtccggggtgcgcggtcaggcaccgggttggcttccgttgtccgccgcgcagtaatgcgcccggccgacgatacgacggccggacacttgctaccgccgtgaagttgaggaaccgcctggtctgaaaatactgcgaccccgacaagtcggggccgcagacaagcctggaagcttagttctcacaacggaatcatccttattgtgaaagacttcaggtcagcgcaagaatagcacattttttctactttgatcgcgcacacctggtcatcgttcttgaaaggcacgatgggctcgtgtgccataccattcatgcacatggaaagcaagaacgaactgatcgttggcctggatgttggcagcaacagcgtgggctgggccgtggtggaaatgaacggtgaacgcctggagaagatccacggcatgggcagccgcatcatccccatgggcgatgaaaagaaggagttcgaacaaggcgccaagatcaccaagaacaatgcgcgacggcagaaacgcagcatgcgccgcaaccaccaacgctacaagctgaggcgggcgaacctggtgaaggtgctgaagctcatggatgcctggccggatgggcttggcgagcaagcgcgaccggatgagccggtgatgacaccgctgcagatatacggcctccgcgcgttggcggccatggaacccgtctccctgaaagaatgggggcgcgtgctctaccacatgaaccagcggcgcggctacaaggacatcggcgacctgatggacgagcaggacggagccgcacccggggaagcgaaggacgatggcaaacgcatcgaacgggtgttcatcgagtcggtggaggtggacgacgacaagggcaagaaggtgaagtacctggtccggctgggtgatggccgcgaaggcacctgcacgctggagatcatcaaggacatggtggggacggaacaggaactggaggttgccacgaagaagaacaaggatggcgaacgctacgagttccggcttgcgcagaagaccgattggcgcaagggcatggaaagcatcaatgccgccattgatgcgagcggactgacacccggtcagtacttccaccagcaactgaaggacgatgcgttctaccggatcaaggagcgcatcgtgctccgcgacaccttcaagaaggagttcgataccatctggacacggcaacggaacgaacactccgcactgaccagcgatgtgctaagggacaacgtggtaaaggccttgatcccgaacaacctggccgagcagaccaagtggttgaaaaaggacctgggcagcttcatccgtgactacgtgatctactaccagcggcccttgaagtcgcaggtcggtaacaaagggcaatgccgtttcgagacaggtgtgctggccaaggacggcaagaagggcattccgcccaagcccgtgatgccggtgagttcgcccatcttccagctgttccgcatctggcaacaggtgaacaacatccgcctgatcgacaagtacgccagggaacaggagctcgccgccaacgaacgcatcgccgtggtggagcacctgctgcagcgccccgaactgaaggcggacgatctgctgaaggtgatcggacgcaagggtgaaccgatggagaacaacctgcgcgccaacctgcccggccaccagaccttggccaagctccgcccggtgctgaagaagaccgccttgctgaagcgtttggaacaggaggccacagcactgagagaaccgcagaacaccctgctcttccgcatctggcacatcctctactccgtccccatggcgcaggaccgggaggatgcgctgaaggccgtgaaagaggtgcctgctgaatgtgtggccgaactggccaaggttcgctttgagcgcaagcacggcgctgtatccgcgcgggccgcctcacgcatcctgcccctcatggtctgtggtgatgcttggagcgctgagcatctgcaggaacgcgacaagcgccggatccatgaggtcatcgacaagatcggcactggcgaagagatagaccgcctgccgaacgaggtgcgggtgcgccttgccgcatacacctcattggaccactatcaaggcatgccctactggcttgcggcaagtgtgctctacggagaccaccgtgccgccaccgcaaagcccttcgacaagcccgaggagatcaaaacgcttgggcgcggcttcatgcgcaaccccgtagtggaacaggtggtgaacgagaccctcatgatcatgcgcgacatctggagcacctacgggcggcccaccaacgtgcgcgtggaactggcccgggaactgcggcagaaccagaaggagcgcaagcgcaccttcgataacaacaaggaccgtgacaaggcccggaaagccgtggtggagaccctcatcaaggagttccaccgccccaaacccagccgcaaggacatcgagcggtacgaactgtggctgcaacaaggcatgacctgtatctactcgaacaagccgatcaacaagagccaactgttcgacagccgggacacggacatcgaccacatcatcccccagaaggtctattacgacgacagcatccagaacaaggtgttggtgctgcgccaggagaacgccgacaagggcaagcaattgggtgcgctttacatgaagagcaaggggccgggtgcgtacgaggcctatgtggaccgggtgaacaaactgaaggccgggcgtcagaagaagaagtacctgctggccgaggaggtgccggagaacttcatcaaccggcaattgcaggagacgcgctacatcggcaccaaggtcaccgaactgctgcagcccatctgcaccgtgaagagcaccctgggcatcgtgaccgatgcgctgaagaatgaatggggcttggacaaggtcttcaaggaaatgctcctcccgaggttcgaacgcctggaagggatcgccaagcggaagctgatcgaagagatccccctcaccaacggcaacaaacacaaggattggaggatcgaaggctacgacaagcgcatcgaccaccggcaccatgcgctcgatgcgttggtggtggcgttaacgcgccagggctacatccagcgcctgagcaacctgaaccagatcgaggccagcgacgcggagaaagaggccatgaagcgccccacctggtacccgctgccccacccggacctccggaacatggtgcgcacacaactggaccgcaccatccccagcatcaagaaccggcaacgcctgctgaccaaggccgccaatgccacgcgctacctggtcgatccggtatcgggcaagaccgacctgcgcaggcagaccgagggcgagctgcgtgccgtgcgcgggccgctgcacaacgagcagcccatgggcgaggtgcgggaacagcggaaatggctgctgaaggatgtgctggccaggctgagcgaaacacgcgatgccctggaagccctgaaaccgacgcaacgcggcgatgccgaccacggcgatcggttcctcgcccatgaacacgagcgcgccatgctgcacgcgcacctggccaggtacaacggtagcgtggaggccatgaagaaggcactgaagaaggatcccttggtgaacgcgaggaacgagcgtgtggaacagcttaccgttctggtgcccaagtacagcatcacgcggaagttctccgcactgttcaccgaaaagatggcgagcaagatcatcgacgcgcaattgcgcaagcgcgtacaggaccatatgaaggcctatggcaacgaccccaagaaagccttcaccgccgaagccatgcacgtgttcaaccaagggcaaaggatcccggttacctcggtgcgttgccgcatggacgatacaccggtaggggatgccctgggtcgggcgcgcctacagcacaaaggcgatcccaaccgcaagcaacacgtggagaagggcgagaactacgcactggccgtgttcgtgaacgaggagaccggagcgcgggagttcgaggtggtggcgttctatgatgccgtgcaacgcaaattgaaaggactggacctcgtggacccacgccccgggtaccgccacttcttgttgcgcaagaacgacctggtctatgtgcccaggcccggtgaggatgctcgtagtgtgaactgggacgagcgcgatgcggtaaccccaaggctttaccgggtagtgaaattctcgggcgatcggcattacttcttgcctgcaactgtttctgctgtggtcaatctccccgataccgagaacgagttcttcagtccgaactgtatcgaaaagatcaaggaggatgtacctgaaacccacatttcggatgtctgcgtgagcgtctccgtgcttcggacaggggggatccaggttcattgttaatgatcaagcgcaccctgcatatcggcaacccgtgtaccctgcgcaggcgagaggggcaactggtgttgcaatacgccaaggacctgggcctgccggaaaagacggtgccgatcgaggacatcggggtgctgatcctggaccaccagcaagtagtgatcacgcacatgttgctcggtgccttgctggagaacaacgtggccgtgatcacctgcaacgagcagcacatgcccacgggcctgctcttgaacctggacgggcacaccgtgcagaccgaattgttccgccaccagatcgaagccagcgaacccctgcgcaagaacctgtggatgcagaccgtgcaggccaagctgcgcaaccaggccgctctgttggagcagatcggcattcccggcgatgtgttgcgcgagtatgcgaagaacacccgcagcggcgacccggacaacatggaggcacgcggtgcggcgcattactggcggcacctctttcccgagcacctccatttcgtccgccatcggcacggcgagccgccgaacaacctgctcaactacggctacgccatcctgcgggccacggtggcgcgcagcctggtgggcagcgggctcctgccgaccctgggcatccaccaccgcaacaagtacaacgcctactgcctggcggatgacgtgatggagccctaccgccccttggtggacgagctggtgcggaaactggtggtgcaggaccggatcatggccaaggacctcaccacggagatcaagggccgcctgctccaggtgcccgtgttggacgtggtgatcgacggcaagcggagcccgctgctggtggccgtgcaacgcaccaccgccagtctggcacaatgttttcgtggggagttgcgcagaaccttgtaccccgatccaccctgatcggccatgggcaggctcgatgaataccggatcatgtgggtctttgtcttcttcgacctccccaccgacaccatcaagcaccggcggaattacgcgcggttccgcaagcaattgaaggaggacggcttcaccatgctgcaattcagcatctatgtgcggcactgcaacagccacgagaacgccgaggtccacatcaagagggtccaaagcatcctgccccccgtgggtgaggtggtcgtcttcaccctcaccgacaagcaattcggcatgatccagttcttcgaaggcaaaaagaaggccctggccccggacaccccgcaacagttggaaatgttctgaccagcccttggatgagaccgaggcctatgcctatgcaggtgggtctgaaatgcgaaaggccccccgtgttccggagggccttcgccgctgtggcattttttccatcgttcccgtagccccgaaaccgcgtggctgtagcggttcagaaggacgctggtatcacagctcgtcaaagatcttgacctgaaagcctttcacaactggtacaagcaggcctccaggccacaggccggtatcacagctcgtcaaagatcttgacctgaaagcctttcacaaccttttcgcccctttctcaaagatcttgacctgaaagcctttcacaaccttgtcgaagtaagcccggcgggtgcgcggggtatcacagctcgtcaaagatcttgacctgaaagcctttcacaacagggcgttggtggacagctcgttctccctgggtatcacagctcgtcaaagatcttgacctgaaagcctttcacaacctgccctttggtggagtgacaatcagcaaggtatcacagctcgtcaaagatcttgacctgaaagcctttcacaactggcacgatgccgccctcgcgcttcttggcggtatcacagctcgtcaaagatcttgacctgaaagcctttcacaaccgcgaaggcccagcacctctacccggtggaggtatcacagctcgtcaaagatcttgacctgaaagcctttcacaacaagcccgcgaccatcgccccgtatgacttggtatcacagctcgtcaaagatcttgacctgaaagcctttcacaactgcatcaaatatagggtgcattacgcccgggtatcacagctcgtcaaagatcttgacctgaaagcctttcacaacatcgaaatcaccactgcgggtgatgaccggggtatcacagctcgtcaaagatcttgacctgaaagcctttcacaacacggtaagcgccgtggccccgcatggcgttggtatcacagctcgtcaaagatcttgacctgaaagcctttcacaacctctactgcgtagatgatctccaggatgtcggtatcacagctcgtcaaagatcttgacctgaaagcctttcacaacgtggagcgcccggcgccgtgacgatacctgggtatcacagctcgtcaaagatcttgacctgaaagcctttcacaacaccgacgtcacgatggcacatcgctctccgggtatcacagctcgtcaaagatcttgacctgaaagcctttcacaacccagctattgatcagctccacatgcgaggaggtatcacagctcgtcaaagatcttgacctgaaagcctttcacaaccatagttgacgaaacagcatgaatgtgtacggtatcacagctcgtcaaagatcttgacctgaaagcctttcacaacctccgatggcgactggatcttctacgatgaggtatcacagctcgtcaaagatcttgacctgaaagcctttcacaacctctgcgctctgcgagcgccgcccatccttggtatcacagctcgtcaaagatcttgacctgaaagcctttcacaacctgcgcgatgccgacaactacaccgcgcggggtatcacagctcgtcaaagatcttgacctgaaagcctttcacaaccagcgtgggcagcgtgtctgagccgtggcaggtatcacagctcgtcaaagatcttgacctgaaagcctttcacaacagcgtcaccaccatccttgaagcctacccggtatcacagctcgtcaaagatcttgacctgaaagcctttcacaacatccaccggcgggttggcgacggcggggcgggtatcacagctcgtcaaagatcttgacctgaaagcctttcacaactgctccacgcccatcagcaccggtgggatgggtatcacagctcgtcaaagatcttgacctgaaagcctttcacaaccgagatcaagctggccatcctgtggctcaaggtatcacagctcgtcaaagatcttgacctgaaagcctttcacaactacaacaccgctaccaatgcagtgctcaaaggtatcacagctcgtcaaagatcttgacctgaaagcctttcacaacgccggacttggcgaacaccccgccgcgctcggtatcacagctcgtcaaagatcttgacctgaaagcctttcacaactgcggtcaccaaggtgttccatgctgcgaaggtatcacagctcgtcaaagatcttgacctgaaagcctttcacaacccgccatgggctggaagaagatcacgaaacggtatcacagctcgtcaaagatcttgacctgaaagcctttcacaactccgtccggccaggatacactcaagctataggtatcacagctcgtcaaagatcttgacctgaaagcctttcacaaccatcatcgtgggaggtgctacggttcaggcggtatcacagctcgtcaaagatcttgacctgaaagcctttcacaacctgcggttggtgatgtcctccgcccacaagggtatcacagctcgtcaaagatcttgacctgaaagcctttcacaacctggtttacggctgcctcatccggccggcgggtatcacagctcgtcaaagatcttgacctgaaagcctttcacaacttggaaccgcccgtgaacacatccagtggcggtatcacagctcgtcaaagatcttgacctgaaagcctttcacaacgggcctgaacggaggttgttgagtcgtaccggtatcacagctcgtcaaagatcttgacctgaaagcctttcacaaccgtgctcaggtccttgatgcgctcgatcgtggtatcacagctcgtcaaagatcttgacctgaaagcctttcacaacggaaggcctcgggatcggactccagggcccggtatcacagctcgtcaaagatcttgacctgaaagcctttcacaacgaacacgcaagagcaggaggaactgaagacggtatcacagctcgtcaaagatcttgacctgaaagcctttcacaacacaggtgtagcggggccccttcgcggccttggtatcacagctcgtcaaagatcttgacctgaaagcctttcacaaccacttcctcctggaagatgccggccttgtaggtatcacagctcgtcaaagatcttgacctgaaagcctttcacaactcgccattgtagtttgctttttccgtttcgggtatcacagctcgtcaaagatcttgacctgaaagcctttcacaactgcgggcacaggaccgcatcagccgcatcgggtatcacagctcgtcaaagatcttgacctgaaagcctttcacaacgcagggactggcgaagtcccgcgccggggtggtatcacagctcgtcaaagatcttgacctgaaagcctttcacaaccaccatcggcgagcgtggtccacgcagttgggtatcacagctcgtcaaagatcttgacctgaaagcctttcacaacgtgccctctgcatgtcgccgagcgcatggggtatcacagctcgtcaaagatcttgacctgaaagcctttcacaacccgcaccgcgctgctgttgcaggttgccttggtatcacagctcgtcaaagatcttgacctgaaagcctttcacaacgcctccgccggcggtcctgtgatgggcgtcggtatcacagctcgtcaaagatcttgacctgaaagcctttcacaactgaactggagtgggcacggaaacaagaggcggtatcacagctcgtcaaagatcttgacctgaaagcctttcacaacaacaccaggtagacgcctgcgccggacacgggtatcacagctcgtcaaagatcttgacctgaaagcctttcacaactgtgctttataacttagacgaagaacagcaggtatcacagctcgtcaaagatcttgacctgaaagcctttcacaacggcgatgtagaagtgggtgtagcggtcgagggtatcacagctcgtcaaagatcaacctgggcgcgcagggcgccgaggtcggtggcggtatcacagctcgtcaaagatcttgacctgaaagcctttcacaaccagctccaactggcggccggggtcgtattcggtatcacagctcgtcaaagatcttgacctgaaagcctttcacaaccatctgcagtgcctggaggcgttcgcgggtggtatcacagctcgtcaaagatcttgacctgaaagcctttcacaaccacgcccaccgtgggcggatattacctcgtggtatcacagctcgtcaaagatcttgacctgaaagcctttcacaactggagcggcgtactgcccaacacctgatccggtatcacagctcgtcaaagatcttgacctgaaagcctttcacaacgaaccctgcgcccagtgcgggcctttggtgggtatcacagctcgtcaaagatcttgacctgaaagcctttcacaaccggtcgacatctgggagctcatctgcgcgaggtatcacagctcgtcaaagatcttgacctgaaagcctttcacaacaggggtaccgtaggcgtggatcagccaagaggtatcacagctcgtcaaagatcttgacctgaaagcctttcacaaccgcagcgttcagcagggcgcaactttccttggtatcacagctcgtcaaagatcttgacctgaaagcctttcacaacaagatgacactccgaacgatgtacctgcaggtatcacagctcgtcaaagatcttgacctgaaagcctttcacaacctaccttttcgctttgccatgggtcgcaaaggtatcacagctcgtcaaagatcttgacctgaaagcctttcacaaccaactccagcaccgtggctgccgaaccccgggtatcacagctcgtcaaagatcttgacctgaaagcctttcacaacggcgatgtagaagtgggtgtagcggtcgagggtatcacagctcgtcaaagatcgtcaaagatcttgacctgaaagcctttcacaacatggtatcgggtatgttcaggcttgaggccggtatcacagctcgtcaaagatcttgacctgaaagcctttcacaaccgcttgcggccgatggccttctgccctccgggtatcacagctcgtcaaagatcttgacctgaaagcctttcacaacgaacaccggcatccggccgacccctgccgtggtatcacagctcgtcaaagatcttgacctgaaagcctttcacaacccgatgcgttgtgtgatgcggtggacgaggggtatcacagctcgtcaaagatcttgacctgaaagcctttcacaacatgtgccggggttacttggcacagaacggcggtatcacagctcgtcaaagatcttgacctgaaagcctttcacaacatcgacgagcgggtcatcagccgcgccgcccggtatcacagctcgtcaaagatcttgacctgaaagcctttcacaaccatgatgatgcgggcgcggaaggaggcaccggtatcacagctcgtcaaagatcttgacctgaaagcctttcacaacgatgcgggcaccgcctccgatgctggcgcgggtatcacagctcgtcaaagatcttgacctgaaagcctttcacaacttatcgcgaacggttccggcgaacatttacggtatcacagctcgtcaaagatcttgacctgaaagcctttcacaactggtccatactgagagagcaaagcggatcgggtatcacagctcgtcaaagatcttgacctgaaagcctttcacaacgacgttggcgccatatccgacgctggcgccggtatcacagctcgtcaaagatcttgacctgaaagcctttcacaactgcgtaggtgaagccgggaaggtggacggcggtatcacagctcgtcaaagatcttgacctgaaagcctttcacaacggcctatcgcatcgcccgcgccttcaccggggtatcacagctcgtcaaagatcttgacctgaaagcctttcacaacttcggaacctcgaagccgagggccacatagggtatcacagctcgtcaaagatcttgacctgaaagcctttcacaacacctcccgatcgtgccatcgggggaacgctggtatcacagctcgtcaaagatcttgacctgaaagcctttcacaaccgcaaagcgtctcttggtggcggacgcggaggtatcacagctcgtcaaagatcttgacctgaaagcctttcacaaccggatcacccgtgcccgcacccgcctgtcgggtatcacagctcgtcaaagatcttgacctgaaagcctttcacaacatccccaaccagcccctcgcgttcaacacgggtatcacagctcgtcaaagatcttgacctgaaagcctttcacaacccacatcgagcgcttcatgcgccacatcttggtatcacagctcgtcaaagatcttgacctgaaagcctttcacaaccagggatgcgctctccacatgcttgaaccaggtatcacagctcgtcaaagatcttgacctgaaagcctttcacaaccctggtggaccaggagggcgcccgcgccgtggtatcacagctcgtcaaagatcttgacctgaaagcctttcacaactgcgcccgctggatcggcgaacgcatcaacggtatcacagctcgtcaaagatcttgacctgaaagcctttcacaaccagaagaccaccggcgacggcggcgcggagggtatcacagctcgtcaaagatcttgacctgaaagcctttcacaacgggggcgcgggcggcaggtgatgctgcgtaggtatcacagctcgtcaaagatcttgacctgaaagcctttcacaaccgccgggtctccgcgcacggtggagatgtaggtatcacagctcgtcaaagatcttgacctgaaagcctttcacaacaggcatcaacgggactgaggcgtgggagcgggtatcacagctcgtcaaagatcttgacctgaaagcctttcacaaccgttgctctcccagtatggaccgaaaaattggtatcacagctcgtcaaagatcttgacctgaaagcctttcacaaccacgtcgctcgcgtcctcggtgtcgtcgacggtatcacagctcgtcaaagatcttgacctgaaagcctttcacaacgttgaggacagcagcacgccaggtgttgaaggtatcacagctcgtcaaagatcttgacctgaaagcctttcacaacggcaggcagcacccccaccacggccgccacggtatcacagctcgtcaaagatcttgacctgaaagcctttcacaacctacccgggatctacccccagacgagaagggtatcacagctcgtcaaagatcttgacctgaaagcctttcacaaccaccctgtggcagcgcttcctgcgggatgcggtatcacagctcgtcaaagatcttgacctgaaagcctttcacaacaagctactgacgcatgccagcatcctcccaggtatcacagctcgtcaaagatcttgacctgaaagcctttcacaactccaagtcgcaagcccaggacagcgagtacggtatcacagctcgtcaaagatcttgacctgaaagcctttcacaactcccttacgctgttgtcggtaaggacaaaaggtatcacagctcgtcaaagatcttgacctgaaagcctttcacatcggtggtgcgcaggtcgagccaggtccctgtcccgtgccggcgaccggcatcggtcgaaggggaaggtggccccggccgctttgttcgtcgatggccgtgggcggcggtattcggcgtgcttccggcttgcgcctctgacctacaggaggtgctgcagcttggccgcggaggcgtgcagggtgccctcctggcgcatccgttccagcgctgctggggtctgcccggggctgcggtcctggcgttcggtatgcgggaatgaaggtgcgtacgtaccgggagggcggcgcggcaggggagaagggcggcctgggggcgttcgtgcgcggcgccccccttccttcgccaatgccgacctttggggcgcgatgaacttcatcgaccacatccgcatcgagtgccgcagcggcaaggggggcgccggctcgcgccatctgcggcgcgagaaatacatgcccaagggcggccccgacggcggcgacgggggccggggcggccacgtgatcctgcgcggcaacgcccagcagtggacccttttgcacctgcgctacaccaagcacgtgatcgccggcgacggcgagagcggcggcgccaaccagtgcagcggcaaggccggccgcgacgtggtgatcgaggtgcccctgggcacggtggtgcgccacagcgataccggggaggtgatggccgaggtgctgaaggacggcgaggaggtggtgctgctggccggcggccgcggcggcctgggcaaccagcacttcaagagcagcaccaaccagaccccgcgctatgcgcagcccggcgaaccgggcatcagccagtgggtggccatggagctgaaggtgctggccgacgtggggctggtgggcttccccaacgcgggcaagagcaccctgctggccgccatcaccgccgccaagcccaagatcgccgactacgccttcaccaccctcacgcccaacctgggcatcgtgccctaccgcgaccacaagagcttcgtgatggccgacatccccggcatcatcgaaggggcccacgaaggccgcggcctcggcctgcgcttcctgcgccacatcgagcgcaacagcgtgctgctgttcatgatccccgccgacagccggaacatccgccacgactacgccgtgctgctcaacgaac

SEQ ID NO: 3424 - DNA, 24098 bp, synthetic construct
  source 1..24098: mol_type = other DNA
  misc_feature 1..24098: note = Synthetic
tacgtgaccgacagcgcgctggtgttccacgacgacctggatttctacctgaacagctacagcaagcaggagatcaagggcatgcgacggatggtgagcatctggcggatgaacttcgacaaggtgatccgggccacgatcgacgacatccgcacgcacagcgaaggggccggggtggccacgcggacgaaggacttcgagctgcccattgcacagaccggtgcgcgctaccgcctgagcgacgacgccggcaaggtgcgggtgttcatgttcggcagcatcaccaacccgccggcgcgcttccagctacccttgtgggatgcgctccagcgcaagtacgacagcacgcaggtgcgcctgttcatgatctacggccgcgagctgcatcccggcgaccagaaaagctaccgcgactaccccgcacccaagagcgagcacgagaagctggcctacgcgcaggaactgggcaacaccgtgaagatccccgtgctggtggacgggctgaacgacgccgtgctggacagctacggacgggcgcccaacgcggcctacatcatcgaccgggacgggaacttggtgttccgcggcacctgggcggacagccgcaaagtggagtacatcgtggacacgctgctgcggtggtatgcggagggcaggccgaagaagttcaaggcggagtaatccacaagccgacagccaccggcctccagctgcacgcttctggccaccagccgccagcttcaagccgccagcttcaagcctccagtttccggtcgatcgactttcagctttcctctttcagctttgtgctttgagcgttgagcttcgctagaccttcacctgtttccagcgtccgcgttggaagaccacggcgctgaggatggccaggacgctctcgcagatggccaccgaggcgaacacgcccagcggcccgagcccgaaggtgatggccagcagataggccatggggatctccatcgcccagaaacagatcacgttgagccaggtgggcgtgaggctgtcgcccgccccgttcagcgcctgcgccagcaccatgccgtagccgtagaagaagtagcccaggctgatcacgcgcatggccaggatggagtagccgtcggcctccgggccctgatcgaagaacgacacgatccacggcgcggcggcccagaagaagacggtgaccagcaccatgaacaccatgttgtagtggccgcagagccaggcgctgcgctgggcccgttcgggctgtccggcgccgaggttctgccccacaagggtggccgcggcgttcgccatgccccaggccggcagcagggcgacgatgatgattcggacggccacgccgtaaccgcccacggcctcggtgccgaagtcggccacgatgcgcaccagaaagacccagctgaggctggcgatgaggaactggccgacgcccccgagcgagaccttcacaatgcccttgatcacctcacgcaccggacgcaggtcgggcagggtgacggccagcgtgccctccctgcggaagaagttccagcacaagtagagcaccccgcaactgcgtccgatggtggtggccacggcggcgccctgcaccccgagctccggaaaaaagcccaggccgaagatgaacagcgggtcgaggacgatgttgatgccgttggcgatggccagtgtgcgcagggcgatgccggggttccctgcgccacggaacacggcgttcagcgcgaagagcagggtgaccaccaggttgctggcgaacatgagccgtgcgtagggcaccgccaccacgagcacatccggcgcggcgcccatcatccgcaggagcggcccggcgaacagcacggcgggcacggccagcaacagaccgcacaccagggcgatgaggaagctctgtcccgccgccgcacgcgtgccgtcccggtccttctcgccggtgcgccgcgccaccacggcggtgatgcccatgcccagcccccaggcgatcgagtacaccggcaccatgcaggtctccgtgagcgtgatggtggccgtgcccacgacgcccagcttgctcacgaagtaggtgtccaccagggcgaagagcgcctccatgcccatctccatgatcatggggatgctcagcagcacgatggcacggcgcacgcccatgctggtgtagtcctgctcctcgccgcgcaggctttcacggatcaggtcgaagaggcgggccatgggacgggcaagggggcggatgacgggaacgtggcggaaggcgttgcccgaagggtggcgaagctagggggagtggtgagtggtgagtggcgagtggcgagtgacacaggacagtgctccggccacatcggcgcgcaggcctgcgcgcagcactcgccactcggcgcgttgggcctgcgcgcagccactcgctactcgccactcgccactcacgaagggttgttcatgatcaccgccggaaccgccaggaagcgccccgtgggcccgggtagtttcgccacatggtccgtaccgccctccttcccgctctgctggccgccgcgccgatgctggcacagaccggtctgcaacgcacgctgaacgccgacacgatgccgaacctcgtccccaaccccggcttcgaggagaccaagcggctgcaatgcgcctggacgcaggacgcccgcaagttcaacgaggaggtgatggtggggtggacgagcccgacggagaccacgccggaccacttcagcctgcagagcgacccgggctgctggagccaccccggcaaacgcaccgggggacgcgcgcgtccgcacggcggggaggccatggcgggcatcaagacctggggccggggcaacacgcccacgcactggcacgagtacctgcagatcgagctgaccgcgccgctggaggccggggtgcactatgtggccgagtgctgggtgatgcgcgccagcttcagcaacgaggcgagcaacaacatcggcctgctgctggcgccggaacccgtgagctcgcgcgactgcctgccgctgcacatcaccccgtcggtgaacgaggacaagctggtgaggaagagcggctggcacaaggtgagcggcgtgatcgaggccaccggcggtgagcgcttcctgctcgtcggcaacttctacagcgacgaggccacgcagcatgaacgcttccccgagggcgagcgcggcgcctactacttcgtggacgatgtgaacgtgcgggtggcgccgccgggcagcacgctgagccccaggccgaaggagagcgtgccgccgccgccgaaggtgcgcgtggccgaccacgccggcacggcccaggtggagctgccccgcgtggagcccgaggtgggcaagagcatcgtgctggaccacatcttcttcgacttcgacaaggccgagctgaagcccgagagccacgccgaactggagaaggtggtgcacctgctcaccgactacccgcacatgcggatcgagatcggcgcgcacacggacgaccagggcagcgaggcttacaacatccgcctgagcaacgaccgggcgaaggccgtggtggaccacctggtgaaggagaaggtggacgccgcgcggctgagctggaagggctacggcaagagcaggcccgtggcggacaacgccaccgaggagggccgcgcgaagaaccgccgcgtggagttcaccgtgctggagcggtagcggcacccgcgaaaagagaaagggacccggaggtccctcacccttcccgcttcgcagcgggcatggcacacgcctacgcaggctcctccttcaggatccgctgcgcgatgtcgaggatgcgcgtgtcgtccagcgacaccacgcccccgtcggcgcccggctccaggtgcacgcccatggggcggccctgcggatggctgtagcccccgaagtagttccacaccgtctccacgttcatgtccagctcgcgggcgatgcggtggatgctgccgtcgggcagccggtccttgatcctgcgcagttcattgaaggtgatgttcatgtcaggacgggttttggttggggacgctgaaaggtaaaccgaagaacggcggatcccaaacgggggctggcatgccgttggcttggggccgctacctttccgagcgaatgccccgcgccgccgccctcgccctgctcttcgcctgcggggcggcccttgcgcaacgcaccgacctccgcaccttctccctggaacaggggttgcccagcgcccgcatcagcgcggtgtgcgaggaccccgacggcttcctgtgggtggccaccgatgagggggcggcccgcagcgacggcacgcggttccgcaccatcggccgcgccgaaggcctgcccagccagcacgtcaccgccttgcacggcgcgcccgatggccgggtgtggatcggcatgcgcacgggagcggtggccatctgggagcgcggcgcggtgcggccttggggcccgctgccggcgaccggagcggtgcgcgccttcgccaccgacatggagggccacacctgggtcgcgttggccggagggttggtgcggctcggccgcagcggtgccgccaccgccgtaccgctgcccatgggccaggcccggctcaacaccctggtgcggatgccggacggcgccctggtggccggcacggacagcgggctcgtggtgcggcgcgacggccgatggacgctggccggtgaggaggccgagctgccggaacgccgcatcacggccctcttcgccgacagcctgggcctggtggtgggcaccccgtccgggtatcgcctgctggaccctggcttgaagcgcctcgacccgacggcgagccccacgcgcggtgcacccctgcccctgcacgaccagcggatcctctgtgcgctgcgcacgcgcaccggcgacctgtggctgggcacgcccgccgggatcgcccacgtgagcacccgcaacggcgtacccatcctgcgcaccatcaccgagcgcaacggcctgggccacgacctggtgcgctgtctgcacgaggaccgcagcggcacggtgtgggcgggcacggccttcggtgggctgtcgcagttcaccagcgatgccttcctgcacttcaccgaacaggacgggctgcgctcgcagatcgtgagcgccatccaccgcagcagcaccaacgaactgtggctcggctcggtgggcggagggctcgcgcgctgggatgcgcagggcctgcgcctgttcgccgaacccgagggcctcgccgaccccttcgtgctgtgcatcaccgacgcaccgggcggagcgctggtggtgggcaccgccacccagggccttttccgccgtgcgggcgaacgcttcgtgcgcctggccgacggcccaccgggacgcgtgaacgccctgctgcatgacgatgaagggcggctttgggcgggcacggaccgcggcctctggggcgatcccggcgatggccacctgatgcatgtggacggtccgcagcctgcggtgacgggcatcgcctcaggcggtgacacggcgtgggtgagcacggcggaagggctcttccgcctgcccacgcgccgcgtgccctggcgcctggagccggtgccgggaccacccgtggccatgagcaacgtggtgcgcgacagcaagggcaacctgtggatcggcaccgaggagaacgggttgtaccgtgtgaacggcacgcgttgggacagcctgtccaccgccggcggcatgggctcggtcacgggcctgcgttcgcccaccgtggagcaggtgctgctggacgcatccgagaacgtgtgggtgggcacgcgccgcggcatcgacctgcttcagctggacatgctgcaggagcaggtgctggaggtggaccactacggcacggaggaaggcttcatcggtgtggagaccttccgcaacgcgtgcctgctggaccgggacagcaccctgtggttcggcacggtgcgcggtgccacacgctacgacccacggcgggtgcgcgaggaccccgccgagccgcgcacgcacctcaccgacctgctgctcttcttcgagcggacgaactggcggccgtggtgcgacagcctcagcgacgacgggctgccgctggggcttcgtcttccgccggaccgcaaccacctcaccttcgcattcacgggcatcagcctggcctacccggagaaggtgcgctaccgctacatgctggagggccacgatccggactggtcgcccatcaccgccatggaccgggtgacgtacagcaatctccctccgggcgagtacaccttcctggtgctggcgcgcaacgcgagcggcatctggaacacggggccggtgcgcttcgccttcaccatccggccgccgctgtggcgcacctggcccttcctggccggctgcgccgtggtgctggccctgctgctgtgggccgtggtgaagctgcgcgagcgccgcctgctgcgcgaacagcatcgcctggagcgcatggtggacgagcgcacccgcgaactggcggccgagaagcaccgcagcgaggagttgctgttgaacatcctgccggaggccaccgccaacgagctgaaggagaagggcgaagcccaggcccgctcgcatgccgcgtgcaccgtgctcttcagcgacttccagggcttcacggagataagcggcgagagcgagcccacgggcatcgtggccgacctggaccgtttcttccgcgccttcgaccgcatcaccgacacgcacgggctggagaagatcaagaccatcggcgatgcctacatgtgcgccgccggtgtgccggaggccagccccacccatgcgctcgacgccgtgctcaccgcgttggagatgctggacgcggtggaccgcatcaacgccgaacgccttcaggaaggccgtgctccgtgggccatccgcatcggcctgcacagcggaccgctgatcgccggcgtggtgggcgagaagaagttcgcctatgacatctggggcgatacggtgaacctcgccagccgcctggagggtctcagcgaggcgggccgcatcaacatcagcgcggccacctatgcgctcgtgcagcgcttcgtggacgtcgccccacgcggtccgctcgccgtgaagggcaagggcgaggtgcagatgttcttcgtggaccgactgcaggctggctggagcgcggacgcggcgggccgcgtgcccaacgccgaactgctggcctggcgtgccggtcaccttgccaccgcaccggcatgagcagtgcgctggtccggatcgtcccgcccgccgccctgttgctgctgggcccggccttgtacaatggctatccgctggtgtatgccgacacgggcacctacctcaccagcggcttccagatgggcatccccgcggaccgtcccatcggctacgggctcttctgccgcctcttcagcggcgacgggctcagcctgtggggtgtggcgatcgcgcaggcgctgctcaccgcggtggtgctcgcgcacgcgtggcaggtggtggtggaccggcggtggggtctcttcctcgccaccacagcattgctcagcgccaccaccggcctcggctggtattccgggcggttgctgccggatgcctttacgccgctggcgatcgttgccgccggcctcctggtgctcgcgcgcctcgcgtggccgtggcgcctgctgcatgcctcggtgctcgtgctggcgggcgtcacccacttctcccacctggtgatcgtgcccgccacactggggatcgcgtgggggcttcaccggctgctgcttcgcacgcgcccgccgttcaccggaaccaccttcgccctgggcgcggtggtcctgtccgtgttcgcgctggcggcgagcaaccgatgggcaggtcgtgggtgggagctctcccgtggcacgtcgctgttcctgctgggccgtgtggtggatgccggcgcgctgcccacagcgctcgcacgccactgccccaccgcgcactggtcgttgtgcgatgtcccggcgcccgccgacagcagggccctgttgtggggacccgatggtgcggtgacgcgggcgggcggatgggacgcgtacctgcctgaagcccgggccatcaacgacgtgctgctgcaggacgacgccgtgcgtggcgcgctgtggcgtgccagctggcgcgatggatggatgcagctcggccgcgtcggcctcgacgaactgccgcagccgtggtaccgcaagccggtgagcccgccctacctggcgatccagcagttcgtgccgcgcgagcttccagcctacctcggcgcccggcagcatggcgaaggcacgctcgacctgcgtgcggtgaacacgctccacatcctggtgctcggcctgtcggtgttgctgctcgtggccttggcgatccgctcgcgtaccgcagaacaccggttgctgctgctcttcaccgtggtggccgtgctcttcgccgcttccagctgcgccatgctcagcctgccggaccagcgctttctggcgcgcgtgagcggtctgctccccttcgccgcggtgatggtgatggccgcgaagggccgcaacgcagcttagcccatcttcgcggcggatgtccgcacgtccaccgcacctcaccaacggcctggccgtgttgctcggcgctctgggcgtgctcattgtgccgctggtgaacggctatccgctggtgtatgccgacacgggcacctacctggccagcgcgttcgagggcctggtaccgatcgatcgccccttctggtatggcctcttcatccggggactgagcttcggcggtgccacgctctggcccgtggtggtcgtgcaggcgctgctgtgtgcgctcgccatccaccgcatcgcggatcttttgcttccacccacccgcgcggcggtcgccaccgtggtgctgtgcgtgctgctcggtccgttcaccgggttgggctggttcgcgggacaggtgatgcccgatgtcctgacggccgtgggtgccgtgagcatggccttcctcatcctccgcaacgaacggtggccatggcgcgcgttcgatgtcgcgctcgtgctgctggcgtgctggtgccacctgagcaacctggtgatcctgcccgtggtgggcggcgtggcggtgctgctggccccgcgcccgcgacggcgtgcggcggtgcatgcggtggccctcacgggctgtgcatgggccggcctctacgcggcgaacggactgctcaccggcgcgccgcaggtgagccgcgccagccacgtcttcctgatgggccgcctggtggatgccggcctcctgcaaccctggctgcaggagcactgccccaccgagcgctacggcatctgcgcctacctggacagcctgccggccacgagccgcgctttcctgtggtacccggagagcccgttgcagcgccagggcggctgggaggccacgcgggaggagtacggccgcatcgtgcgcggcacgctcaccgagccgcgctacctcgcggggcatctgcgggccagcatcggctccacggcggaacagctcacggccacggccctggccgacggggtgatgagcccctggttcggcgatgcgtcgacgccaccctaccgcatggtggaacagcacctgccgcacgagctgcacgccttccgccgcacctggcagaccacggcgaggggtcgcctgaacagcagcgtgttcgaccgggtgcatgcgctgctgctcgggctgtccgcgatcggcggcctgctgctcctgctccgccgggggaccgccgctccggtgcgcatggcggtggccctcgccttcgccgtggtgctcatcggcgcgtgggcgtgcgccagcctcagcgtggtggacccgcgctacctggcgcgcgatgcgtggctgctgccgatggtggtggcgctggggctgtgggcgggcggacgcggggaaaaaagaccgcgacccctttcggggccgcggataagccttgaagcttagttctcacaacggaatgatccttattgtgaaagacttcaggtcgctgcgaagatagagtacggtcgtatatcttcatgccgctcagctgtcgaaccggttcagcaacgttccgatggtcagctaggcctgaactatttacaatgatggagaagagcaacgagctgatcgtagggcttgacgtgggaagcaacagcgtcggctgggccgtggtcgaaatgaacgcggatcgtctggagcgcatccatgccatgggcagccggatcatccccatgggccctgaactgaaggaataccaggaaggcaagcgcatcacgaagaacgcgacccgaaggcagaagcgaagcatgcgacgtaatcatcagcgctacaagcttaggcgcgccaagctcgttcaggcactgcacctgatcggtgcatggccggaaacccttggtgaacaaggaagtgaggtattaccgttgctgacaagccttcaattgtacggcctgcgggccatggcggtggaccatcctgttgcactcccggagctgggcaggatcctctaccacatgaaccagcggcgcggatacaaggacatcggggacctcatggatgaacaggacggcgctgcaccggaagccgataaggatgatggcaagagcatcgaacgcgtccatgtcgccaaggtggaagtggatgacgcgaagggaaggaaagtaaagtacctggtcacccttgccgatggacgagaaggcaccgccaccatcgccaccatgaaggagatggaggggtccgaccaggaactggagatcaccacgaaggaaacgaagcgtgggacctccatcgaattccggcttcccgtgaagaccgactggcgtaaaggcatggagagcttgaaccaggcgatcgatgcgagcggcctgaccccaggccagttctttctccacgccttgaaggacgacccgttctacaggatccgtgaacgtatcgtcctgcgggacacttacaagaacgaattcgatcagatctgggcgagacaagtgaaagcccatgcccggcttgcggatccggtcctgcgcgaccgggtggtcctggccctgatcccacgcaacgaggtggaacagaaaaagtggttgaaccgggacctcggaacctttatccgtgaccatgtcatctacttccaacgaccgctgaagagccagcggagcagcaaggggcaatgccgcttcgagccgcagaaaccggtcatgccggtcagctcgccgatccaccagctgttccggatcctgcaacaggtgaacaatatccgcctgatcgatcgctacgggaaggaacacgacctgagcgcggctgaacggaacacggtgctgaagcacctgctggagcacaaggagctgaagcctgagaacctgctgaagtgcatcggtcgcaaggacgaaccaatggagaacaacctgcgcgccgccttgcccggccaccaaaccctggccgccctgcggcccaggctgaaggcatcggcgatctgggaccgcttggtccatgaggcctcccgtgccgccgggcttcagggaaccttgttgttccggatctggcacatcctctactccatccccacggaggagcatcgccgccaaaccctggccgccattgatgggatccccggtgatgagctggatgcgctcgccaaggttcgctttgaccgcaagcacggggccgtctcggcacgcgccgccatgcgcctgctccccctgatgggcaatggcgatgtgtggcgctgggaggacgttcccgttcgggatcagcggcgcatccaggacgtgatcgacaaggtggccactggcgaggagatcgaccggttgcccaacgaggtgcgtgtccgcctcactgcgtataccgcaccccaccacttccaagggttgccgtattggctggcggcctccgtgctgtacggcgatcaccgcagcacgggcggcaagccgtatgagaagcccgaagagatcagaaccatgccccgcggattcctccgcaacccggtcgtggaacaagtgatcaatgaggcccggatgatcgtgcgcgacatctggacgacccacggcagaccgacgagcatccgtgtggagctggcacgggaactgcgccagaaccaggagcagcgcaaacggagcttcgacaacaaccgcaaacgcgacaaggaacgcaaggaggtgctcgaacgcctggtgcacgagttcaaccggcccaagccaagccgaaaggacatcgaacgctacgagctctgggtgcaacaggagcatcgctgcatctacagcggcaaccccattgaacggacacagctcttcgacacgcgggacaccgacgtcgaccacatcatcccacgggccctgtacttcgacgatagcatccagaaccgggtgctctgcctgcgggaggagaacgcgaacaaggacaagcagctggccgccttgtacatgaaggccaaggggaccggggcctgggaggcgtacgtggaccgcgtcaacagcctgcgtatcgggcgcaccaagaagaagtacttgctcgccgaggaagtcccggagagcttcatcaatcgacagctgcaggagacgcggtacatcggcaccaagctcaccgaactgctccagcccgtgtgcccggtccacagcacgttgggcatcatcacggacacgctcaagaacgaatgggggctggacaaggtcttcaaggaggtgctcctcccccgctttgaacgactggaacgcattacaggccgcaccttggtggagccggttcccggtcgcaatggccatggggactggcgcatcgaaggctacgacaagcgcatcgaccaccggcatcatgcgctggatgccctcaccgtagcgctcacccgacagggctacatccaacggctcagcaccatgaaccaactcaagctgagcgatgcggagaaagaggccatgaagcggcccacctggtaccccctgccccaccccgacctgcgccgcctggtgaaggagcagctggatcgcaccatccccagcatcaagaaccggcagcgcctgctcaccaaggcagccaatcacacccgtcatttggtggacccgaagaccggtacaaccgccctgcgcaaacagaccaagggcgatctgcgtgccgtccgaggcccgctccacaacgagcagcccttgggcgaggtgcgcgaacagcgcaaatggccgctgaaggacatcatcgcccacctcagcgaacggccggaccccctgggcgcagtgagccccaaaggacccggcgagcccggctacgacgaacgtttcctggcccatgcgcacgaagcacagtggctgcatgcccacctcgcgaagtacgagggcaacgtggagcggatgaaaaaggccctccggaaggacccgctggtgaacgcccggaacgaacgcgtggaggccctcaccgtgttggtgcccaagtacacgatcacccgcaacctgggaccgacgttcaccgagaagatggtggagaagatcatcgacaagcgcgcgcagcacgtggtgcgcgagcacctcaaggcccacggcaacgacccgaagaaggccttcacggaagaggccctctacctcttgaaccagggtctgaaagtgcccgtgcgcaaggtgcgctgtcgcatggacgaggccctcgtgggcgaggcgatgggccgcacacgcttcctgcgccacggcgacaccaaccgcaagctgcacgtggaaaagggcgagaaccatgccctggccgtcttcgtgaacgaggccaccggtgagcgggcgttcgaggtggtccccttcttcgacgctgtggagcggaggctcaagggcctggacctggtggatgcccgacccggccaccgtcacttcctgctgcggaaaaatgacctggtctatgtgcccagaccgggggaggatgcgcggtcgatcgactggaaggacacggagtatgtgggcgagcgcatcatgcggatgacacagatgtcgggaaagcagttctacttccttgccgcaagtatttcgagccctgtcaaccttggaaaagaggtgacagagtacgggagccagaacgcatccgagtttgaagacagggatagtccacgaaccaaggtttcccaagtgtgccttccggtgcggctcgatcgcctaggtagggttgaagctctatcgttttgatcaagcgcaccctgcatatcggcaacccgtgtacgctccggcgccgcgagcagcaactggtgctgcactaccccaaggagctgggcctggaggacaagtccgtacccatcgaggacatcggggtgctgatcctggaccatgagcgcgtggtcatcacccagatgctgcttgcggctttgctggcgaacaacgtggcggtgatcacctgcaacgagcagcacatgcccaccggcctgctgctgaacctggacggccacaccacgcagaccgagctgttcaaggcccagatcgaagccagcgagccgctgcgcaagaacctgtggatgcagaccgtgcaggccaagctgcgcaaccaggccgatgtgctggaggaggccggcacccccggggacacgctgcgcgagcatgcccgcaacgtgcgcagcggcgatccggacaacctggaggcgcgcggtgcggcccattactggcgcttcctgttccctccggcgatccagttcgtgcggcaccgcaccggtccgccgcccaacaacctgctcaactacggctatgccatcctgcgggcggtggtggcccgcaacctggtgggcagcgggctgctgcccacctacggtatccaccaccgcaacaagtacaacgcctattgcctggccgacgacatcatggaaccctaccgcccgtgggtggaccggctggtgtggcagatggtggtgaccgagcggctggatggttcggaactgaccaacgcgctcaaagggcggctgctgtcgctgcctgccatggacgtgctcatcgacgggaagcggagccccctgctggtggccgcccaacgcaccaccgccaccctggcccagtgctttcaaggcgagcagcgcaaggtgctctatcccgagcggccatgatccacggatgaaccggccatgggccgcctggatgaataccggatcatgtgggtctttgtcttcttcgacctgcccaccgagacgcgccaggaccgccgcaaccacgcgcggttccgcaaggagatcaaggccgatggcttcaccatgatgcagtacagcatctacgtgcggcactgcaacagcgcggagaacgcggaggtgcacatccgccgggtgaaggccctgttgccaccggccggcgaggtcatcctgttcaccctcacggacaagcagttcggcatgatccagttcttcgagggcaagaagaagatggacgccccggacacgccccagcagctggagatgttctgatggcccccacgaaaaaggccccctgcatcgcagagggcctttcggctgtgccgttttccccatcgtccctgttggccggaaaccgcgtggctgtagcggttccgacggtgcgtggtgtcacagctcgtcaaagatcttgacctgaaagcctttcacaacacatcgcccccgctaggcatttcgttcgagggtgtcacagctcgtcaaagatcttgacctgaaagcctttcacaacagctcggactttcgttcgttcatggcttgggtgtcacagctcgtcaaagatcttgacctgaaagcctttcacaacgggatacgaccgaccgataaactggccgacggtgtcacagctcgtcaaagatcttgacctgaaagcctttcacaacattgaagcgacatgcctagcgaggtcgtttggtgtcacagctcgtcaaagatcttgacctgaaagcctttcacaaccggcgacgatggcgacgacgaaggggacgggtgtcacagctcgtcaaagatcttgacctgaaagcctttcacaactggaccagctgagctacgacgcgcctgaccggtgtcacagctcgtcaaagatcttgacctgaaagcctttcacaacgggctcctcctcgtcctgcagaagggtcacggtgtcacagctcgtcaaagatcttgacctgaaagcctttcacaacggcgcgccgtgctgacattccaagcccgcaggtgtcacagctcgtcaaagatcttgacctgaaagcctttcacaacccgccttcatgtcggcctatcgtcaggggaggtgtcacagctcgtcaaagatcttgacctgaaagcctttcacaactcattcagccagcggcgaccccgccgtgatggtgtcacagctcgtcaaagatcttgacctgaaagcctttcacaactggccggtgcagtgctggctgctggtgctgggtgtcacagctcgtcaaagatcttgacctgaaagcctttcacaacctacgccctggtgatggaggacgactgctggtgtcacagctcgtcaaagatcttgacctgaaagcctttcacaacaaaacgcggaacacgacgtaccggctagagggtgtcacagctcgtcaaagatcttgacctgaaagcctttcacaacgccatccacgattggctgtcccggaaggggggtgtcacagctcgtcaaagatcttgacctgaaagcctttcacaacatggtggttcgtaacaacgtggccgccgtggtgtcacagctcgtcaaagatcttgacctgaaagcctttcacaacgggtatatgggcgaccctgacaggcagggggtgtcacagctcgtcaaagatcttgacctgaaagcctttcacaactgctgtgcactgcgaggagcaagggcgaatggtgtcacagctcgtcaaagatcttgacctgaaagcctttcacaacacgtggcgttgcacccccgccggggcgaccggtgtcacagctcgtcaaagatcttgacctgaaagcctttcacaactggaccgtggagcttaccgatgtagccaccggtgtcacagctcgtcaaagatcttgacctgaaagcctttcacaaccatgcacatcgccgtccaccagtacatcacggtgtcacagctcgtcaaagatcttgacctgaaagcctttcacaaccaggatggggggcagcttcgccttcatcgcggtgtcacagctcgtcaaagatcttgacctgaaagcctttcacaaccgttatctgcaagtgtccacgacgacagccggtgtcacagctcgtcaaagatcttgacctgaaagcctttcacaacgagcgcatgggcgtcaaggatgccgacaagggtgtcacagctcgtcaaagatcttgacctgaaagcctttcacaactgtgctggcgtcgttttccaggaagtctccggtgtcacagctcgtcaaagatcttgacctgaaagcctttcacaactgagctggagcgagatgatgcccgagtaccggtgtcacagctcgtcaaagatcttgacctgaaagcctttcacaaccaacgccgcatcaccccctacctcaacggaggtgtcacagctcgtcaaagatcttgacctgaaagcctttcacaacgagctcgtagttgggccggccacccatggtggtgtcacagctcgtcaaagatcttgacctgaaagcctttcacaacagggcagggctcgaacctgcacggccgcgtggtgtcacagctcgtcaaagatcttgacctgaaagcctttcacaacccaacacacgccgaaggcggcatccaggtggtgtcacagctcgtcaaagatcttgacctgaaagcctttcacaacagatggcaagcggtaacgagcattggtaccggtgtcacagctcgtcaaagatcttgacctgaaagcctttcacaacgaacacgctcagcggccaggtgccgtccaggtgtcacagctcgtcaaagatcttgacctgaaagcctttcacaacagagaagaacaacgacacgctggccgctgaggtgtcacagctcgtcaaagatcttgacctgaaagcctttcacaacgagacgctgcgccgtgttaccggccccccgggtgtcacagctcgtcaaagatcttgacctgaaagcctttcacaacagtactggcccaagtaccgcaggccggtccggtgtcacagctcgtcaaagatcttgacctgaaagcctttcacaacgcggcggaagcgccggtgcgctggctgcaggtgtcacagctcgtcaaagatcttgacctgaaagcctttcacaacatcgatacaggccacgatgccattgatgctggtgtcacagctcgtcaaagatcttgacctgaaagcctttcacaactcagggacaacggggacggcacatggtcggggtgtcacagctcgtcaaagatcttgacctgaaagcctttcacaacgccgcaaggctattccggcagcatcatcgaggtgtcacagctcgtcaaagatcttgacctgaaagcctttcacaacgcacggtgagcggcagcacgctttcgctgcggtgtcacagctcgtcaaagatcttgacctgaaagcctttcacaacaggcccgtgacgttcacataggtgttgctgggtgtcacagctcgtcaaagatcttgacctgaaagcctttcacaacactccctgcggccgtcggcggtttcatcatggtgtcacagctcgtcaaagatcttgacctgaaagcctttcacaacggtctggccccacgcgggcagctccacgggggtgtcacagctcgtcaaagatcttgacctgaaagcctttcacaaccgatgacggcggcaaggctgtcggggtcgggtgtcacagctcgtcaaagatcttgacctgaaagcctttcacaacatgcctgcggcgatgccctggcccacgaaggtgtcacagctcgtcaaagatcttgacctgaaagcctttcacaacaaagcccaacggctggaagagcgcgcggccggtgtcacagctcgtcaaagatcttgacctgaaagcctttcacaacacgtccatggggtcttatcgtggcattggaggtgtcacagctcgtcaaagatcttgacctgaaagcctttcacaacacatcatggactgtcacgatgtgagcgaccggtgtcacagctcgtcaaagatcttgacctgaaagcctttcacaactgagcgcccagcgtggcagaccgaagaaggggtgtcacagctcgtcaaagatcttgacctgaaagcctttcacaacagggggataccacgatcctctacgaaggcggtgtcacagctcgtcaaagatcttgacctgaaagcctttcacaaccgcgctcctggtggatgcggacggccaaggaggtgtcacagctcgtcaaagatcttgacctgaaagcctttcacaacatgaccaccgccgagcgctccgaactgctgggtgtcacagctcgtcaaagatcttgacctgaaagcctttcacaacacgtactcggcctcgcgttcgcagccgatgggtgtcacagctcgtcaaagatcttgacctgaaagcctttcacaacaccaacgcaggagggttgacgcaggcccgggtgtcacagctcgtcaaagatcttgacctgaaagcctttcacaacaatctgatcacccacagcctcacgttcaccggtgtcacagctcgtcaaagatcttgacctgaaagcctttcacaaccgtcggctccgcgttcatgctatcccattggtgtcacagctcgtcaaagatcttgacctgaaagcctttcacaacactccagcccgaggtttcgccgctggaaggggtgtcacagctcgtcaaagatcttgacctgaaagcctttcacaacgagccaacgcggcatagttgtcgtgcgttaggtgtcacagctcgtcaaagatcttgacctgaaagcctttcacaacgctctaccgtccggccactacgccgggggtggtgtcacagctcgtcaaagatcttgacctgaaagcctttcacaaccaacatcgacgtgctcggcaaaggatacctggtgtcacagctcgtcaaagatcttgacctgaaagcctttcacaacagctggatcggcaaacgcctatgggataaggtgtcacagctcgtcaaagatcttgacctgaaagcctttcacaacatcactctgcccggtaggctaaaggctaaggtgtcacagctcgtcaaagatcttgacctgaaagcctttcacaacggcgcaccccgttgagctgcacgcggccgcggtgtcacagctcgtcaaagatcttgacctgaaagcctttcacaacgcctgcgcgggcatggacgatccagcggcgggtgtcacagctcgtcaaagatcttgacctgaaagcctttcacaacacatggtcaaagtgttacgggtgtgctgtcggtgtcacagctcgtcaaagatcttgacctgaaagcctttcacaacaacccggatactcaactgccgatcggccgtggtgtcacagctcgtcaaagatcttgacctgaaagcctttcacaacagaagggcaggtcgtcgttaggcccggccaggtgtcacagctcgtcaaagatcttgacctgaaagcctttcacaactgctggtatcggtggagctgctcggtgcgggtgtcacagctcgtcaaagatcttgacctgaaagcctttcacaaccgccttgcggtagttcagcttggccagatcggtgtcacagctcgtcaaagatcttgacctgaaagcctttcacaacgctggacaacttgcgctgccgcacgatctcggtgtcacagctcgtcaaagatcttgacctgaaagcctttcacaacctgtattccaagctgataccgatggacgttggtgtcacagctcgtcaaagatcttgacctgaaagcctttcacaacacgctcgccaaaggccctcgcgttagcaagggtgtcacagctcgtcaaagatcttgacctgaaagcctttcacaacacctgttcaaagaaggtggacaggtagcgaggtgtcacagctcgtcaaagatcttgacctgaaagcctttcacaacacggctacacaggtcggcgtggatgttcggggtgtcacagctcgtcaaagatcttgacctgaaagcctttcacaacagtatttagcccggacaggaccgggggttgggtgtcacagctcgtcaaagatcttgacctgaaagcctttcacaaccgccggtgcggcccacctcggcgagggtcaggtgtcacagctcgtcaaagatcttgacctgaaagcctttcacaacgggaagtcatcgctacggcacgtcagcgtcggtgtcacagctcgtcaaagatcttgacctgaaagcctttcacaacaagcgtggcagcggccacaagagcgaacagggtgtcacagctcgtcaaagatcttgacctgaaagcctttcacaacggagctgcgcgacctgatcgaaaggctcgtggtgtcacagctcgtcaaagatcttgacctgaaagcctttcacaacccacaccagcacgcaacgtgaaggcggaagggtgtcacagctcgtcaaagatcttgacctgaaagcctttcacaacccttggacgtcttcggcctggacatccccgggtgtcacagctcgtcaaagatcttgacctgaaagcctttcacaacccacagcctgcccatggcatcggcatacttggtgtcacagctcgtcaaagatcttgacctgaaagcctttcacaacgttcgtttgggcgctccgttgtgccatacaggtgtcacagctcgtcaaagatcttgacctgaaagcctttcacaacatgatgcaaagcagcatggcggccaattgggtgtcacagctcgtcaaagatcttgacctgaaagcctttcacaacgcgatcatgggcgacggattggagtaggtaggtgtcacagctcgtcaaagatcttgacctgaaagcctttcacaactgcactgcgcaatgcgtagtacggacggcggtgtcacagctcgtcaaagatcttgacctgaaagcctttcacaacgcctgttggtggaggtgctgaaggagcacgggtgtcacagctcgtcaaagatcttgacctgaaagcctttcacaacgaagtgctgcgcaaccggacggggccggatggtgtcacagctcgtcaaagatcttgacctgaaagcctttcacaacgatggtggtgtgcgttcggatctcgctttcggtgtcacagctcgtcaaagatcttgacctgaaagcctttcacaacgtcacgatgaacgactacgtgcccccttggggtgtcacagctcgtcaaagatcttgacctgaaagcctttcacaaccgcaaggctatcgaggaacgactggaagcggtgtcacagctcgtcaaagatcttgacctgaaagcctttcacaactgccagatgcggtcaccggcgatcagatggggtgtcacagctcgtcaaagatcttgacctgaaagcctttcacaactgccaagttcacggatgggacaacgtgatcggtgtcacagctcgtcaaagatcttgacctgaaagcctttcacaacttgggctatcagcaacggaaccatctaccaggtgtcacagctcgtcaaagatcttgacctgaaagcctttcacaacaggtcatccgtacatccttccccggccacaggtgtcacagctcgtcaaagatcttgacctgaaagccgggttgcagcccggtggcccaaggtagctcacccgaaccatgaggatcgaccaccgggctgcaacccggctacaggccttgcatggtccgttatggctctgcgtccacgcttcgcgcggcaagcacgccgctccggtgcgcatggcggtggccctcgccttcgccgtggtgctcatcggcgcgtgggcgtgcgccagcctcagcgtggtggacccgcgctacctggcgcgcgatgcgtggctgctgccgatggtggtggcgctggggctgtgggcgggcggaggtcgcgggtcgcgatgaacgatgcgctgacctggatcaccgggtcgatgtgggctccgtgatccagagcaccacccaccatcattggacccaatgagcgcgaccgggcgctgcgcgtgggatccattgagctcaatgattgcgccgagggatccacgccacgtgctttggaccggcgccaatggcacactgcggtacctggggtcgggagggctggcgatcatgcccgcctgctccagggaagccggtggatgtgcagcggtgccggtgaacatcccgaacaacgacccatgaacacacatgaacgaggacgagcgatgctcgcgctgctcgccggagcgacggtttccggggccctgaacgcacaagagctgttctccaccggcaacggagaaggaacggtcggcaacgatcggatgagctggaccatcggggagcccatcttggagaccgtgacggatgggacccaggtgctcacccaggggttcgaacaaccctgggcggtggtcaccaccgaagtgagcggcgccatcgaggcgggtgccgggatccacgtgttccccaatcccgtgcgatcgaccttgcatgtggtgctcgatcatcccgaacaggcggccggcctggagctgatggacgctgaaggccggttggtgcgcaccgaacgggtacagggctccaccatggagctggacatgaccgcttatcggacggggacctactacctgcgccttcacgatgcagggggaggcccgaaggagaccttcaagatcaacgtgatccgctagacctgaacgaccatgaagaacacgacccttttccttgcggcggtgctcaccgcgcagatgggcttcggccagtcgccggagctgatccgctatcaatccatcctgcgcgatgcgaacggcaacgcccaggccaacacggcgggtacgctgaccatcgacatcgtgcagggctcggtgaacggacccacggtctacgccgaggaccacgcggtggtgagcaacgactacggcctggtgaacgtgaacatcggcggtggcaccgtgctcaacggcaccttcgccaccatcgactggtcggccggtccgtacttcgcccgcacctccctgaacggcagtgtgctggggacctcgcaactgctcagcgtgccctacgcgctgtacgcgaaggagagcggcagcagcat

SEQ ID NO: 3425 - DNA, 10399 bp, synthetic construct
  misc_feature 1..10399: note = Synthetic
  variation 3489..3490: note = note, n is a, c, g, or t
  source 1..10399: mol_type = other DNA
gtaagacgcgatagccctggaccggagcgaccaacgccccggcccgtccctattttcgcccttcatgaaactgatctccttcaatgtgaacggcatacgcgcggcggtgggcaagggcttcattgaaagcatgcgcgccgtggacgccgacatcatttgcctgcaggaaaccaaggccaccccgcagcaggtggccgatgcccttgccggcctgggcggatacaccatacacgcccattccgcagagaaagcaggctactcgggcactgccgtgctcagccgccagaaacccgagcgcgtggacctcggcatcggcatcgccgagcacgacactgaaggccgggtgatcaccgccaccttcgccgaccacatcgtggtgtgtgcatacgtgcccaacagcggcgaaggattgaagcggttgagctatcggcagcagtgggacaaggaccttcgccaatacttggtgaaactggctgcgggcaaacgcccggtgatcttcaccggagacctcaacgtggcgcaccagcccatcgacatcgctcggccgaaaaccaactacaacaaaacggccggctatacccaggcggagatcgacggcatgtcggccttgatggacgcgggatttaccgacaccttccgccaccgccatcccgatgaggtcaagtacagttggtggagcttccgcatgaatgccagggcccgcaacgtgggctggcgcatcgactacgtgctggtgagcaggggcttcgaaaagaaggtgaaagaagcgttcatcctcaatgaaatcatgggcagcgaccattgcccggtgggggtcacttggtaaccggggcttgaagcgtgcaacttgcagctgcatcattctacgccgcaggtaaaacaaaccgcatgaagaccctgctcaaactggaggaactggcccaattgctggtctgcatcatcaccctgtggatgcacgagatgccatggtggggctacctgcttttgttggtggggccggacgtgggcatgctgggctacgtggccggcccgcgaacgggagcgttcacctacaacctgcttcatcacaagggcatggcactggccgtggccggcatcggcatcggcggcgcctatctcggcgtgccgcttggggcgctcaccacgatcctccttcccgcaggggtcatcctgtacggtcatgcctgcttggaccgcctgttcggcttcggcctgaaatacacggatggttttgcccacacccacctcggatggatcggccgtgaaggacgacccgtggaacagtgatcaggtccatgcgcatcctgctgttggacaactacgatagtttcacttggaacttgttccacctgctggcgcccatggcggcggtggacgtggtgcgcaatgatgcgatcaccgtggaagaggccgcgcagtatgaccgcatcgtgctttcgccagggcccggcttgccgtcggaggcgggcgtgatgccccggctggtgcacatgctgttgcccacgcatcccatcctcggcgtttgcctcggattgcaggccatcgtggaggaatgcggcgggaagttgtacaacctttccgccgtgcggcacggcgtggccctgccctgcattcccgaactgccgggggacccgctcttccatgggcttggtgcatccttcccggtgggcctctaccacagttgggcagccgatccagcaagcctgccgacggacttgcgggtgatcgcccgcagcggggaaggcacggtaatggccgtgcggcatgccaccttccccgcatgggccgtgcaattccatccggaaagtgtgctaacgccccaagggccgcggatcatccgcaactggttggagcactgcccggcccactagcccatgcggtggtgcggcgcccggttttcaaccgaaatggaccaccgatcgttgatggaacaaacaccaaaggcgcagatcaccatccatgggccgatagcttcgccccatgttccgttgcctcgtgttccccgctttggtggcagccggtagcctgtgtgcgcaaaacgtgcttcagcgcaccttgcagaacgacaccatgcccaacctgttgcccaacccgggtttcgaggaataccagagcgtgccctgcggctggacgcagcaggcgcgcaaattcggcgaggaactgatggtggcctggaactcgcccacggaaaccacgccggacctgttcaccaccgaggcggaccgcaactgctggagcaatccggcgaaacgcaccggtggcaaggcggcaccgcgtacgggcaaggccatggccggcatcaaggtgcgcggcaagggaaacacccctacgtggtggcatgaatacctgcaggtggagctgaacgccaccatggaggcgggaacccgctatgtggtggagtgctgggccaggttggcggagttcagcgaacatgccagcgggaacatcggcctctatctgtcgcccgtggccattggcacgggcaacaacctgccgctctacttcaccccgtgcgtaaatgccgaccaagtggtgaagggcggacgctggcggttggtcagcggcgtggtggaagcaacaggcaacgaacgcttcctggtgatcggcaacttctacagcgacgaggccacgcccttcgaaaagcaggaaaccggcgaacggggcagctactacttcatcgacgacgtgagcgtgcgcgtggcaccggccgggagcaaacccacgccaaagccccaggagagcgtgccgccgccgcccaagcaagtggtggcggaccgcaccagcaccaaggaagtggccctgccccgcatggagccgccggcagtgggcaagagcgtgcgcttggacaacatcgggtttgagtttgccaaggccacactgacgcctgaaagcaagaaggagctggatgaactggccgacatgctcattgactaccccaacatgcgcatcgaagtggaaggccacaccgatgacgtgggcagcgaggcgttcaaccaaaccctcagcgaggagcgggccaaggccgtggttgattttctgcggggcaggaaggtggagcaggaacggataggctggaagggctttggcaaaagcaggccattggtgcccaatacaagcgaagagaacaaggcgctcaaccgcagggtggaattccgcgtgatcgaaaaataaggggactacaccgggctacgaacccggcgaaaagagatcacggcgccgggcaggttacacccgctcgtcgatcatgcggcgtgcaaggtccaggatgcgcgtgtcatccaaggccacaatgccgcctccggggccctcttccacatgcacgcccatgggcttcccgttgctgtggctgtatcccccgaaataattccagaccgtctccacgttcaggtccagttccttggcgatgcggtggatgctcccgtcgggcaagcggtccttgatgtcgcgcagctcattgaaggtgatgttcatggctcaaaggatttggannaatcacatattcatgtgattgatgagccttgctggcgatcgtatccttgtcgcccaatcaacacctccatcatgcgtatatcatatactccgccgatcttagtgctcctgttgctctccgcgcccttgctgaaggcccaaacgcttcaggtgggtgaccttaccccgccgctcggcaccccgatttcggtgcattacgttgactaccaacctcccggccctggaggcaccggcctcacttgggacttttccgccttcccaaccaccgaacccacggccaccaccttcgtggatgccacccaaagcacgtacgcggcatccttcccggcagccaacatcgcggaacacctcggcgatgatttctacgatttctatggctataccgcagcaggcattgattacttcggcatggctagcgcaagcaacaacgtgctgatgcagtaccagaacccgcaacgcacgatggtattcccgtgcagctacaacacttcctggcaggatgattttggcgggccgtggacgagctccaccggtgcttccgcccacacctatggcaatacgtcgatcaccgtggatgccatgggcactttgatcatgccctacggcacggtggagaatgtgctccgcgtttccaccaccacccatgactccgataccttcgccggcttcggctacatcaactatttcgtacaaagacaggattattacaagctgggcgttccccggccgctggttaccttcttcgaccaagttggcggcggcaccgccgtgagcggcgacctgaacggtaattttggcgcttggctggaggaccctgcattgctggtgcgcgaagtcgtggacaatgccatcggcatggacgtgatgcccaaccctgcccacggccatgcttccctgctattcggcaacactggggtgcagttggagttgatgttggtcgatgccaccggacgcatcgcgcgcaacatgaagctggaccggcaaccgttggggatcgccaagcaagacctggacctgaacggaattccgccaggcttgtacaccatccaactgaccgcagccaacgggcaaaaaggcatgaagaagctggtggtggagtaattcattgccctgcaccatgcacctatgtgaagggccgcccgatggggtggccctttgcatgttccgcatggccggcccagccgaggggcacgcagaaggtgttggtggaggcggggcggaagggcgcaaaagaccgcgacccctttcggggccgcggataagccttgaagcttagttctcacaacggaataatccttattgtgaaagacttcaggtcggtgcaagtatagtagattcctgcttttcctggttcggcatattttgtgccttcagtcccacaatgcaaaaacagtgatcgagagatgatgcaaaaagaaaatgaattggtcgtaggcctggatgtcggaagcaacagcgtaggctgggctgtggtggaaatggatggcgagaagctggaaaggatccacggcatcggcagccggatcattcccatgggcgatgagaagaaggagttcgagcagggtgccaagatcactaagaacgccgtgcggcggcagaagcgcagcatgcgccgcaatcatcaacgctataaactgcgccgctcaaatttgatccaggtgctcaaacttattggggcatggccggaagggctgggcgaacgaattggcccggatgcgccggtacagaccagcctgcaattgtatggcctacgtgccttggccgtggaagaccctgtctcgcttaccgagcttggcagaatcctgtaccacatgaaccaacgccggggttacaaggacatcggtgacctgatggacgagcaggacggcgccgccagcaccgacgagaagaaggacgatggcaagaccattgagagggtcttcatcgagaacgtggaggtggacgacgacaagggcaagaagaccaagtacctcgtcacactggctgatgggcgtgttggcactaccacgatcgcgaagatcatggagatgaaaggctccgagcaggaactggagatcacgaccaagaaaacaaagaagggcaccacacacgagttccggctggcgctgaagaccgattggcgcaagggcatggaaagcctgaaccaagcgatcgacgagagccagctcacacccggccagttcttccaccagcaactgaagaacgacccgcactaccgcatcaaggaacgcatcgtgttgcgtgacacgttcagagcggagttcgatgccatttggaagcggcaactgcccgaccacgccaccttgcagcgcaccgacttgcgcgacaccgtggtgaaggcgttgatcccgaacaacaagaaggagcaggcacgctggctcgccaaggatctcggcaccttcatccgggactacgtgatcttctaccagcggccgctgaagagccaagtgagcagcaagggccaatgccgcttcgagccgcagaagccggtgatgcccgtgagcagccccatctaccagctgttccgcatctggcagcaggtgaacaacatccgcttgatcgaccggtacggcaaggaaagtgaattgtccgctgcggagcgcatcgccgtggtgcaacacctgctcgaaagcaaggaattgaagacggacaagttgctcgatgccatcggacgcaagaaggaagagctcgggaacaacctgcgcgccaacctgcccggccaccagacgctggacccgctgcgggcaaggctgaagaagtccgccttgtgggggaagctgttgcaggaagcctccacgcccaaagacatcgacaagtccacgctcttccgcatctggcacatcctctactccatcccgatggaggagcatcgccagatggcgctgaaggccatcgacggcattccgcaggaagaagtggacgccctcgccaagatccgctacgaccgcaagaccggtgcggtatcggcgcgcgccgcttcgcgcatcacaccgctgatgacctgcggacacacatggaagtgggagaacatcgcaccgcgcgaccaacgccgcatcgaagaggtgatcgccaaggtggccgacggcgaggcgatcgaccgcttgcccaacgaggtgttcgcgcgattgagggcatattccaccaaggaacatttccaaggtctcccgtactggctggccgcgtccgtgctatacggcgaccatcgcgcggccatcgccaagccattcgacaagccggatcagatcaagaccctctcgcgcggcttcctgcgcaaccccgtagtggaacaggtagtgaacgaatccctcatgctgatgcgcgacatctgggccacctacggccgccccaccagcgtgcgggtggagctcgcccgcgaactgcggcagaaccaggcccaacgcaagcgcaccttcgagaacaacaaccagcgcgacaaagaccgcaagaaagtggtggaaatactgggcggcgagttcagcagaccgaagcccagcaagaaagacatcgagcgctacgagttatgggtacagcaggagcatcgctgcatgtactgcggcggagcgatacagaagggccagcttttcgacacgcgcgacaccgatgtggaccacgtcataccccgcgcacggttctacgacgacagcatccagaaccgcgtgatcgcgtgccggccatgcaatgccgacaagggtaagcaactcgccgccgcatacatgaaaagcaagggacccggcgaatgggaaacctacgtggaccgcgtgaacaaactgaaggcggggcgcaccaagaaaaagtacctgctggccgaggaagtgcccgagagcttcatcaaccgccagttgcaggaaacgcgctacatcggcaccaagctcaccgaactgctgcaacccatctgcacggtgcatagcaccctcggcatcgttaccgatgcgctcaagaacgagtgggggttgaacgaggtgtacaaggaagtcctcattccccgcttcaaacgccttgaagggatccttgaccgtaagctcattgaagagctgcaccggaccaacggcggcaaccacgtgcagtacaggatcgagggttacgacaagcgcatcgaccaccggcaccatgcgctggacgcgctcaccgtagcactcacccgccaaggctacatccagcgcctcagcaacgtgaaccaactcaacctcaccaacgaagagaaggaggccctgaagcggcccacctggtacccgctgccccaccccgatctgcgccgcttagtgagggaccagttggagcgcaccattcccagcatcaagaaccggcagcggctgctcaccaaggccagtaaccgcaccgcctacctcgacccctccaccggcgaagtgcgcaagggtgacaaggggaggaagcagaccaaggggaatctgcgcgccgtacgcggaccgctgcacaatgaacagcccttgggcgaagtgcgggagcaacgtaagtggccgctgaaggacgtgctgaaacgtcttgccgaagtgatggacaaggagggcgccttgcacgtattgcgacctatggacaagtccgaccccgactatcgcatacgtttcctcgcccatgagcatgaacggaaattgctccacgatcacctggcgaagtatgatgggcacatcgagaagatgaagaaggcactgaagaaggatccgctcgtgaacgcgaagaatgaacacgtggaagagcttaccatgctcgtgcccaagtacagcaccatcgtggcactcgcatcaattgcttccgggcaagacatgaccaaggagaaagtgttgaagaggatcgagaagatcatcgacgtgaaaatcaaggaacgtgtgcgaaagcacttcgaggcatatgcctcgaaccccaaaacagccttcacggacgaagccttgcatgcgttcaataagggtcaaagcgttccgattcataacgtacgttgctggaaggacaagggagggaaagacctcttggttggaaatgccaaggggcgaactcctatgaggcggccccacgacccgaaccggaaactgcatgtggaaaaaggcgagaactacgccctggccgtgttcgtaaacgaacaaaccagtgaacgcaagttcgaagtgatccccttcttcgatgccgtggaacgaaaactgaacggacttgatctggtcgaggcacggctaggcttccagcacttcctgctacggaagggcgacgtggtatatgtgccaagacccgatgaagatgtgaggtccatcaactggaccagcaccaaagtggtcggcgaccggattatgcagatgaccaagatgacgcagcgtggtgagaactcaggacagttctatttcctgccttgccccttatccagcccggtcaccttcgacaagaaagcccaagagtttcccacggaatttgaggaccgcgacaacccacggaccaagattagctccgtctgtatccctgtccgggtcgatcgcttgggcaaggtcacccctctatttccgtgatcaagcgcaccatccatatcggcagtccctgcaccttgcgccggcgcgaaaagcaattggtggtgcaataccccaaggacttgggcctgcccgagcgaaccgtgccgatcgaggacatcggcgtggtgctgctggaccatgagcgcgtggtggtgacccagctgctgctggctgctttactggagaacaatgtggcggtgatcacctgcaacgagcagcacatgcccacgggcatgctgctgaaccttgacggccacacggtgcagacggagatcttccggcaccagatagcggccagcgagcccttgcgcaagaacctgtggatgcagacggtgcaggccaaattgcgtaaccaggcggccatgctcgaacagatcggcattcccggcgatgcattgcgcgaacatgcgaagcaggtccgcagcggagatccggacaacctggaggcccggggtgccgcgcactactggcgattcctgttccctgctcacctgaagttcacccggcaccgacatggggagccgccgaacaacttgctcaactacggctacgccattctgcgcgctgtggtggcacggtcgctggtgggcagtgggctcttgcccacgctgggcatccaccaccggaacaagtacaatgcctactgcttggcggatgatatcatggagccttaccggccctttgtggatgaactggtgctgaaactggtggtgcaggagcgcgtgaatgccgagatattggacacggccatcaagggccaactgctgaaggtgccgaccctggatgtaatgatcgatggccagcgcagccccttgctggtggccgttcagcgaaccaccgccagcttggcacagagttttcaaggtgggcagcgcaagttgctccacccggagtggcactgatcatggccccatggggcgtttggatgaataccggatcatgtgggtctttgtctttttcgacctgcccaccgccaccaccaaggaccggcgcaactatgcccgtttccgcaaacaaatcaaagaggacggcttcaccatgatgcaattcagcatctacgtgcgccattgcaacagcgctgagaatgccgaggtccacattcgccgggtgaagggtctgcttcccccagcgggcgaggtgatcatcttcaccctcaccgacaagcagttcggcatgatccaattctttgaaggcaagaagaaggccctggcaccggacaccccgcagcagttggaaatgttctgagcgtgtccgcccgcatcatgaccggctgggtagaaatgcgaaaggccctccggagttccggagggccttcgccgctgtgcctttttatcaccgggtcggcagccctgaaaccgcgtggctgtagcggttcaagagacctgtggtatcacagcacgtcaaag

SEQ ID NO: 3426 - DNA, 16198 bp, synthetic construct
  misc_feature 1..16198: note = Synthetic
  source 1..16198: mol_type = other DNA
tttcaagaaattgcctacaccgtagccgatgctttctttggcgaagatgtagaagccgatgccttgaaaaaaattgtatacgatacccttagtttcgatgccccattggtaaaagtaaccgagaacatttacagcttggaacttttccacggtcctactttggcatttaaagacgtaggcggacgttttatgtcgcgcttgttgggttactttatccaaaaagaaggtcaaaaaggcaatgtaaacgtattggtagccacctctggcgataccggtagcgctgttgccaacggatttttgggcgtagaaggtattcatgtgtacgtactataccccaaaggtttggtaagtgctattcaagaatgccagtttactaccttggggcaaaacattaccgccattgaagtagatggtacttttgacgattgccaacgcttggttaaaaccgcctttatggacgccgatttaaacgcacaacttaagcttacatcggccaactccattaacgtggcacgtttcttgccccaatcgttctactatttttacgcatacgcccaacttaaaaaattaggcaaagccgataatgcagtaatttgcgtacctagtggtaactttggtaacatcacagccggtttgtttggcaaaaaaatgggcttgcccgtaaaacgttttattgctgccaacaaccgcaacgacattttcttggaatacctaaaaacaggtcaatacaacccacgcccatcggtagctacccttgctaacgccatggacgtaggcgaccctagcaactttgcacgtgtgctagacttgtacggccacgaacacaaagccatttgtgccgaaattggcggtgcacgttataccgacgaagacattaccgaaaccattcaagcttgttacaaacaaacaggctacttgctagacccacacggcgcatgcggctaccaagcccttaaagacatgttgcacgaaggcgaaaccggtattttcctagaaactgcccaccctgccaaattcttaagcacggtagaaaacatcattggcgaaaaagtagcaattccagaaaaactgcaagcctttatgcgcggcaccaaacaaagtgttgagctaagcaaagaattcgaagatttcaaagctttcttgagcgccaacgcagaataagtaagtatggcacaatcgaatgccgaaatcaaaaaaattatttacgcctcgctctccaagcaaaccttaggcagagcgttggcgcaattatcgttgcttaccaaaggtacacccaacgaaaaactagccgctatccaagaaaactaccaacgcttgttaacccactgggcaggcggaggcaccgaccccgagcgcgatgctatttttaggcgtttgctgaaacaaacctacgagttgaccgacgatttgatagccgatcggatggtaaaaccattggctaccaacgaaacgtttaagcactactgggaacccaagcgctacactacccaattggtacaagaagccatcgaatccagtaaaaacggcagccccgtacaaaccgcttggatagtatcggccattacactcaactgcatcgaactttttgacgaaaacaaactgcgctgcctgtttgctttttgccaaagcgagcataccgaaacggccatgcgcgccctaacaggcgtaattatttgcttgttgctttacaaagaccgatacagcctttacccatccattaacaaccaattgcaagagttaatggacgatgaggccatggtatcgaacgcacaaaacattgtaaaacaacttattagaagcaaagaaaccgataaaattacccaagatatccaacaaaatatcttgcccaccatcaacaaaattgcgccccacattcacaaagaaatcacctccgatagttcgttcgataccgacaactacgaagatgaatcgcacaattggcaagagttattggatagcagcggtattcaagataaaatagaaggatacgcccaaatgcaacgcgaaggatctgacatcaacctcagcacctttgctcaaatgaaggtctaccctttctttcagcaatttgaaaattggttgcttccttttgacacatcgcacgaatcgctaaaagagttaatgggcacgtccagccgttctgccaacgaatctaacgaagccaccgatgcaaccgaagaccaaaatggattgggcaaactacttagcctaacgcactttttgtgcgattccgacaaatactcgttctgctttaatctgcaaatgattccatccgattaccgaaaatcgatggtagagcaaattaaaatgggcgacgagcagataaaagacatcgagaaaccatcgtcagaggttattagcaacctgtatttgcaagatttgtaccgtttttatacgctaagcagaagcagagagttttttaccaatccgtttttgctcgatatgaacgtgcacgaaacctcgtttttccgtttccttaaccccgaggggaaattcattcagcaattggccgactttttctttgccaaggagcaatacagcaatgccctaacggcctaccttaaatgcaaagagcaaggagcatccaacgaccatttgtaccgcaaattgggttactgcttacaaaaaaacgaacaatatgcacaagccattgcgtactacgaaaaagccgagctcctagagaacgcagatgtttggacttttagaaaactggcatactgccatcggatgttaaaagaatacgacaaggcgctttcttactacgaacaaatagacacgctaaaacccaacgacctaaacgttatttttaatattggtgtgtgctatgccgagttgggcgattacaaaaaagcgctcaacgcgttctacaaaatagagtttttgcaaagcgacatgagcaaaagcatctattaccacctctacatggcgcattgtctttgggctaccgacgataagaaagcggcgttagagcactacgctcttttcccacacgaccaactgtccgaacagttagaaaatgcttgcattaccctatccaatcgagataaggtgtatgttgtggattatttgcgatatagttaggagttaggagttaggagttaggagttaggaattttgcgattaagtgagagcaatgataaatttatttaatcattgccgaacgtgagcaaaatcatgagggcgaagcccgaataatttcagtgcgagccgaatgcagaaacaaacttgtttggttatgctgaggcgatgcctgaaatcatgagcgaagcgaataattacaaaaaatctcaatgccatcaggcattgagattttttattgcggttaattcaacccgatattattttttgtctttcaacaagtcgcgaatttcggtaagcaacaattcttctttgcttggttttggttctggagcaggtgcaggagctgctgctttagcttcttctttgcggttcaatttacccatcatgcgaatagccataaagatacagaatgctacaatgataaagtcgaaggttgtttgcaaaaaattaccatacttcatcactacttctggaatgatattgccctctgcatcaatagatgtttctttaagcacctttcccaactttgtaaaatcgataccacctactgccaaaccaataagaggcataataacatcgtttaccaacgaagttacaattttaccaaacgcaccaccgatgataacaccgacagccatgtctactacattgcctttcatggcaaatgctttaaaatcttgaaggaacgaaactgattttccgcccatttctttcaacttattttccataaattcttgatattattaaattttgagtgcaaaggtaaaaaaataatcaattacttaacaaattaattttacctgcgggggctacatattagcgataccaaaaggaatgtgtaccgcaggcacgttctcaatgccctcaaagtgggtcatctgatcgtcaaagaaaatgtgcggttttaggatgtttaaaatgcgcgccttttcaatgcctcccaaaaagaaagcatcgtctacctcaacgccccatgccttcaacgaagcaaccaccctttcgtgcgcaggagcactacgcgccgttacaatagaggtttttaagatgcgtttatacgatttatcggtagcagcacgctgtttttccaattgctgaaaagccgatattttttgtagcaacaccccaactggtcctaactgcaacgcctcgcccgcatgggctacctcgtggttgtaaaatgcgttaatatcgcccgatgttttgtacactttctccgattcatcgctcgccaaaaccccatcaaagtcaaaggcaagacgcaattgcttgtcggtatcatcatcggccacgtaggtagtaggcaataccctgcccgccgcataacctgcttgcaacgctgcctttacatcgtctatattggccgataaaaacaatgctgcgttaaaggcaggcaaatactgaaaattttgctcgcccgtagtaaagcaggccctgcacatatccaatccgtaatgcttaatggaacggaatgcacgctcgcctgtttcgggactgtttttagaaagcaacaccacctctacaggcagctcctcggggaaagcatcgttcagcgaaagcaagcgttttacaaacggaaaagccacccccttttcaaaaggcacatttaagtttgcctcttgataggcacggtacgccgcctcgcctttatcgcgaaatactttatcagactcggtcaaatcgaacaaagcgctcgatgctaccgcaataaccaacttattttctatgaaatagggcatacgactctatgaatctgtatttttaatatattttatgcaaagataatataaaaaaaaactacgtcctaacatattttattaacttcgcacttgaatttataacataaaattatatgaaaatgaaatacttttacatccttgcagttgtacttttagccagttgcggcgggggtaatcagtctgcacaacaaaaagaaaaaagaatgacaacaaccaacattgtacatggttctatcattgagttgatggtgcccgaagacgaaggtggcaacagcatcaacgaagcattatgggcgcgtcaatcatcgcgcgagtaccgcgatattccactttatttggaagaattatcgggcgttatgtgggcagcagcaggtgttaatcgtccagacggccacttaaccgcaccatcggcattagcactttaccccatcaaaacctatgcatttttaaacgaaggtgtctacctttacaatgcaaaagaaaacattatggaacgtattgtagaaggtgactatcgtcatttagcaaccttacaagactttgccaataaaccatcgcttaacatcgtttacattgcagatatgtctgtgtacgaaggcaaagatatctcagaagaaaagaaattgatgctatgtggcatggacgctgctggttatgcagaaaatgtgaacctatttgctgctgcatacgaccttaaatccattacccgcggtggggccaaagaaaacgaattattagaactattgcaattggatcccgcacgatacaaatttattttagcacaaaccgtaggcaaatagcaaccactataaactgaatacaaaggctgtaattaattacagcctttttttttgccctttcaggtagaaattgtaactttgagaatctaatacatttactatgaaaaagtttatcactaccacactagcagcccttttagccaccttaacagcatgggcacaacaacctgccgatacctttgaatggggcaatgcaacggtttattttgtaattaccgaccgtttttgcaacggcgatgttaccaacgatgttaactacggccgcatcaacgactacggcaccgagcaactgaatgctgccacctttcatgggggcgactttaaaggcatgctagaaaaagcgcgccaaggatactttaccaacttgggcattgacgtggtatggatgaccgatgtgtacgaacaaattcatggttggatgacgggaagcggttctatcaacgatttcccccactacggatatcacggttactatccattggactacacacaaattgataaaaactacggcaccgtagaagagtttagggaattggtaaacttgctgcacgcacaaggcattcgcgttatgctgggcgccaacatcaacgaccctggctaccccaccttgttagatgctgtgcaatatggttttgctaaaacgggtttaaccgaacaagaagcggcacaacacatcaaagactggagttacgataatttttatgccaaccgacttaactggaaaggttggtacaaccgcgattgggtacgcatgcccgacgaaggatgggacgaaaaccaccccttgcaagccaccctgtttggcatgcccgattttaaagacgaaaacaccaaaaccgttaaaattcccgatttcttaaagaaaaaatggaaaaaagaaggccataaaaacgacgcatgggtaaatccatcggcggtaaaactacgcaaagaccataaatggaacccctcgcaatacgtagctgcctggattgcatcgtgggtagaagaatttggtattgacggtgttcgatgcgacattgtagaaaatacccagctgtatcgttggaaagaattatcggacgcttgcaaccaagcccttgccacctggcgcaaaaatcaccccgaagaccctgccagccaatggaccgatgccttttacatgacaggcgactttgacaaagcaagcatcgactacaaagccgattatgccgaagctggattctcgtcgatggtgaatttctatttcccaaaatcgggcgatttagacggcattgtttatacctggcaagcctactccgatagcctgcaaaaataccccaattggcactcgtttaactacctcaacaactcttacaatcgcgatgccaagatggataacatgattaactgcgctaccacgttcttgctatcacccggcgtggcacaagtattctacggcgacgaaacccgccgtccgctaagcgatgcacaatacaacgtagacagcgctcaggctttccgttccgatatgaattggaacagcatcgacagcaccctactggcgcattaccaaaaattaggcactattagaagagccaaccccgttattggaacaggcaaacaacgcatcatcgacacgcatacttgtgtacgatacaacgataccgataccttggtaattcgtttggcggtagagggtggcgaaaccatccaattgggcggcgcctttgccaatggcaccaccgtaaccgagctatacaccggtcaaactgccaccgttaccaacggaacggttcgttttgaacgcatcgaaaacaaagtagccatcattaaacaatagttaccctattagcatgaaaattttatttgtttgtttgggaaatatttgtcgttcggcttgcgccgaagctgtaatgaaaaagaaagtacaagaagcagggcttgagggcgatttttacatcgactcggcaggcattctatcgtaccaccaaggcgagcgcgccgactaccgcatgcgcgaggcaggttttcagcgcggctacaacgtagacagcatatcgcgcccggttacatcgtccgattttgaaaagtttgacctcatcattggcatggacaacagcaacatagacgacctttacgaccgtgctcccgacgttgaatcgacccgcaaaatacaccaaatgaccgaatactgcacgcgccacaccgacgaccacgtacccgacccctactacggcggccgcgacggcttttaccacgtcatcgacctactagaagacgcctgcgacgggctattggaaagcctaacgaagtaaaaaaataaaatccccgaaagcataagaaaactttcggggattttttgtcagtatgggcactaatccaagaactctcctactacattagagatgttttggaagaacataatatagtagataggaatataggttataccgttctctttataaactttttgctcatttgatagcacataggctttcttgatgctatactcatcgttcgctataaatttatccaaagcactatgaatggtataatctttgcccgatttcacttcgattgggataatagataaattatcggcatcgtcaatcaaataatcaacctcgccgtttttcttattatcataataatagaggttgtagccatgggcttttaactcttgggcgataaccgtttcgtacacagaccctaggttaatactcttaatatcttccatcaccgccttgatgttgttacgatagaatatactagaaagtaatccaacatcgttcaagtagagttttaacagattcttaccgctattctctattaaaggatacgatggtttacttattgcttttacttctaatgcgatgcctgctgaaattaggtaatcaaattcattcgaataatcggcagcccttttccaacttttatcctcaatttctttcatcaccacccttttctttttattctcaaggttagaaggtatcatatcaaaaatacgacgtatctttaattttttatcgtgttcttcctcgtatttagaagcatctattccgtataaaccatgaatctcatgctgaatagaacgaaactctattacatttcgattttccacaaatacctcaactgctttgggcaatccacccaccaacaaatatttcttaaagagatccatcatcttgttgtgcatagaatcggacaaagcttgagcgttattaaaactgtctctcattgcctcaatagccaaattccccactccatgggcatacagaaactcttcaaagtccataggatacatgtgctgtatatccaaactgccaatgggaacagactgcgtattttttaatgttactcctagcaaagaaccgctagcaatgtatgtaaacttcttttcttgcatcaagaatttaaccaacgttaaaagatggtcgtacgcctgtatctcatctataaacacaagcgtattttctttctccttcattttatcgccagcaaccaaactcaaggccatatagaaatctttggtagttttagcttctgcaaaaattctatcacctagtttatcctcctccatatttatttcaatatagttttggaacattttttctcctacatgacgaataatgtacgatttacctatctgtctagccccctcaattagcagcattctatcagcatctgacgagaggtatttttctatactttttgtaatttttctgtacaacatataacttgctcattactagcgcaaatataatacatttttttaatttaactgcgttttcctataaaaatcactgcaaaaaaggtgcgttttcctataaatttaacccctaaaaaactgcgttttccgataattttgaccctcaaaaaactgcgtttcccgaaaattcctctaccctgtcccacgatttgagacagggtaagtttatatttgcccttattgtctcacccactataatgaagcattaaaagcatatagtatgataattagagtagaaatagattcacaaacaaaggcaggaagaaaggtctatgagttaatacaaaatcttagacataaagacggaattacattcataacagagtgggaaacgctaacagacgaagaaataaaagcgttaaaggaagaactgattcaattaatcgatgcagaacaaaaaaaaagggaggggtatcacttaaataattgacagaatcataaaggattagcatctaaacaaaacctatcattctttgattctttgtaagtattttataattttgtgatgggtatataaaacgaaataaaaaatcccacgaaaactcgcgggattaagataactacggcttatagccttgttgtgaaaagtctttcactagtatctttcgcaaagatacatcaaatattaacaataacaaaataatttatacaacatgaggattctaggacttgacataggaacacattcattgggaacctttgtaagagatactgaattagggagtaatataaaagatcaaactgtttatttttctgtagattcttttaattcaggaattgggaatggtaaaaaagccgaatattcatacgcagcagaacgttctgatttcagacgaaaaagaattttaaacgaacgccgtagatacagaaaatgggcaacattaaagttattaattaaatacaaaatgtgtcctcttaccacttctgaattagagcaatggactacatacgataaaagtcgaggattatatagacaatatcctattaatgctaaaaattttgaaagttggatacgtctagattttgacaagaatgggaaacctgattacacaagtccttatcagttacgacgagacctcatgtcacgacaatttgatttttcacaagaacatgaacgattcaaattaggtcgtgcaatatatcacatagcacaacgaagagggtttaaaagttccaaaggagaaaccatcaaagaattagaacaaagtgatacaattaatgaaaatttagcaccaaacagtaatttagtactagaattactcaaaaaatctgaatccgaaaaatctagttaccttgtagaatacatgaatagccataaccttcgaacagtaggttgtgcttttgctagactagaagacgagaggatacgcattagaggtagtaaataccaagctgtacgttcacaatacaaagatgaaataaaagagatttttgcctttcaaactggcttagcaaacgaacaggagcttttaaatcacctactgagtgagaaaaaaggtgaaggcagtattttctataaatgtcccttaaaatcacaaaaaggtttagtaggtaaatgcacacttgaaccaaataaaacccgttgtcctattagccatccaaaatttgaagaatttagagcgtggagttttataaacaatattaaatatagagcacatgcgcatgaagactggaaagaattatctttatgcgaaaaagaacttatatactctgagatattcacatcaaaagtacgtaatgatttttcctttttagagattagaaaatggattgaaaaacatcataatctaaaacttgaacataacgaaaagaatagcactgtaaattatgatgataactgcaatgtttcgggatgtcctataacagcacgattcataaaactattgggaacagcctgggaatcgtataaactacaaggtactaaaaaacgatggagccatagtaaaaataaacatactttacatacaacatcatacgatgcttatgatatatggcatgcgtgttattctatcgaagaagaatctgacatatgctcttttgctaagatacgattgggatggaacgatactgatatacagcaattactatatatctggagtaaaatgaaagacggatatgcaatgattagtctaaaagcaatcaacaatatcaattactttttacgtcaaggatacatttattcagatgctgtaatactcgcaaaacttccagatattataggttctgcaaaatggtttgcacaagaaaaagaatatttagacttaataagcaaagtatattatgaaattaaacaaacacatacagcagaaaaaacaatcaacgacatctccaatctactgatcgcgaattataaatcgttaggattttcaactggtatttttgcttacaaggattacaaatacacgcttaacaatgaagataagcaagatattctaaaagcggtaaaagagcattacggtcatttgaaatggaataacatgtgcgaagaaaaacgaaacaacattcttcgtatggttgaagaaaaatatcaaagtttcttttttgataaaaagcgtgcttacataagcacgccaaaaatttcaacgctacttacagatgctttgtctgatttattaggtaaagaattagattttgggaaattataccatcattccaatatttcaccatatgctaataaacaaaatggagataaattaggtaaccctaacatgggatcaataaaaaatcctgtagcattacgtactttacagattatcagaaaaaaaatcaatgccctaatagaaaataatatcatagatcctgaatacacaatagttgttattgaaacagcaagagaattcaataatgcaaacatgagatgggcattaaaaaaacaccaagaatgcaaagaagaagaaaggaaaaatatagaaaacttactgaaagaattctaccctaccagaacaatctctgatacagatattaataaagcgcgattttattttgaacaacaagaaaattatatcgataagttcgctacagaacaatacgaaaaagacaaagatctcgcaaaaaaataccaattatggaaagagcaagcatgcgtttgtttttatactggtcgtataataaaacttactgaattatttggagaaacaattcaaatagaacacacagttcctagaagcatatcttatgatgattccatgacaaaccttactatatgtgatgctcattataatcaggctattaaaaacaacaagattccaaccaaattacccaactacgaggaagacattactatagatggtcaaacatataaagcaatccttcctcagttaaaaagatgggaaaaaatagttaaacgtataaaagataatattacaacatgggagaaacgttcccgttcggcaatcacaaaagacaggaaagataattgcattaggcaaatccatttatggaaaatggaacttgattattggcatacaaaattagaatatttcaaacaaacagaaatcactcatcaattttataatcgtcaacttgttgatactagactaataaccgcccacagtgcaatatacctaaaaagtctcttcaaaaaagtaaaagttcagaaaggagaaacaacagcaacatttcgaaaaatacttggtattcaaaaaaatagagatgtactttcgcatcatgcaatagatgcgatgatattaacaataataccaaccgctgcaaaaagagaacgtatgattaaactcttttatcaaaaagaagaatcatacgggctaagaaaagaatgctatataaatgacctgaaaaacgaaataaaagattgtctgatagggaataaaatagataattgtatatcatacatcaacgatcaccttctggtaaatcatatcagttccgacaagacttttattcatgctaaaaaaaagattcgtaaacgtggaaaaattgtactttttaaacaaagcaatggggaagcacattttcgtgtatctacaggaaacgcaatcagagcttctttgcacaaagaatcattttatggagccataaaactacctataacgaatgataatggcgcacctatcatagaaaatggtcaatttatatatagtaatgaggatcctgtaattgtcaaaagaattagtatccaagagataaaagaaggtgacgctgaaaaaatcataatagatccgcggattaagtactcaatctgtaaaaccatacaaaaacgaaaagagagtggcttgtcatataaaaaagcaatagaaggtgacttctatatgttggataaaaatgataatgaaataaaagttgataaagaagggcgtaatttatgccctattcgtcatgtacgatgtagggttaaatctggtgctggttatttgacatataaaacagcgttatctattagaaagcaaataaatatatcccaaaagagctttgttcattttaataatagaaattataagcaaaaagtttatgcacaaaatgatgacaattacctactattgctctataaagaagaaacaaatggtaaatcgaaatctaaagtaaatatcataaattattttgacgtagccaaacaaataaataataaatctaataaaatcaacaatataaaagacttgctaaatatttacagagaaataaaggaagaaaatactatataccatttaacagcatttattcaaaaaggaacaagactattaaaatgggataaaagtccaaaagaaatatacacaaagaacatagaagagttaagtaaatgcctatatgttacacatgcgattaacgaccgcattcattataagcaccatttagaaaatggagatacaaaagcaaagtcttgtcgttttggtaaaatgagtttcttgatagaaggaaaagatttcgagatagatatattaggaaacattcatttatttcaatgcaatgagacaaatgaatagttaacacttcaaatcatatttagaaaaaaatcacttgcctatgataaagaaaacattatactttagtaaccccgcttatttatcattgcgcaatgcacagttggttataaaaataccagctgtagagaaaaatgatgcactacccgatcatttcaaacagcaatcagagattaccaaacctatagaagatataggtttggttgttcttgacaacaaacaaattaccatcacatctggacttctagaagcattattagagaataattgctcagtagtaacgtgcgatagcaaaaacatgccaacaggtttattacttcctctttctggcaatacaacgcaaaacgaaaggtttcggcatcaattagaagcctcactacctctaaagaaacaattatggcaacaaaccatacaagccaaaatagaaaatcaagccattgttttagaaaacaactcgcacaccgagtcaaaatgcatgcacatttgggctagcaaggtaaaaagcggagatacagaaaatttagaagcacgcgctgctgcttattattggaaaaatttattcccttttaaaggatttgtgaggcaccgagaggggcttgcgcctaacaatctattaaactatggctacgccatattaagggccgttgttgcacggtcattagttggaagcggtttactacctaccttaggaatacatcaccacaatcgatacaatgcttattgccttgcagatgacattatggaaccttatagaccatttgtagatcaattggtatgcaacattgtaacgaatgctgatgattacacagaattaacaaccgagataaaacgtcagttacttaccattccaacgctagacgttacgataggcggcaaacgcagtccgcttatgattgccgttagtcaaactactgcttcattatacaaatgcttcagtggagaaatgcgcaaaatagtttacccagaactttaatggaaagattaagcgaatatcgtattatgtggattctagtcttttttgatttacctactgaaacaaaaaaggacaaaaaggcatacgctgattttagaaagaatttacagcgcgatggctttactatgtttcagttttctatctatacacgccattgcgcaagtatggaaaatgcacaggtacacataaaacgtgtcaaatcttttttacccatgtatgggcaagtaggtattatgtgcattaccgataaacaattcggaaatatcgaactattttatggtagaaaaacaatgtcgctaaatactcctgggcaacaattagaattattctagaaacagaaaatcccgctctaaggcgggatttcttattcaaaaacagtttcttttttattttcaaaaaagttgcgtaaatgattacatatcagctttttatacagatcgtactgtttctgatatgtcaaagataaataaatgaaagcaattcacaactatcttcatcgtaagtaagagttacaaaaactgtttctgatatgtcaaagataaataaatgaaagcaattcacaacgttagtagaagaattgaacgcactaggacaactgtttctgatatgtcaaagataaataaatgaaagcaattcacaacaatggtgaaatggtagattgggaagaaatactgtttctgatatgtcaaagataaataaatgaaagcaattcacaacgtttgcggccgctaccattgcatcgcgttactgtttctgatatgtcaaagataaataaatgaaagcaattcacaactattctccttgtattctattggttcttggtactgtttctgatatgtcaaagataaataaatgaaagcaattcacaacagtttcaaacgttttactatgcaccaaaaactgtttctgatatgtcaaagataaataaatgaaagcaattcacaaca

SEQ ID NO: 3427 - DNA, 23409 bp, synthetic construct
  source 1..23409: mol_type = other DNA
  misc_feature 1..23409: note = Synthetic
ctcatccaaactgacttccgtatccgccgtgagattgattttatccgtaaagacggagatacgggtgctctccgccacacgtttcagcaaaatcaccattgccagcagcatccccacctctatcgcgatagtcaagtcgaggaatacggtcaagaagaatgtgaccaggaagatggagacatcgctcttggggtgtttgaggagcttccggcaggtgcggaggttactcatattgtaggagaccattaccagcactcccgcaaggcaggccatagggatgtgtttcgtcagcggcgagagaaagagcaggatgaggagcagcaccacggcgtggatgatgcccgccaccggtgttttcccgccattattgatatttgtcatcgtgcgggctatggcaccggtcacgggtatacctccgaagaaaggtaccactgcgttggcgatgccttgggcaataagctcggtattggagtcgtgctgcccgcctatcaccccatcagccaccgacgcggagaggagcgactcgatggcaccaaggatagcgatggtaaaggcggagggaagtaagagtttgaccgtctcaaagtccatccccaaggcttggggcttggggatgcctgccgagatgctgaaccggtcccctatcgtttcgatggcttctatccccgcataagagcgcaaaaggtatgacgctatcgtcatcacgatgatggccgtcagcgagcccggtattttcttggagaactttggcgtaaaaatgatgagcagcacactgaccgccccaatgcccaaagcccacggattgatcgaatccaagtgcgaaaagtaggcaatccacttggatgcgaaatcgctcggaagacggtcaatgtgcagacccaaaaagtccggtatctgtgtcgtgaagatcgtcacgccaatccccgcagtaaagcccacaatgatgggataggggataaatttgatgatcgtccccacccgaaaaaagcccatcaataagagcaacagccccgccataaacgtcgccactgccagtcccggcacaccgaaggtctcgattatcccatagacgatgatgataaaagcacccgtgggacctccgatctgcaccgagcttcccccaaacgcagacacgatgaagcctccgatgatggccgtcaccagcccgcgctccgggctcaccccgcttgcgatgccaaacgcaatcgccaaagggagtgctacgatgccgacgatgattccggccatcagatccttgtagaaacggcttaatgaatagccctttagcgccttaaacagacgcggctgaaacatattgggtcgcattactaatctccagagaataaaaaagtgcctgctacaggtcgcgaaagatcggctgctgcaagtccggacaaaaacgagtgtaagaagaaagtacaaagttagcactttctttacacctccggctccttaagttaatgcttctatgcacggagggaagaaaatacagccttagggttcgggtaaatggggcgggcggggataaacgatttttttgtacctttgtgtcgcgttcggatcagagaggggtctggacgatattttctttgaattgactcggggtgtggcgcagtccggttagcgcacctgctttgggagcagggggtcccaggttcgaatcctggtaccccgacagcgacgattaagatggagaacttgggggtttgcaaaactgcaggctcccaagtttccttttacccctgtgcctgtcgttatcctgacgtcgcacgcctgatcctccctatttcgctctcttcctattttgccgcccccgggtcgtaatctccattcggcttaaaaggggcggcattgtctctaaaaatgggtaaattgcagctccattcaaacagcataagaaatacggggcttagaggggtacagaagaagtaaggactatggcagcgcaaagaagccttttcaaacgcattttcaaggactatgccctgatgtgggcgatggttgtgggcggggtcttgtacccgtacctttatcatctggagaatcttatcatttatacgatcttcattatgctcgtcttcgcctataccaaggtgcatccccgggatttgaagatcgagccgcttcactatgtactttttgcggcacagtggattttgggcttattgatttatttcgttcttgcccctttcagccccctgcttgcgcaagggcttgccctcattacactcacgcctacggcgacatctgccaccgtcatcaccatgatgcttggcggcagcatcgcttttgtgacctcattccttattccctgcaacatccttgtagccctcatcgcccccatccttcttggcgcgctctatcccgatacgggtgcatcgtattggtctaccgttttcgacatattggcagaggtctcggcgttgcttatcctgccgcttgtcctcgtttggactctgcgtttcacgctccccaaagtacacgcggctctggccaaacgtgccacttggactttttacgtatgggtggcaacggtagccgtcattgcggccaaaaccgtacacaccatcgtggttaatccggagcttacgttgcagaaaactgccgtctacttcgtggccactatgattctggcgatggtactctatttcatcggacaaaaaagcggtgcctacttcggcggtcagagagtcagcgggcgtcaggctttgggacaaaagaataccatttttgccatctggatcgcgtacacctttatgaatcccgctgtggggattattccttcgttttatgtgatttgtcagaatatcctcaactcccttgagctcgcaatctactcgcgggaacacgccgaccggtgaccggagttatttttggtcagaccaagaagagctccggatacagaccgacgattgcacttcggcctgtaccgaaacttcgcgagagtacgtccgaaattttccccggatctcggcgcgggcttctctaaaagacacatttatgcacacacttcagataacccgatttatgatgcacaaaggttttgcacgcgtttttacggcgattgtctttgctctcgccgttcctttcttcgtctatgcccaagagcgttccgccagggagcttcgtcgcctctctcccgcctcactcgaagtgatcgatggcgggggaaagagcctcgtgacgcttgatttttatggcgaaaatatcttccgtcttttcagcgatccaaaaggcggtgcgataaggaatcccgaaagtacgccacccgcacagatattggcggatgccccccgtggcaccgtgtcgcccttacagacggaagaccgtggcaaatacttcagcgtcagaagcaaagagatagaagtgcggatctccaaagcctccggtctcctctccgtgtttgacctcaagagagacaaaaaagtcttggaggaaacggctcccgtcaccttcgcggagggcaaaacgacggtcgttttcgctaattccgaagaccgaggctattatggtggcggtgtccaaaacggacgctttgcacacaagggagaggagatacggatcttcaacagcaacaactgggtggacggaggcgtggcttcgcccgcaccctacttctggagtactgcaggttacggcatcttgtggcatacctttaagcccggaagctatgacttcggcaaaaaagacccttcggaagtccgcctttcacacgacaccgattacctcgaccttttcgtgatggtcagtgagaagcctgaggcacttctcggagattattaccgtcttaccgggaaccctgttcttttgcccaagtttgcgctctatgaggggcacctcaatgcctacaaccgcgacttttggaaagagacggacgaggggggtatcctctttgaagacggcaagagatacaaagagtcccaaaaagacaacggtggagtcagggagagtctgaatggagagaaagacaactaccaattctctgcccgtgccgtcgtcgaccgctacgccgcacacgatatgcccctcgggtgggtgctccccaatgacggctatggagcgggatacggacagacgaacaccttggagggtaatgtccaaaacctcaaagagtttggggactacgcccgctccaaaggcgtggaaataggcctctggactcagagcgacctgcacccgaaagaaggcgtagagccgcttctgcagcgcgacatcgtccgtgaggtccgggatgcgggcgtgcgtgtcttgaagacggatgtggcctgggtcggagccgggtactctttcggactgaacggcatcaatgacgtggccggcatcacgacgaagtacggtggcggtgcccgccctttcatcatcacacttgacggctgggcgggaactcagcgctacgccggcgtttggacaggagaccagaccggcggggagtgggagtacatccgcttccacatacccacttacatcggtgcgggtctctccggtctctcgaacatcacgagcgatatggacggcattttcggtggaaacaatagccccgtccttgtcagagacttccagtggaagaccttcacccttatgcagctcaatatggacggttggggcagtacgccgaagtacccgcatatcttgggcgagccttccacgtccattaaccgatcctacctcaaatggaaatctatgcttgtcccttatgcctattccataggctatgaggcggtcaccgggaaacctgcagtgcgtgccattttcctcgatttccccaaccactacacgctcgggacggagacaaggtatgagtatctctacggcccctatttcctcatcgcacccgtttacaaagaaacaaacgcggataaggacggaaacgacatccgtaacggcatctatctgccggaagggacgtggtacgactattttacgggtgaaaagtactccggtgaccgcatctggaacgagtttcctgcgcctatctggaaactgcccgtcttcgtgaaagccggtgccgtcatcccgctcacgaaaccccacaatcaacctcgggacatcccttcggactaccgggcgtatgagatctacgggggggcagagactacgtttgacgaatacgatgacgacggtcactccgaagcctataaggacggagcaggggtgcataccttactctccctcaatgagaagggaaatactttgacctttacggcgcacgcctcgaaggggtcttttgacggattcaaccccctcaaagagaccgaactcttctggaacctttccgccaaaccatcctccgtcactgcttcctatgccggcaaaaaagtgcgtctcggacgggcaaagaccctcgaagagtaccgctcgaaagccgacgtttggtacttcaatccctcccccgagcttaaccgcttcagcactccgggctcgactgaggcaaaaaggagcctccctaagaatccccagctttgggtcaaggtgggtaagcgggacattacttccggagatctctccgtgacggttcgggacgcgcgattggatctcccgtcctccctttttgtctctcatggaaaattgtccgaaccggctctcctgaccggcaaagctgaggcaaaagccttttccccctcttggtcgaaagtggaaggggccgatgcctacgacatcgacttcgggggtatgctctactccggaatccgtggcgcttctttccgccttgaggatctcaagcccgagacggtctacgactacaaagtccgcgctgtgaatgcggacggggtctcgggttggtcaagcggatcctttacgacgctcgaggatccctaccgactcgcagtgaaaaatatccggggacagagctcggctgcttcgcaacccggacagggcgtggacaaactcttcgatttcgacaaaaacaccatctggcacacctcttggtcagagcccgcagtcccatttacgcttactctggatctcgtgacgctcaatgaccttgaccgccttgagtattatccgaggaaagacgcaggcaacggcacactcatccgaggctctgtctccgtctccgcggatcgtcagacttggtcggaagaggtgcctttctcgtggaaaaaagatgccgaaatgaagacaatctctttccccacaggaaccaaggcgcgctggatacgcctctctgtctctgacggtgtaggaaacttcggctcaggttcggaagtcatcgtttaccgccgcgacgggactaaaccgctgttgcagggcgacatcaaccacgacgagcgcctggacgaaaacgacctcacttcttacctcaactacaccggtcttcggactaaggactcggatttcgactacataaaggagggcgacatcaatgccaacgggcttatcgatgcctacgacatctccgtcgtggccacaacgctcgatggcggtgcgtccgcacggagcagagataaggccgaagggcggatttcgctcacacaggacaggacgcagttcaaggccggtgaggagatcgtcctaaccatcgaggcaaaagatctccgcagtgcgaatgccctctcttttgccctcccgtacgatgcctctctccttgagtatgtggggatggacaaagtgggtatgaaagagctctacgacctcaccaatgatcgtctccacacggacggcacgaaagaactcttcccgactttcgtcaacatcggtaacaactttctcttggaggacggtacccttatgaagatccgtttcagagcacgcaaaaccggttcttggactgcggagatgcgcgacggtctcatcgtagaccgcagtctcggcacttcggctttctgaccgtctctttactgatgaaagagaagcttatagtgggtctgagtggcggaagagattccgtcgctctgacccattttctctatacgcaaggtggttatgacctcgttttggcgcatatgaatttccacctccgaggagaggagagtgaaagggatgaaacctttgtgtcacgtctctcgcgtgacctcttccctaatgccgagcttgtggtcaaaggagtggactgcgagggttatgcggccgtccataaggtctccgtcgagatggctgcccgggacctccggtatgcgtggtttgaggacctccgccggaaatacggggcgacttacatcgccgtggcacaccacgccgatgatcagattgagaccgtcttgatgaacctcgcccgcggcaccggtggcgcgggtcttgtcgggatgaaagagcgggacgacggaaggcatctcatccgcccgtttctctctaagacgagagccgaaattgacgcttatgtgacagatttcggtctcccctacgtggaagactccacgaatacggacgaagaaatccgccgcaactacatccgtcacacgcttatccctacttttgaacgtctgaatccttctttccgaaaaagtcttcttaggagcatcgggattttttccgaagaacaggcgtatatcgaaagcgtggtggatgaggaggaaaaagcccgttttgaccgtgacaccgacttgatcaagcttggggattcggacgaccaaatgccggagttgatcttcagacggctttttgcccgtcatggatttaatgacgaacagatccgaagcctccgtgggcttgggggcaagagtgcccgaagctttcaccttccttcttcggagatttctgcccaaagctttcggggcagactctatatgtatgaggatccccttcctctcaaaccctaccggatgcctattcggcagagccaaacagactatgacgtcccgcatttcggcggtgtccggattgacacgggggacagtcttcagcccgtcagggggaggcttcgtgtggacgcggggtgccttagacatacactttgcctgagaaatgcgaaacccgatgaccgtttcagcccgtttgggatgaagcgcggctccaaacttcttttcgattacctcaaagatcgtggtgtcccgcctgtgtaccgtcccttttgtcccgtagtggcttccgaagagtcgggagaagtcgttgccgtccttccttttgagattgccgaaacggccaaggtgacaggggacagccgtgagaccttgacgctgtccatttcccgtcctgattcctctcttgcccggctcctgcttacgctctcctgatacccgaaccgggtctttttgcgccaaaagatccgcgtaaccacgaggcaagggtgtatgccgagaaatcttctcggcgtacacccttgcccattgtggagatggagggacttgaaccctcgtccaaacacggaacccatccgctttctacacgtttagctttgcttgaaggttttcgtcctcggggtttaggccaaagctaccgcccctcggcttagtctcttaagtgtcgattacagcgaaagacgcgctgtaatcccttcccgatatatacggcaccgcatactcagaccacctcgggctcacggtatctgtgcgatgtctcgtgggagcaaaaggctcaaccaagagcgtgtgtcttactaaacttcagatcacgctgcgagagcgtagttgtattcgccatttaaaaaagtcgccatccgggatttaagtgccgaacagccgcgcactacgtgcttacgaaccgactctacgtgctgtcaaaaccagtcatccccggtagtttgaaccgcacaactaaagcgcttcggtaattgtactgcaaagttactgccaacttttgactctgccaaatccgcccacgcgggaaaggggtacagaccaaaaagaatgcgcgggtacgtatctcgcccccaagaggtacagaccgaaaagaccttcccggtctgtatgaaatcggtttcggatccggacgcttagttccttcgggaagagagggtacaagccccttctgccaaggggttggggaatagcggcatccttgacttttcccgtctccattagccgacggttaactttttctatcaaaaataaagggcagaccggtgatcttgcgaagcaagatgcacctgcccaccctttccccgattaattatgcgaggacatagatgttttcacaacggaataatccttattgtgaatagcttatcgattatctgttacaaaagtagggataatttcgtaaattgccaaagatttaagtcacaaacttatcagacctcattttttcttgaatgtattatgaagcatatactcggattggacctcggcaattcttccataggctgggcacacgtcaccgtggacgaaaaggattctgcaaataactccattatcgactccggagtacgtatcgtccctttgaccacggaggaagccaccagtttcccgaaaggtaaagccaagaccctgaacggagaccgaaccctcaagagaggaatgcggcgcaacaattttagatacaagctccgacgtgacgggctgattcgggctttaagggacggtggtgtcatcgatgcctccactccacttgcagaggatgggaaaggcacgacacacgaaacactcaggctgagagcccgggccgtacacgggcagatcacgcttggggaactggccagggtgttgctttccatcaataagaaacgaggttacaaaagcaaccgcaagctggatggccaggatgagggcgcattggtggacgggctctcgtactccgtggagatgaaaaaacggggcataaccccgggagaattggctttggagatcttggcggccggcaaaaagcatatcccggactgttaccgctccgatctcgaagatgagttccggaagatttggaacaagcagagggaattttaccccgaccttttgacggacgagctctccgagaggctgatgggacggagctccaaagcaacgtacgcgatcttgagtccactttttcgagtagatgcccaaaagctcagtctgacgaaagaagagaaaaagagaaggccctatgagcttcggagtaaggcgctaagggagcgacttgagccgtccgctctgatagaagcccttcaaagcctaaatggcagtctgagcggagccaataactacctcggcaatatctccgacagaagcaagcaactgtacttcgagcacctcacgggcggagagtatatgtacaggctgctccgggataatccccacgcgtcgcttcgtaacgtcgtctttttccggagggactacttggaggagtttaaccgcatctggaatacacaggccgcattctaccccgaagtcctcaccgatacgctcaagaaagaggtgagggattacctcattttttaccagagaaagctcaggagtcagaaacatctgatctccttctgtgagtttgagcaaaagcagaaagacggcaggacggtcggtcttagggtcgcccccaagtcgtctcccatttatcaagagacgaaaatcttacagaacctcaataacttgcagtgcaagctcaaagaaggaaacaaaatctccgaacggatgccgaatctctttgatgagggagaagagacgcctgctgtgaggtatgcgccggggacttttgacgaggagacgaaggcgttcctctttgaggaactgaatatgagaggtgacctcacggagaaagaggtgctgacgctccttttcccggaccacaaagaggcaagtgcgtaccggctcaactataagaaagtcgagggcaacagaaccaattacgcgctctataatgcctacctccgaattatccaggaggagggctatgaccttggtctcgtcctgaacggtcgggcatcctcaactgtggaaatgccggacatcaagaccgccaagctctctgcctcggaagtgaaacaaaatcttagggagatatttggggaattgggcattagagtggaaatcctcgactttgatgccacgctcccgaaccccaagtatgcggggcagctctcattcaggctctggcacctcctgtattcttacgtctccgacgaatccgattcgggcaatgagacgctctacaagaaccttagccggactttcggcttcaagagacggcacgccgagatattggcctctgtctctttctcagacgactacggcagtttgtccactaaggcactacgtaagatttacccctatttgagagtcggattagggtacagcgaagcctgcgcggaggccgggtacaaccactccggcttcatcacgaaggaggaaaacgagatccgggttcttaaggacaccatcgacgtactgccaaagaattccctcaggcaacccgtcgtggagaaaatccttaaccagatgattcacgtggtcaatgggcttatggatcgtaactcaaaccccgagaagcgtttccacttcgacgaaatccacatcgagctcgcccgagagctcaagcagagtgcagccgagcgcgaaacggcgtccaaaagtatcgccgaggctacacggctcaatgaaaccctcgcagaggtactcaaaaaagagtttgggatctcccgcccgacaagaaatgacatcattcggtacaagctgtggctggagctcgcccccatcgggtacaaagatatctacacaggtgagttcattccccgagatattatattcagccaaaaagtagacgtggaccacatcatcccgcagtccgtagtcttcaacgacagtttctccaataaggttcttacttttaaagacttcaatatccggaaaggtgcagctaccgcattcgactatatttcgaccctgggtgcggaaaagctcgcggaataccgggagcgaatcgagatcctcaagaaggagggtgccatatccgaagccaaagtccgcaacctgctcaagaaaaaagaagacctctctgacggcttcatcgaccgcgatctccgtgcgtcgcagtacatttcacggaaggccatggagctgctacacgaagtgtctcgtgacgttttgcccacctcggggcgcatcacagaccgcctccgaagggactggggacttataggtgtcctcaaggagcttgatatgcccaagttccgggcggtcgggcagacagagacgaatcgcctaaaggacgggcaagaaatcgaagagatcaaggattggaccaagcgtaatgacaaccgccaccacgctatggacgccatcacgatcgcctttacgagacgcaatcacgtccagtacctcaaccatatgaatgccaaaccggacagcgaatttcacccggtcgtcattgccacgaaaagggattggatggagaaagatgccgatggcaatcgtgtcttcaagaaacctttcgagggcatcaggagtcaggtcaaaaagagcctttcgtccctgctcgtctcctacaaggcgaactctaaagtcgtcactccgcgcaagaataagctccgaggcaaaaaaggccacatccaggccacgcttacgcccagaggtcagctccacaaagagacgatttacggattgaggtatgtccctaagagcacccccaccaagctctccaagaagttcacccacgaggatgcgctcctcatcgtcagcgagcctgtgcgcaaaatcgtccttgaccgaatcgatcgctatggcggagagcccgcaaaagccttcgaccctaaggcgatgaaaaaagaccccgtcctctaccatgatgcccctctgctcgaagtcaccctcttcgataaggtctacaccatccgcaaggaggtcaccgacttgacggcgaaggatatccctaacgtcctcgacaaatgcatccgcgaagcgctctcacgcaggctaaaagctttcggtggaaaagaaaaagaggctttctcgggattggaagacaatcccatttgggtagatcgggaagcacgtatcccggttaagcgcgtgaccctcatctccgacatcaaggatgctctcccgttgcattccgccacaaatcacctcggggatcccatctacgatggggatgaggtccgggtcaaagactacgtacagacgagaaataaccaccacgtggcactattcttggatgaagcgggtaaggttcgggaggtgattgtcaccttcttcgatgctgtgaatagagcgatggcgaaagagcctgtcatccggaagcacctccccgatcaccccgattggcagttcctcttctcgctcaagagcaacgagtattttgtcttcaaaaatgaatctaccggctttgatccctttgccataaacctccttgatccggctaatcgaagagccgtcagccctaacctctaccgggtgcaaaagcttagttcaaaagattacgtttttaggcaccacctggagagcacgttgacgatggatatcagcgaccttaccttcaaaagaataaatatgttgagtaaaatgctcgatgccgtcaaagtacgcctcgaccacctcggtaatatcgtggcagtaggagaatattgatcccgtttttcgcctttcttgtcatgctttacagaaccgtctacatcggcaatcctgccatcctcaggctgaaagaccggcagatgaggatccgcaccactgctgacgatatggatctcggcagcatccccgtcgaagacatcggactcgtcattattgaccactcttgggttaccatcacccaaggtcttatacaagccttggtcgaaaataacgccgtaatcgtctcttgtgaccaaagtcacatgccgcttggaatgatgatttccgagagaggtcatacggagtgctccgagcggataaaagtgcaagtggaggcttctgatgcgctcaaaaagcaactttggtctcaaatcgtaaaggccaaactctcaagacaaagggagctgctctgtcgcctgagtctcccctatgagccgatggatgactatgtccgaatggtcaaacccggagatgagaccaatatggaaggggtaggtgccaggtactattggggacggctcttttcggaagacttcagaagaggacaaacagatgacctgcctaacgtgcttctgaattacggttacgctgttctgcgtgccacagtggcacgtgcgctcacctccacggggttgctcctcgtcttggggctgtttcaccgcaataaatataatccctactgtttggccgacgacttgatggaaccttttcgcccctttattgacgctttggctattgaatggttggctgaccacgcactcgaagaggggttcacgaaagaggcacgcgcccacatgctgcagtgcgcgacgatggatgtacgtgcaggggacaagctcagtcccctgctcgtcgccgtaagagacgcggcatcctctctgtatgcttgttatacagggaggaagaggaagctcgttttcccctcgttcccttagtgccttatgatttcttccgatcgatacagcgcttaccgaagtatgtgggtaatggtcttctacgatttgccgatggatacgaagtctttggtaaaagcagccaccaagttccgaaaaggactcgaaaaagacggcttcaacctcttccagttttccatctacatccgtcactgtgacagccgggagaatgcctccgtacacatcgggcgggtcaaggccttgatgcccaaatatgggtctgtcgcgctgatgactgtcacggacaaacagttcggagccatagaactctttaatgatcgtaaggtaaaggagctgcccgaccagcccctgcaactcagtctcttctgaaataagcttttggggcttcggtgtctaaaggtcttgcagcccccgaaatgaggtacgggtcggggacaaattcttggtctgtatcttttgtccacgccatacggatcaagaaaaccatctcggacgtaccaagaactaagaagagtccgggcaaacaaaaaaagcgcgcccctgttagaatgcacgcaattaggagtaggaagcggcggaagcatagcttcgatctcttaccggcatcctgcgtcgcaagcgtacacacttattctataattatgacgattgaccggctaaggataagcgcagtccggtcgtgaatgggttctaagattatcgtacctttgtgataggtcacaacccggcaccgtggcgggcgcttgcgtcaccgttgtgaatagctttcagattatcgtacctttgtgataggtcacaacgtgggggtgcgtgaatagaaaccaaacaaagttgtgaatagctttcagattatcgtacctttgtgataggtcacaactgaaaggctttttgccgtagaccttggcggggagcccgtattggtggacggcggcgtagggagcggtgttttggacgcggacacccttggcggtggggaggtacttaaaggaggcgcggaggtgaccggtctcgcccgtgaggatcttggcagtcgtgcgcgcctcgctaaacctgcccgtttgccccgagtgaccgtaccacggggagtccgggtcgcgccgcttgacgtcctgccacgggttgagcttcgagtccgtaaagccctcctccgcgaagctcccgcggaaatggtcgatcgcggtctccgccatcacctcccgcatatcgcccccctcgaggtactcgtttatctcctgcaacttttgcgctgcgtgtatccttagctcgtcgatcgtcataattatttggtggtttcaaaataagtgcgtatgtttgcagtactatataggaggctctattgggactgccccggttggtaccggatcgcgtcacctgatagggtctccttctttaatgttagggttgatgtcctcgtctatgcagtaaaagacagtagacccgtcgtccatccgtttaatgttgagataccccgttgtgaatagctttcagattatcgtacctttgtgataggtcacaacttttgttgcaccctgtggccgcaaggagtagttgtgaatagctttcagattatcgtacctttgtgatagatcacaaccgagggggccgcgctgattgtctatgagttgtgaatagctttcagattatcgtctctttgtgataggtcacaacagtggttcggattatcgtatctttgtgataggtcacaacactcacccgcatcagtaaagaaggagaactgttgtgaatagctttcagattatcgtatctttgtgataggtcacaactttctcactcggtgcaaagtggtgcgacggcgttgtgaatagctttcagattatcgtacctttgtgataggtcacaacgagagggtcttgatgccgcccttgaggacggttgtgaatagctttcagattatcgtacctttgtgataggtcacaacttgagctgctcggtggtcggctcaacaaaagttgtgaatagctttcagattatcgtacctttgtgataggtcacaactgaaacataccgactgctccttttgaacttgttgtgaatagctttcagattatcgtacctttgtgataggtcacaacgatggacgacgacctcaccaacgcccgttagttgtgaatagctttcagattatcgtatctttgtgataggtcacaacgcgagatcaaaaaccacggagccgtcagcggttgtgaatagctttcagattatcgtatctttgtgataggtcacaacttttcgttgatatcttctacccgcgtaccggttgtgaatagctttcagattatcgtatctttgtgataggtcacaactggcgtaccccaaaggtgccacaggtagcggttgtgaatagctttcagattatcgtacctttgtgataggtcacaacggcatctgattttttaaccacggagcaggggttgtgaatagctttcagattatcgtacctttgtgataggtcacaaccgcccgctctcatagtctgtccagtcgtgcgttgtgaatagctttcagattatcgtacctttgtgataggtcacaacaatagcacacgccattacaataacgcaggggttgtgaatagctttcagattatcgtacctttgtgataggtcacaacacaagtccggtgcatagtccgagagccaaggttgtgaatagctttcagattatcgtacctttgtgataggtcacaaccctcaatccctaatgctctataaaatagtgtattagggattgattttacgatttcctatttctatatcttgttctgcgggtagcgcaaatctttcctgaaatcttaatcctaatcggagcaaccgttagcactgacgtttcctctgtcctcgagaaatttagttcccgccaacaaagtcactaatcttctgtcgaaaagaggctaaccttttctcttgagagatactatgggattccgttccttgtgtacagaaccacatccgatcctgtctaatttccaccgcccgatctctttgtcgtcctcttttccgggttcgctacccccttctttccccatatctgcggattttaggtcactgtggactgctcaccgctaactataaaagcggtatctttgccgtacattatgtcttcagaaaggatgcagaacggcagaaagaaaaaggaaaacaaaattgtcccggaggttcggatcgagcgcttggcggcagaaggacaggctatcggtcatttgcctgacgggaaggtggtcttcgtcccctacggcgcaccgggcgacctcgtggatgtccaaatactgagaagcaggaagagctacgcggagggacgcatcgtccgctatgcggagctctcaccggagcgtgagacaccgaagtgtccccatttcggggtttgcggcggttgcaaatggcagcatattccgtatgcgctccagttggcgaccaaagagcagtccacctacgaccagctcgagcgtatcggcggcgtggatatcagagagaaacggcccattatcggcgcggacacttatgagggcgggaggacttacgggtatcgaaataagctcgagttcactttctccaacaatcgatggattccggcggaagagatgactgagggcgtccggattgacgaccgcgacggactgggattccatatcccgggacgttttgaccggattctcgatattgaagagtgtcatctgatgcccgagctcaatgaccggatccgcctgtatgtaaaagagtattgtttgacacacgagggattcgggtttttcgatctccgaagccatgagggtgtgatgcgtaatctgatgattcgcacttctgagagtggcgaggtgatggcggtggtggtctttgcccaagatttgccggagcagagggacgaactgctctcggccgtccgtgagactttcccggaaatctcctccctgatgtacatcacaaacgccaaggccaacgactcgattgcggatcgggaggtacacctcttcagcgggttgccgtttatgacggaagagatggagggtctgaagttcaaggtgggaccgaagtctttttaccaaaccaattcggccggggcgcacgcactgtataaggtcgcccgagactttgccctcggagacggagatgcttcggagcaacttctgtatgacctttacaccggcaccggtacgatcgcctcttttgtcgcgcgtcgcgtcaaaaaggtcattggcatagaatatgtagaagaggcagtagagggggcgcgcgaaaatgtcctgaggaacggaatccgaaacgcggagttttttgcgggagacatgaaggatatcctcacggaggactttgtgaaccgccacgggaagccggatgttatcattacggatccgcctcgcgcggggatgcacccttctgtcatccgagtgatcaccgaggtggcgcgtccgagccggatcgtttacgtcagttgcaaccccgcaagtcaggctcgcgatatgcttgagctcgggaagcattaccgcgctcttatctctcagcctgtggatatgttcccacagacccatcacgtggagaatgtactgctccttgagcggatcccgaatggcgacaagtaagtaagcaaatacagacacacgatatacaggaagcaaattttggaaaacattacgactaaagagactgccgcattccccaacgacttggtgcgccacatcgtcacgggcatccgggacaagaaaggcaagaaaatcaacatcctcgatatgacggggatgcatgacgccgtctgcgattatatggtgatcgcttccgggcaaaatcccaatcagctcagggcactcgaagactccgtgtgggacaaagtttttgaagagacgggcgagaaaccggtctacatacattttgggggcggtgagtggataggcatcgattacggcgacgtgatcgtccacctctttatgcccgaaccccgggacttttataagatcgaacagctctgggaggatgctccacagacactcctgcccgaccttgactgaaccttttccttatggcaaactctttcggggataaccccggcacccaagcgcccaagaagcgtaaccatgtcccggctcccggtccgaagcccggaggcgggggacggtcgtttatgagctggatcttcatcggtatgctgacgatcctcggctcgatattctttttctcggacgacgagccttccgagtccgtggactggactacgttccagaccttgatggagagggacttttaccaaaagatcactgtctactcctccaaggggtatattcatgccgtagtcaagaaggatcaagtgccggctcttgccgagtacggcatcaccccctctaagggcaaaggcattggtcagagaccgagcctgctgagccagacggtggtctccacggccatgccgcccggtgccacggcgttcaatgacctgtatcaaaagctccgtgaggaaccggctcccatttctgccaaggtcagctatgtcaatgacaatttctcgatcatagggctcatcggcagccttctgccctttatcctccttatcgtcttttggatatggatgagccggagtgcggcccgtatgtcgggctctatgggcggaatcttcaacgtgggcaaaagcaaagctcagctcttcgaccaagacaacagggtacaggtcacgttcaaggatgtggccggtctcggggaggccaagcaagagattgcggagatcgtccacttcctcaaaaatcccaagaaatacacgcagctcgggggaaagatccccaagggcgcactcctcgtgggtcctcccgggacgggtaagacactccttgccaaagctgtcgcgggggaggccggggtgcctttcttctcactctcggggtctgactttgtggagatgttcgtcggcgtgggggcttcccgcgtccgcgacctctttaagaatgcgaaagaaaaagcgccctgtatcatcttcatcgacgagattgatgcagtgggacgcgcccgagggaagaacgccggcttcggaggtaatgacgaaagggagagcacgctcaaccagctcctcaccgagatggacggtttcggcaccaatagcgggatcattatgctcgcggccacgaaccgcgccgatgtcctcgacaaggctctgcttcgtgccgggcgctttgaccgtcagatcaatgtagacctccccgacctcacggatcgcagggagattttccttgtgcatatgcgtcccctgaagcttgactccggcgtggacgtcgatctccttgctcgccagacacccgggttctcgggcgccgacatcgccaatgtctgcaacgaggctgcccttatcgccgcacgcaaggagaaagatgccgtcacccgacaagacttcaccgatgccatcgaccgcatcgtggggggcttggagaaaaagaataagatcacgaccctcgaagagaaaaagtccatagccattcacgaagccggtcacgccaccgtctcttggatgcttgagcacgccaacccccttatcaaagtgaccatcgtgccgcggggtagggcactcggcgcggcgtggtacctgcccgaggagcgtcagatcatcactacggagcagctcaaagatgagatgtgtgccacccttggcggtcgtgccgcggaggaaaccgtcctcggccgcatctccaccggagctgccaatgaccttatgaaggtgacccgtatggctcaagccatggttacctattacgggatgagcgacaagttgcccaatatcaattacgaggactctccggagggtgactacacgttcaagaagccgtatagtgatgccacggccgaactcatagacaaggaggttcaggagatcatcgccgagcagtaccaaagagccaaggatctgcttgtcaagtatgccgacgggcaccggaaggtggcgcagttgctctacgagagggaggtcatcacgagcgatgatgtggagcaaatcttgggcaaacgaccttggaaatcccgctccgaagagctccttgaagccgaagaggctcgcaagaagcgggaaagcggtctccttgatcatcccttggcagcagagggggcagatacagccccatctcaagagtgatttttggtacgggcgaaaaaaatttctttgtccgtaccaaaattgcccctatgtacgtaccggaaaggaagcttggtacgtgtgaaatttttccccgtctccgtgacgggagccatatccgacccaaaagcgtatgaccactttttcagagaacgaactctaccgcctccgaggcgtctccgcggataaggaggatgtccacaacgccattaagcacatagataaggggcttttccccggtgctttctgcaaaatactccccgatgtgctcaccggtgacgaagcctactgtaccctgatgcacgccgacggcgcaggcacgaagagttcgctcgcgtatgcctattggcgcgagaccggggatctctccgtctggaagggcatcgctcaggatgccatcgttatgaacctcgacgacctcatctgcgtcggtgccacggacaatatcctcctctcctccacaatcggacgaaataagcgccttatcccctccgaagtcatctctgcggtcatcaacggcaccgaggagatcctcgcccgtcttcgtgagctgggcgtgggcatttggtccacgggcggtgagacggcagacgtgggcgaccttgtccgcacgatcatctgcgacagtacggtgacttgccggatgaggagggcggatgtcgtcgataacgcccacattcgtcccggcgacctcatcgtgggactctcctctttcggacaagcatcgtacgaagagacctacaacggaggtatgggctccaatgggcttacttcggcccggcacgatatatttagtaaaaaagtagcggagaaataccccgagagcttcgatggagaactgcctgatgaagtgacctatgtcggcaagcgcgaccttacggagtccgtccccggactcgaaggaatcgatttcggtcgccttgtcctctctcctacacgcacttacgcccccatcgtcgtccgtgtcctctccgagctgaggagtgccctgcacggtatggtacactgcacgggcggggcgcagacgaaggttctgcacttcgtcaaggggttgcacgtcacgaaagacaatctttttcccctcccgccgctcttccggcatctgcttgaagaggggaagacacccgccaaggagatgtataaggtcttcaatatgggacaccgtctcgagttctatctccccgacgcgaaagccgcggaggaaatcatagccctctccgagagcttcggggtggaagcccgtatcgtgggatgcgtcgaagccgcaccggaaaacaggctcaccatcaagagcgagctcggaacctttgaatactaagcgccgatgacggacgaactggatcttttgcgccagactgcaggtttccccgaccggctcaaagaggtcacgctcctcatgacagatccggacgtgatcgccgaccgcaagcgctacgaggagctctcacgggagtacaaagaaatctcggacgtggtcaatgcctccgagagggttcgtcttcttcgctccaacctcttcgagaatagggagatgctcgcttcggaaaaagacccggagatgctcgagatgcttggtgacgagatctccaagatcgaagaagagcttccccgtgccgaagaggccctcagactcctcctcgttccgaaagaccccttggatgccaaaaacgccattatggagatccgtgccggcaccggcggggacgaagcggcgctttttgcaggagacctctacaagatgtactccaagttttgcgaagagcagggttggaagacgacgaccacctcctactcggagggaaatctcggcggcttcaaggagatcgtttttcaagtcgaaggcaccgatgtctatggcacgctcaaatacgagagcggcgtccaccgcgtccagcgtgtccccgtcaccgagacgcagggacgcatccagacttcggccgccactgtcgcggtacttcccgaagtggatgaggaggaagtggagatca

SEQ ID NO: 3428 - DNA, 7522 bp, synthetic construct
  misc_feature 1..7522: note = Synthetic
  source 1..7522: mol_type = other DNA
ttttcttcgaggtcgcactcccggctcaacggagccagctctttctgggcgaatttatagctcatgtcctgaagcatcttgagttcgtcgctcagctcgaattgcatgtccgtttcatcctttcccttaaggagagaccgtggtgccttcgcggccgggtcaaatccggctgcggttcgcaaaacgctgggagactttttatccaggctttgttcatgaaagcacaatctggtacaatttgcaacaaattccgacagatgaaattttttccatgacttttttcttgacgccggggcagacggcccgtacaaccatctggcgggcttgaagcctggccggtcaggcgtaaatgtccatgacatctctaagaaaaaaaccgtggcaaaacacaggaagccaagacgaaatcgatggggccaggatcgaaccgttcgacaggctcacggccctgagcgaagtcgaaggggcctcataaatattattaatatttaaattacttcgagacgaagcttgataaaaaaattcggccggaagccgaagttttgcttgggaggtgcggccatgacgcgcgtgcttgaggatattcgggtgctggacttcgggcgtttcattgcctgcccttactgtggcatgttgctggccgatatgggcgccgaggtgatccgcgtggagcggccgggcggcgaggaggaccgcaccaccgggctgctcggacccaacggccagaacatgtcctatcccagctacgcccgcaacaaaaaagccattactctcaggctcctgcgctccgacaagggccgggaggtgctggccgacctggtgaggaaaaccgacgtggttattcacaatttcagcccggacgcggccgagatgatgggcctgacctacccgcgcctggccgccatccggccggacatcatcctcgcggccatctcctgcttcggcaacgaggggccttatgccagccgccagggctttgattttattgcacaagccatgtccggttccctggccctgggcggtttcccggacatgccgcccctccgcgccttcatgaaccccatggacttcggcaccgcgctctgcgccgccttcggcaccatgctggccttgaggcaccgggaccggaccggagagggccaggaggtggacctgtccctgcttcgcaccgctatctcctggaacgcccccatcatcgccgaggccgacgtgctgggccgggtcaggccgaaaatcggtaatcgcgccgcctacttaggcccgaccgacctttacgcctgtcaggacgggtacgtcttcatcgccaccatcatggacagcctctggcgccggctggcccgggccatcggccggccggacctcctggaaaatctaaaattttcaactgattatgaccgctacgaacaccgggacgagatcgaccccttgataaaaacctggtgcgccgcgcgcaccgtggcccaagtgctcgaagtcatggaagaagcccgtatcccctgcggcccgtacctgggcctggacgaggtctccagcgacccccacgtccaggctacaaatatgttggaatacacggacttagaagaacccggcctcgagcgcgtgcccgtctgcggcatcccggttcggctgtccaagacgcccggccgcgtccagacgcgggccccgcgcgtgggcgagcacaacctcacaatctaccgcgacctgctcgaatacccccaggacaaaatcgccgcgcttgaggccgagggcgtcatctgaactgggagccaagaggcaaacaatgatgaatgaatggtgacggaacgatcacccagcagcaacccacattcagcctgttcgcagcccgccatgagcccaccgcgaacccgctttgcacccgctctatacccacctccatccccccttccatccacattcggcgcctgctccacccacacgcaggacgcactccagcgcaagggtgtccaacgaccgactaccgcgcgatcgatctggggcaaaggcttatacacggaatgatggatagggcccgccggaaaaaggggtccggaacctttttcggaccgaagcaactcgggctcacctagcgccgagggggaaagaggttcccgactcttttttctcaggtcctcttgcgatccttggactcgaccgggcagggggcgttcttgtggaccaggcggttgagctttcggcaatagagtgccgaaaaagtctggcaggagccggcgccgtccaccgcctcctcttccgggaaccgggcctcggggcatttcaggtcgcagaagcgcatgatttctttcccgggccactctaccagatttttgccagggcggccagtcgcctgcgctggcgcgcaggagaacaggtgaacatgagagcaggtgagcaggtgagcgaagaaggaggggtgcgataggtagcaactgtcttgatagtcaagccggaagttgttgttctcctcgttccagggctctgccctggaacgggcatagggacgcgaggctctgcctcgcaacctcggaagagttgtgttgaggcagagcctcaaggcgttccggcgttccagggcagagccctggaacgagagaaagactcctgaccccttttttgttcaacccttgcagatttggaggttgaagaagcggcctttgttatccacaggtttcacctgcggctattcacattcgatccccccggaatcgctcagggaaactgccaattttagcttttcatgttcatttgttttaaattcacgtataatgaaatttcgacatcagcagaaaaaggcacaaaaaaagcgccccgttgagaggcgctcgagggtcgctccttggagctttgcccgcggacgaaagtccttaccatgaaaagtcaggtcaatcgccgcttaggtacactgtgatttataatacataatagaggctggttgtcaagttcaaaaagtaggttgggttgagcatagcgaaacccaacggttctcttccaaaaggagctcgccatgacagagatgaacgccagcgggtacattctgggtctggacatcggttccaactccgtcgggtgggcggtcttgacccgagacgaaaccacgggccagcctaacggcctggccaaggtcggggtccgcgtctttcaggacgacgtcaaccagggcttcgaaaccggcagggaagagcctccgggacaaaagcggcgcgaggcccgcggacagcgccgccgcctggaccgccgcaaacggcgcctctaccgcttggcccgcgtcctccaagaggccggccttctcccgccagacgagatgaactccccggaagatcgccaccaattcttcaccgacctggacgagaaaattgcccgcgagctcggcgaggcgcaaggcgggcccgtaacgctgcctaaagccgccatgctcccctacctgctccgcgcccaggccctggacaaaaagctgcccctccaccttctcggccgcgcgctttaccatctggcccatcgccggggcttcctcagcaaccgccgctccgcgcccaagaaggacgaagaccccaaggtcgtgcgccaggccatcacagatctcgaacaaaaaatcgaagaggctggcgcccgcactctcggcgaatttttttccaggctcgaccccgaggaagaacgcatccgcaggaattggacctcgcggcagatgtatttggacgagttcgaaaaaatctggtccagccaggagccgcattacccggacgctctcaccggcgagctgaaggccgccgtccagcgcgccatcttcttccagcatcccttaaaatccagcaagcatctcatcggcaaatgcgagctcgagccggaccggcctcgggctccgtggggtctcctcgcggcccagcggttccggctgatccagcgtgtgaacgacacccgcctcatcacgcccgagggcgaaatccgtgcgctgtcgcccgaggaacgaaccgccctcatcgacgccctcgaatcggtaaaaaaactgaccttcgcccaggccaaaaagggcatcggagtttcgccccgccatgtcttcaacttcgaggaaggcggagaaaaagatttccccggcaaccgcaccgccggcgaactcaagtccgtgttcggcgaccgctggccggcctttggccggcaagagcgcgaggccatggtcgaggacctgctgagcatggaaagcgaagaggccctggcccgccgaggcatgaacgcctggggactcagcccggagcaggcggcccggttcgccgccatccagttggagaaaggttactgccgccactcccgccaggccttgcaaaagctcttgccgtatctggaagagggcatgtcctacatgaccacggtcaagcgggtctacggagaaaaacccttgcccgaggcggaggccgcgctgccgctggtcgaagaggccatcccggaactcagaaattccgtggtctcccgggccttgaccgaaacccgcaaggtggtcaacaacctgatccgggtctatggccagccggccacggtgcgcatcgaactggcccgggacctcaaaaaaggccggcaggaaaggaaaaaaatcactaggcaaatccgggaaaaccaacagacgcgcctggcggccacggacgaaatcgtccggcaggtccaggtcgcaactcccagccggaccgacgtggagaagtatttgctggccgtggaatgcgactttacatgcccttacacgggccgaagcttttccatgctggacctgttcggccccgctccccaggtggacgtcgagcacatcatccccttcagccgctgcctggacaactcctttggcaacaagacgctctgctttatcgacgaaaaccggaacgtgaagcggaaccggacgcctttcgaggcttacggcggccagccggaccgctgggccgaaatcctgggccgcgtgcgccgcttccaaggccaggcccggcgcgcgaaactgtaccggtttcaaatggaagaagcggtcacggacgatttcgccagccgccagttgaacgacacccgctacgccgccaccttggccaagaagtacctcggacttctttacggcgaagaggccttgcgccacgtccaggtcggccgcggggagatcacctggctactccgcaattcctggcgcctcaaccggatactgggcggcgaatggaaaagccgcgacgatcatcgccagcatatcgtggacgccgtggtcgtggccctgaccgaccccgcggccgtccaggccctcagccgggccgccagccaggcggaaaaaggcggcggccgcaagccatacgccaacgtcccgccgccttgggaaggttttgagggccaggtccgggaggccgttctcggaacgctcgtttcccaccgggtctcccgcaaggtcagcggggccttgcacgaggagacctactatcgtcaggccgggggcgaacccgtctcctaccgcgcccggaaaaagttggaaaaacttacggctccggaagtcgaagccatcgtggacgaccgggtccgcgccctggtccaggaaaagctggccgccctgggggaaaccaacccccaaaaggcctttgccgacccgaacaacctgcccaacttgcccaaccgcggcggcaggcccatgcccatccgcaaggtgcgtctggccaaaacgatctccgccttcagcctgggccagggcatgagaaaacgtcacgtggtgagcgaatccaaccaccacctggaaatcctggaaaccctgaaccggcgcggccaaaaacaatgggaaggggccctcgtccccttgcatgaggccatccgccgcttccgcgccggcgaacccgtcatacgaaaggaccatggggaaggcaaacggttcctcttcaccctggcgccaggagaaatcgtcgagctggaccacgaaggcggccgcgccctgttccgggttcgttccgtctctgagggtgagatcgcctatgtgtctctttcggaggcgcgaaaaaaagaagaaatcaaaaaatctcatcagtggaaaagaggttctgcaaatgtcctcgggaaattgaattgccggaaggtggtggtcacgcctttgggggaagtgaggcgggcccatgactagccgcatcttggacatctcggacgagccggcccacctaagcgtgcgctacgaccaattggtcatccgccgcggcgaaaacgacacaaccaccatgcccctgtccgaagtggccgtggtcgtggtctcccacccccagacctcctacacccacgccgtcctggccggcctggcccggtccatggccggactcgtggtctgcgacgagaaacgcctgcccgcggccatgctccagccgctcctcggacactcgatccagaccgaacggttggccttgcaagtggcgctttcggagccccggcgaaaacggttgtggcagcagatcgcccaagccaaggtcctggcccagggccgcctgctaaaagacctgcggcaggacgaccggggacttctggccctggccaagcgggtggcctcgggcgacgcgggaaacgtcgaggcccaggcctcccgtcgctactggccggctctcttcgccgaccccgccttccgccgcgagcgcgcggccgaggaccaaaaccgcctgctcaattacggctacgccgtgctccgggccatggccgcccgggccgtctgcgccgccgggctgcacccctccctgggcctgcaccaccacaaccgctacgaccccttctgcctggccgacgacctcatggaacccttccggcccaaagtggaccgggccgtggtcggcatcgtgaacgaacgcggccgcgaagtccccctggataaagagaccaaggccgccttgcttgccccgcttaccgagcgcctcgaactggccggggaggagcgcaccctcatggacgtgctccaccgcgccgccgcctccctggcccaggccatggccggccgcaatcagaaacttaacctgccggagctatgaaaaagccatgggcaaaccccggcccctgtcggagtaccgcggcatgtggctcttttccctcttcgacctgccggtgaccgaaccggaaaaacgcgcggactacgcccgcttccgcgcggctttgttaaaactcgggttcatcatgctccagtactcggtctatgcccggtactgcgcctccgaggaatccaccctgatcctgcgcaagaaaatccgcgcggccctgccgcccgagggccaggtccggctcttgtccgtgaccgaccatcagtttggaaagatggaggtctttcagggaaaaaagcggcgggacggggagaagccgcccgagcagcttctgcttttttaggcgggtggggaaaaatatcccccgtaaaccgtggggttacgggggatgcagtgtaccaaagcggggattcctgtcaagtcacagcatttccttgccctcccatccttatatatatagtgtaccaaagcggggattcctgtcaagtcacagcagcagctcgggcagggtgatctttctt

SEQ ID NO: 3429 - DNA, 13570 bp, synthetic construct
  misc_feature 1..13570: note = Synthetic
  source 1..13570: mol_type = other DNA
gatggagcgaggcggcgagggcctcggtttcccggagatgacgcttggggatgtggggggcgagccgggccgcggcgtcatcgagcttcttgcgaaaccagactcccccgcggatcgtctccaccgcgccgacgacatggaggaccgagtcgacgcagcggttggcctcgacggcaagcagttccccgtgggccttgccgatttcctccgggctcccatggagcgtcacgacccgcaagccctcggcccattcgagcttcccgtgcggcacggacttgatctcgtggcggggcgagacgaggtccgggcccggcagcgcgatttcgagggcccggcggacgccacgacagagggtccgctcgatctcgtcgcgcggcacgtcgcttgtctcatagccggggaagtcgtcgacggcgaggcactcgcccggctctccgacggtgagatcgagttccaccttctcggcattggcgctgatgcgccggccggcgtcgtcgaagtcgagccagccgtcgccacgctcccagcgggcatcttgtgaatcgtgcttcacaccgaggaggccgaccaagagagcggtgagcgatgccggggagggctggaggaggagtggcgtggccaacgacacctgcgtcgccgatgagacgagccgggcgccgatgccggcgggatcgagatggtcggcaggatcggtctcgccgcggccgatgtggacgatcttgtgtttggggagggccagcgccgtggcgtcggcgcggtgcctgagcaccaaggcgtagtcgtcgtgggtgacttcgaggtcgtaggcgtgggcatcgaagcgggcgagcttgatcgccacctgcatcggtttgccgctgccgccgatcttcaccgtcccgtcgacttgaaacgtctcccgggcgccggtgaggcattcccacagcggcccgagatcggcggccagtgccccggcgggattccgcgccggatcgatcgccggcggctgttcggcacggacggcgggaaggaatccggctccggccagaccagtggccatcgagagggccaagaggcatgcgaagcgggcagggcggggggggatcatgaaaaacctcctcgggggcacttcgggggcggggaaacccctgacgtcgcagtcgctcagacctcaatctcccaccctcagtcgccgcgaacaagccggctttacggccgctgcggcccccggcagaggggccctcgagccgctgcagtctgggctcggggggagggatgccctgacgccatgatcggccaaaataccgttttattgacgtttactctgattaggataaattatcaaacacgcaataaagggccatagaatgatccacttttcacgtcccacattggctcgggaactggtggtcgcgctccgcggtgaggccaccttcagcgacgcccacaacggcttgtttctggcggcgccccgacggacggggaagtcgacgttcctcctcaatgatttggccccggcgctcagggccaccggcgtcgtggtggcctacgtcgacctgtgggccgacctgcggcgggatccaggcacgctcatcgcggatgcgattgcccgatcgctcgcgccgcatgcgagtttcgtgagccgtgtcgcgaagaaagcgggcgtggagagcgtgaccgtcccaggcatgctgaagatcgacctgagcaagattggcaagcacgacggcgtcacgttgcccgatgccctgcgggccttgcacgagaccgccaaggcaccggtcgcgctcatcgtggacgaggcacagcacgcgctcacgagcgacgccggggaagcaacgatggcagccttgaagtcggcccgagatcagctcaatcagccaggcagcgtgaacctcatgctcgtgatgtctggttccgaccgcgacaagctgctccgcctggtcaacaccaacgccgcgccgttctacggctcccagattgcccgcatgccgccactcggagaggatttcatcgagcacgtggctcggctcatctccgcgcagcggcccgaccttacgccggtagactcgcctctcttgctccaagcctttgcgggctttggccatcggcctcagttcttcatggaatcgctcggtcaggcgatcagccccttggcaggcctcgagggcgtgcgtttcgagcgggcggtgatggaggcggctcacgagcgccagcgggctgacgaagcccagatggaatccgactacctcgcgctgcgacccgtggaacaggccgtgctctggcgactcctcgagcagggcccgaggtttcgtccgtacgatggcgaggcgttgcagttttaccggaagcgggcttccccgcaggtcaccgcgcagcaggcacaggccgcgctcgactcgctccgcaagcgcactcctgcgatcgtctggaaatcggctcgcggcgagtacgccgtcgacgatgcggccatgcaccgatggtttgagaagcgtgtgaacgaagggcaatggccgccagtcgattcgctcagccacctggcgtccgagagagaccagatggggtagcagcgaatccctggaagcggctcgttcacggccggttcgttgcagtccggcatccccgccatcacaatcgactcgaccgccattttcagattctgcgtgtcgtgaagaagctggctttggccctgcgctcaggctcccggaatcattcgttcatgctccgagccccttccatcccgtcacgggcctttgccgctgtcgctctgctcatgacgttggccgggtgcggacgatcgagcccgacggttgtcgccccgccgccgccggaggtcgtcgtcgcccggccggtcgttgccgcggtgagcgacacgattgagttcaccgggaatgccacggccgtggagacggtcgatctcaagccgcgcgtcgggggcttcgtgacggccgtccacttcgccgacgggcaggatgtgggcgtcggcgatccgctcttcgagatcgacgaccgctcctacttgatcgcccgcgatcaggccgaggcggagatcgaacgcgaacaggcggagcttgcggaactcgagagcgagctcgtccgcaatcaggccctccttccgcgcggcgcgatcacgcaggagcaggtggggatcatcaccgccaagcgggacatggccgccgcgacgctgaaaaaagaccgggcaatgctcgcgcaggcggagctcgacttggagttctgccgggtgacggcgccgatcgccggccggatcggggcccggacggtgaatgtcggcgacctcgtcgggggaggcccatcgccgacgaccctggcgacgatcgtcagcgtcgatccggtctacgtgacctttttcggcgacgagcgatcgctcctggtggcccgcgaacgggcgatcaaggaaccgcgcgacgaaccgcgcgacgaacggcgcgagggtgcggcagccttgcctgtggaccaggatccgtcgtggcgcaacatccgcgatctcgccatcccggtcgacgtggccctggtcaccgacgagggctttccacgccgcgggatgcttgcgtttgtcgacatcgccgtccgcgcttccaccggcacgatccgttgccgggcgatcctcgacaatcccgatcggctcatcgccccggggatgttctgccgggtccgcctccccttcggcgatccggccgaggcgctcctcgtccccgatcgggccatcggcatcgatcaggggcgccggaccgtcgccgtggtcggtgccgacgaccgggtgacgctccgcgagatcacccccgggaagctcgatggccagctgcgcgtgatcaccaaggggctctccgcagacgaccgggtcgtcgtcagcggcctgcagcgcgtccgggacggggccgtcgtccggccggtcgaagcccagcaggccccgcccgcgacggaatgacccgccccccatgttttctcgatttttcatcgaccgccccgtgttcgccaccgtcctctcggtggtcatcctcctcgtcggcggcgtggcgctcgttgggatgcccgtcgggcaataccccgacgtcactccccccacgatcgccgtcaccgcctcgtatcccggcgcctccgcggaggtcgtcgccgagacggtgaccacgccgatcgagcaggagatcaatggcgtcgaggggatgctctatctctcgtcgaagagcaccggcgacggccaggcatcgatcgacgtcaccttcaagctcggcaccgacatcgacaaggcccaggtgctgacgcagaaccgggtggcggtggcgctggcgaagctccccgaggaggcccgccgccaaggggtgacgacgcggaagaagtcgccgagcattctcctctgcatcaatctcttttctccgggggagcgcctcgatcagctcttcatctcgaactacgcgctcctccagctgaaggatgcgctctcccggatcgaaggggtgggggacgtgcagttcctcggggcccgcgactacgccctccgggtgtggctcgaccccgccaagctcgccagccgcgggctttcggccaccgacgtcgtccgcgcgctccgcgagcaaaacgtccaggtcgccgccgggcggatcggccagtcgccagccacccccggcctcgatttccaggtcccggtgaccgcagccgggaggctccccgatccagcggccttcgagaacgtgatcgtgaagacctccggcccgctccctcccggagccccggccgtcgccgccggtcgcatcggccccgggcacgatctggccaccacggggcaagcgatcgtccgcctcggcgacgtcggccgagcggagctgggggcgcggagttacgacgtcggcagccggctcgacggcgaggaaggggtcacgatcgcgctgttccaacaaccaggatccaatgccctggccaccgccgaacgcgtccgccgggagatcgaaacgctcgaaaagggattccccgcggggctcgaagccgccatccactacgacacgacggtgttcgtcgaggagagcatccgcgaggtctggaagaccctcttcgaggcggtggtgctcgtgttcatcgtcgtgctcgtctttctccaggattggcgggcgacgatcatcccgatggtcgcggtgccggtgtcgctggtggggacgttcgccgcgatgcggctgttcggcttctccctcaacaatctctcgctgttcggcctcgtgctcgccatcgggatcgtcgtcgatgacgcgatcgtcgtcgtcgagaacgtcgaacgctggctgtcgggggggctgcctgcgcgcgaagcggcccggcgcgcgatgggggaggtggcggggccggtgatcgcgatcgcgctggtgctctgttcggtgttcgtgccgacggccttcatcaccggcatcagcggggagttttaccggcagtttgccctcacgatcgcggcgagcacggtgatctcggccttcaattccctcaccctctcgccggccctctgcgtgctcctttttcagtcgcatctccctgggagttccgccacgccctcggccgacccggagcatggcagcccagccgcgggcggcgccgcagcgacagccgcacggcgcgacgcgctccctccggcgggcatcgcgctgttggccgggctcctggccgtgtggtttctcgaggcccgggggctcgtggcggcggggctggcgacggcgccggtgccgccgtgggctgccgaatggagcgtgcggctcgggttgttcgccgccggagcgctgttgggatggtggggggcgggagcggtcaaccggatcctcgccgcgttcttccgcctcttcaatctgtttttcgacctcaccaccggcgtctacggcgcggtggtggggaggctcctgcggatggggatcgtcgtcgtcgccctctatctcggcctcatggccctcacctactacggcttcacgaccgtcccggtggggttcatcccgcaacaggacaagggctatctcctcgtcacggcgctgctccctccgggggccagcgccgagcggacggcggaggtcatggccgatctcgaggggcgggtgaagggggttccgggcgtggcccacaggatctccgtcagcggctactcgctcctcaccaatgtcagccagccgaacgccggcgggatgttcgtcctcctcgagccgtttgcgaggcgggcggtcgatccgcagcgctcggcgacaaggatcctccgcgccctgcggcaaagcttcgcggaggtccgcgaggcgcaggtcgtcgccttcggggccccgccgatcgacggcctcggcaatgccggcggcttcaagctccaggtcctcgaccgcgccgcggccggcccgcagcggctggaggcagccgccgcggcgctgatcgacgcggccgccgcgcagccggggctgacggggctgtttgccggcttccgcgccgacgagccgaagttcttcgtcgacatcgatcgggagaaggtcaaggcgcagggggtcgacctcgtcgaggtcaacgcggcgctccaggtgtttctcggcagcgcctacgtcaacgactggaccgctttcggccgcaactggccggtgctcgtccaggccgaccgcgatttccgcatgcggcgcgaggacatcggccggctcgaggtccgaaactccgccggtgagatggtgccgctctcgacgctcgtcaccgtcagcgacacgagtggcccggcggtcgtcaaccacttcaatctcttcccctcggccgacatcaccggttcgacgttgccggggacgagctccggcgacgcgatcgcgatcatggaagcgctcgccgcgccgccgccggaggggcaggggaaccttccgccggggatggagtttgcctggacggagctgtcgctccagcagatcctcgccggcaacaccgccggcatcgtcttcgccctggggacggtgttcgtgttcctcgtcctcgcggcgcagtacgagagctggtcgcttccgctggcgatcatcctcatcgtgccgatgtgtctcctggcggcgatcgcgggggtgtggatcgccggactcgacaactcgatcttcacgcagatcgggctggtggtcctcgtgggattggcggcgaagaacgcgatcctgatcgtcgagttcgccaagcagcagcaggacgccggcctgccgcttgccgaggcggtgctgacggcggcccgactgcggctgcggccgatcctgatgacgtcgctggccttcatcctcggtgtcgtcccgctcgtcctcggccgcggcgccggggccgagatgcgcgtggcgctgggaacggcggtgttctccgggatgctcggggtgaccgccttcgggatcttcttcacgccggtcttttattcgctgatcatgggctgggggaggggacggaatcttgaccgtcccggcgcccagcccgtaccctcgacacgcccctgatccccgcttcttgctcgccccgtccgcccgtttccaccgtccggagccccgactcatgccccgttcttttcgccctcttcccctcgcctcgctcctcgcgctcgccgtcggtggcacgctcgtcaccggcggtgtccggggggaagactggccgacgttccgtggcgctgcccgcaccgccgtcgctcccgacacgaacctcctcgaatcctggcccgagggggggccgaagctcctctggaagtcggtcggcgccggccgcggctacgccaccccggcgatcgcaggctcgcggctctacaccctcggcgacggcctctccaccgccggggacgacaaggatgaatacctcacctgctacgaccgcgaaacggggaagcagctgtggagggccaagaccggccaggcctggaacgaggggccggagtcgtggcagagctcgcggagcacgccgacggttgacggcgatctcgtctacgtgatcaccccgcaaggggtgctcatcggctgccagacctccgacggcgccgagaagctccgcatcgatctcaaggccaccttcggcggcaagaagggggatggctggggctacagcgagtcgccgctggtcgatggcgaccgtctcatcgtcaccccgggcggcgacgaggcgatgatggtcgcgctcgacaagaagaccggcaaggcgatctggaagtgcccgatgaaggattgccgcggtgccggccattcctcgatcgtgatctcgaaggtgggcagtcggaaggtctacgtgcagaccaccgccagcggcgccgtcggcgtcgatgcggccagcggcaagctcctctggagcttcccgatcgaccagaccaccgccgtcattcccaccccgatcgtccgcgacgacctcgtcttcttctcggccggctaccgccgcggtggcgcgctgctgaagcaggtggccacggctgacggcgtgaaggcggaggagatctacggtctcaagcaggatctcgccaacaagcacggcggcatcgtcctcgtcggcgatcacctctacggcgattccgacgaccaggggatcccgttttgtgccgagctgatgaccggcaagatcgtctggaaggaacgggccaccggtaaggggtcgatcgccgtggcggccggcgacggccacgtctacctccgctttcaggacgggatcttggcgctggtgaaggccgatccggcgggcttcaaggaagtgagcacgttcaagatccccgacagcgacgcccgcccgagctgggcccatccggtgatcctcgacgggaagctctacctccgcgagcaggacgcgatcctctgctacgacatcaaggcggagtgatcggaagaatcatcgcggcaacgcacgacccccggggcgccagcgccccgggggttttttgtgcgccgacggggcggcaatcgcgagctgcgatccttgaggactcctccgccgtccgcgctgcggcgcgtttcaatcgggaatccaggccaagggattgatccttggagcgatgtgcttgaccgctgaagctcaaagatccagatcaggcaccggcatccccagcccaggtcccgaggatcccgagtcgttgcccaaggaagctcgccgctgttcgtttcgcttgtctggcggcgtctgaagtagcggcctcggcgtgccgaggtaggaggcacccccccttgcgaaagggctctcccgccatcaggctatggtgctggcccagccagcgcaaaaaaatagcccccggctttgaggcgggggctaatgtgggccggcatgccgggagccacgcgcgaaagaaaccttactgtggatagaggtaaccgtcgctcaggtacacgccgaaactatatcggccgatctgtggctgtgcaaggagttgaacgtgatccgagagagtaattctccagcccgctcagacgccgtcgtgctcggcttggatattggcgcaaagtccatcggttgggcgctgatccaggggccggaatctggaaagccgacgatcgtcggccttggcgttcgaatcttcgaggccggcgtcgatggcgacatcgaaagcggtcaagacagctcccgagccgcggcaagacgaaacgctcggcagatgcgtcggcagacgttccggcgcgttcaacgcaaacgaaaactgttctcgcttctccagtcagctggattcctgccgggcacctccgacacgctcgccgtggcccgcgacaaggccatcaaagagatcgacgagcgattgctcgccacgctcggcaagacctatggctccgcgggatcgactgcgaggaagttgccctatgtgctccgtgctgaagccttgcagcgagcgctcacggccgaggaacttggccgagcgatctaccacttcggcgaacggcggggattcaaagcgaatcgccgaaccgatcgccaaagcgagaccaccggcgttgtctacgaagggatcgcggaggttcagcgacagaaaggcgacaagaccctcgggcaattcttcgccgacctcgacccgacccaggatcgcattcgcggctgctacctcgggcgggcggactacgaggacgagttcaaccgaatcttcgatgctcagcagccgcatcacgccgcactcacgccaaagctccggcgacggctacgacgctgtcttttctggcagcgccctttgaaaagccaaaagtcgctcattggacggtgcagtttgttgaccaaccgccgtcgctgtccgatggcgcacccggtcgcccaggagttcaggctcttgcaggccgtcaatcatctctcgcttttcaacgcagacggggagatgcggcttctcacgaacgtcgagcggctgaaattgcttgcggcgctccgcacggatggcgacatcacgtttacacaggtccgaaagctgcttggactaaagaagaaggactctcgcttcaatctggaagaaggtggcgagaagaagctccccggcaatcgaaccggcagggcgatgaccgatgcgatcggtgccgagtgggcgaatctctctcctgatcagcaagcactcctcgtgggcatcgtccgcggaagccctgatgcggcaagcctgcgcggacaagtcgggcagtcatttcccaccctcatgcctctctgcgatgccctggacaaggtggcgttggaagacaagccggcggcccattgcaagcgagtgttggtggatcttgtgaaccgtatgaaggacggcataccgtacgccacggcaagggtcgactttgaagccacgcacaacctcggcatgccgaccgaaccggtggatcagctgccgccggtcaggacagcgctgcccgccatcaccaaccccgccgtcattagagccatgacggagctccggaaagtcgtaaacgagatcgtccgcgtttatggaaaaccggacatggtgagaattgagctcgctcgcgatctcaagaagccgcgccggattcggcagttgctgtcggagagaatgcgtgccagggaaggggagcgcagcgtcgcttcccaaaacctgaagtccgtggggataaccaacccctcccgcgcggatgttgaaaagattctgttagccgaggagtgtggctgggtatgcccgtacacgggcaagtcgttcggcatggcggatctggtcggatcgcatgcgaaggtcgacgtcgagcacatctttccgcgtcgctatctggacgattcgtttgccaacaaaacgctgtgcttcgctgcggagaacagggccgtaaagaaagaccgattgccgttcgaagcgtacagtggcgacgagacgcggtatcgggagattctcgatcgagtccggacttttcaaagcggcgcgcgagacgaaaagcttcgtcgattcatggccgacggcgtcgaggagggcttcgcaagccgccagctgatcgacacggccttcgcaagccgcgaagctgcaaagttcgtcggcctgatgtacggagggattgtcgacattcggagcgacaagcgcgtgcggacatcgaccggaaagctcagcgccttgctgcggggggcgtggaagctgaactcgattcttggaaccgatagcagccccaagggccgcgacgtcgaccatcgccaccatgctgtggacgccatcgtgatcgccctgagctcggactcgatcatcaagagcgtgtcggatgcagcgggaagatacgctgcgagatcatcgggaagatggcacgtggacgtgccagatcaggagggccttctcgagcaggctgcctgtgaagtgaagaaggttgttgtctcacacagagtcgaccgcaagctcgctgggcgacttcacgaggattcgatctacagcccgccccgcgccgatggcggtggaggatcctttcatgtcatcagaaagccactccagaggctgacacctgccgacataacaggggacaaaatcgttgatcctcgtgtgcgacgactcgtgcaagagcagtacgcaaagctttgccatgcgctcggtaagacgaagccatcggatctcttcacagacgactctcggcttccgcgactcccaaaccgtaacggcccgccggtgcctgttcgcaaagtgcgattgcgggtcagggacaaggcgattcgtattggtgacgcagagcatcgccagcgtcatatcatgcgagatgcagatgggctccatcacaccgtgatcatcgcgacacgcaagcgtgatcgcgaaacatgggaggaggcccccacaagccgacttgaggtgcaggatcgcaaacgtagaggcgagccagtcgttcgtacggagtgggggcccgactgtggatatgtgttgcatctgtgcaaaggcgactcgatcgagctcgacaccccagatggtgaacgcgcggtctatgtggttcggggggtcgccggtacggacatcagcgttgtgcaggcctgggacgccagtagggagaaccgaactgccgagacccgcattcggtctccaaacaagttgaaggagcgacatccaaggcctgtcgtcgtcacgcctgccgggcgtgtattttcgcgaggtgggtgatgcgcgttgtcgaagtgtcgcagcagagcgcgatggttcgcatcaaagatggatgcctttcgatctgtcttgatggcagcctgcttggaagtgtgccggtagcggaagtggggtgcgtccttttgagctcgcctcatgcgacgtgttccgttgccgcgcttgccgctctttcagcacacggaacgcctgtgatcgtttgcgacaaggcgatgcggcctacgggtatgatgctcccgtttcgtggccaacatgaggtggcaacgcgtatggcggctcaggctacggcctccctgcctctgcggcgtcggctgtggaagtcgatagtgaaggcaaagatcgcggggcaggccgcaattcttgccgaagcaactggctccgatcatcatctcgggatgatgatgaagcgggtcaaggccggcgatccggaaaacgtcgaaggccaagccgctcgccgttattggtctcgactgtttggtgcttcgtttcgaaggagacgaggcgaagggattgagaacaagatgttggattacggctacgcgatactccgtgccgcagtggctcggagtctgagtgtggcgggtctgcacccagggctcggcattcatcaccaccatcgttcgaacgcattcgcactcgccgatgacctcatcgaaccgtttcgtcctgccgtcgatcgggtggtggtggcctgccgaagcctttacgagactcacgaagaattgtcgccgccgttgaaaaggaagttggcgacatgtcttgacgaggctatctcgatggctggcgagcaacgtgctgttcaggatgccgttggaagatccgcgagttctttggcaggagtgtttcttggggaacggcaagaactttctcttccatggattggataattcgacacacggaggtgcagtaccaagccggtatcaggccatgtggctgttcgtcatgtttgatgtacctgtcgccacgaaagcggaccgcaggcgttatgcccagttcaggaaacatctcatcagcgaaggcttcttgggactccagtactcggtttatgcgagatactttgagtcggaggaggctacagccgcctgc

SEQ ID NO: 3430 - DNA, 14842 bp, synthetic construct
  source 1..14842: mol_type = other DNA
  misc_feature 1..14842: note = Synthetic
aagcctgtttattttgtgtgaaaagcgcctttcagcgccagcttattttgtaaaaggtttgttatagaggtacagcagcactaaaatacctgccaaacccagcagctcgatgccaaggccggaaatgccctttgacaattctccagaaaagccgtagctatggccgaaaataacgagcccaatgcataccagcagcgccacaacgcctgcggcaacggtcagctttttctttgtgtattcattcattgcttgttcgcctccttaacccttcaggccgcccaaggtcatgccttgtgtcagtttcttttgtacgcacatgtacaaaatcaacgtgggaagcattaccatcaccatgccggcgtacatctggccgtactctgctttcgcgttctgtgccttcatcaggttcagcaaaccaaccggcagcgtgcgtgcgccgttggggtcggtcagcatggtcatggaaatgatgtactcgttccagtaagccaagaactcgaacaaaataaccgtgataatgctgggctttgccatcggcaggatgatgcgaaccatcgtggtgaagtagcctgcgccgtccacataagctgcttcctcataatccttcggcaaagtggccaaatagccgctgagtaagtaaatggtaaacggaagcgtggtggaggccaacacaacagcaaccacaaacggattgttcaagaaaaatgtggtgccgaacatgctcttgacaattttgtcaccggaaacaaacatcaagaagatgggaactacaatgtagctgacgttgatgaacaaaccggccatgaagcaggtattcaacaccttgctgccccagaagcgatagcggctgagcacataagaggccggcagcgcaaccaaaagcaggatcaacagcgacaatgcagtaatcacaacggaatagaagaagtaatcgcccatgcgtgcctttgtccacgcatcgacaaagttttgcaggtaaacgccctgcggcagtgcaaacgggttgccataaaattccgtgttctgcttaatggatgccataaacacccaagccacaggaactacaatggaaatcagtagtaaaatcagtaaaatatagatgataaccttcggcacaatacttgttttcgtgcctgcgattttttcattcattctcacatacaccgtccttccttagaattccagcggctcgcgcttggtcacacggttcacaatggccgccagtgcaaacgagaagctgaacaccacaacgccaacagccatgccgtagccgtaagtggagttggtatacgcttgcttatacatgtagctgaggaatacctcggacgcgccgtccgggccgccgcctgtcattgcttttacaaacaggaagctcatgttgatgttagaaataataaagaaggtcagcgtggtacggatattcgtccagattaacggcaaggtgatctggaagaattgggtcatacgggaagcgccttccaagttagcgctctcatacaagctttcgggaatcgcggacatagaagccatgtacataaccatgtagtagccaattgcctgccaaaccattgcgccaaccaagctgtaaataacaatcttttggtcgcccagccatgcaatggggctttcggctccaatgccgaaaatgctgagcaggttgttcagaaggccgcggttcacgtcgtaaatagcgctgaaaattgcgctgataacaacgacggaaagaatgttcggaatatagaaaataatgcggaaaatgttctgtcccttcagcttttcgcgtgttaagataaacgcaaagagcagtgcaaacacaatggtaatcaccgttaccaccacaatcagcaagatgctgttgcggcatgcgcggtagaagttttcgtctttgaacagcgttacaaagttatcaaacgccacaaaagtttggttaggggagtatccgccccatttaaacagggacatgcggaacacgttgaacgtaggaaccacaagaaaaataaatgccaaaatggttgccggagccacgcaggctacgataaaccggctacgcgccttattcttttgcattgtaccatctccatttcgatttaaaaagcggtgagcaaaaagcatcgcctttcactcaccgccttggtttaccttatctcctacgcggcagacaccagacggtgccatccttgtttgaatcggttcgcctttgtcgtgatggatgctttctcacagattatctttcaagcatcctgatgaaacttttttacattgcctcacgcaatgctgcacaagaagcctgcactgctgctttccagtcgtcaacagtcttggtgccgtttacaacactatccatggtgaagcaaacgtcctctttgatgttcacgccttccacaggagctgtggttgcgaaggtaccgatagcagcttttgcaccgttgtcgtatacgctgtaataaactttgttgtcgtcgctgagcttatcggtcatgccggtgatgggctgaactgcaccagaagctgcaaagatttcagctgcctcatcgctgtacagataggtcaggaacacttttgccagctctttgttctctgcgccggccggaatccagctctgctcaaagaaggtgtagctgtaacggtcgccgccctcttcaattgcgggcagagccatgaagccccactcgaagccttctgcacgaggagcgtcagccatctcaccgattacccagttgccgttcggcatgaagagggcctcgttgtcgaggatcatctgctggttcttggtgaagttgtcgttgtttgcatagccagtggtagcgtcgttggtgttctcagccagcttgcccaggatttcgaacattttgtccatctcggggctgctccaaacagtctcgtcatactgcaaagccttgttgaagaagtcctggccgccaatctctgcgatcaaagcataggtgaaagcgtcgaggtagccagctaccggataggtgaacagggggatatcagtctggtcagccagagcaaagaactcgtcccaagtggtgggcagctccagatcgccgccgccttcagtgaagtttgccttgttgtagaacaagccgcaggggccgtagaacatcggcatcatgaatacgcggtcatcgccataggggttggtggtcaggttgccggtgaagccggggatgatcttctcaccaacggtgatatcctcgcccagaacgttcatgctcagaacgtcggttacttcctcgatggcattctctttcagcatggtctccggcaaagccttctcacggcctgctgccaggtgaactacatcgtagaagttgcctgccttcatctggggatcgatcacgtcctccaggtttttgtcggtggtcagctcaacggtagcgcccgtttttgcctcaaagccatcggcaatttgctgccacatctctgcgccgtaagcggtctcgatagccgctaccttcagcgtctggccggcatagtcaccggtgccggttgctgccgcagaagtggaagtagaagctgccgtgctctcggaagccgctgtggaagctgcggtggaagacgatgttgccccgccgcaagctgtcagcatcgacaagctcatgccgaaggccagtacagtactgattgcctttttcataaaacaaacctcctataattgtgaaatgaaataacccgtgcagacatcccggcttccgaattgctccacacgtttgccggttgtctgccctatgcttccagtatagcttttttgaaatttaatgcaagagatttgttgcttttaagtttataaatattgttttgatggtcattttcttcaaaaaagagccgaatttgcgtccttttatagctaaatgcacaaaacaatgtgtttttttctggttattttcactttatatccttttttcatccaaaattatatcaaacatctaagatattatgtgtacattatgcaagttattttacaaaaattactttatctatttgtctttcgttaattaaccggatttataatttaataaatattgctcacaatgtttttgctgtatggctatatttttccactaaagcaatatttgacaaattttatgactgtttgataactgttaacctccctaaatgagattcttttttggttctatttgctaaaaaaccaagcgtttcttcgtacaagctggaaaaaacaggccttataagcgaaaaaagacgaaacattgctccatttaagcttttttgtccttgtattccaccttttttacacttataatgaaatcaacatccaaaatataaagatgttgttaattcctcagcagaacataaaaataacacagattttttgcacgacaagctcaaaaaaacttttgccaaagcaaaaatatatgacagcgtgcacaagcgacgaggaggttcaccatgagcaacagcagatatgacatcggcgataaaccctccggaagaaaccgcaccggaaacaatctcagcggcgcacggcttttatatgtcacggaagcccacttcagcacagattggcacagcactctgcacagtcacccatgcaccgagctgttttactgtatgcgcggcattggtgagtttcgcatgaaagaccaagttatccctgtcggaagcgacgacatggtaattgtgaacccgaatatcgagcacaccgagtccagtattaccagcaatccgctggaatacatcgttttaggcattgacgggctggatttcagctttggaacccaaaataaagaccatgccatcttaaactatcgcgaagaccgcaacgaaattatctttttcctgcgcacgcttttaaaggaagcggaagatcatccccgcggatgggaagatgtgtgtcagcatcttttagaggtgctgctcacactgattttgcgtcacacccattttaccatgcagctggagcccacacggcgtaccaataaggaatgcgccgctgcccggcgctatattgatgagcatttcgctgaagccattaccttaaatttgctggcggatattgcgcacgtcaataagtattatctggttcatgcgtttaacaaagaatacggcatctcccccattaactacttaattgaacgccgcattcgagaaagcaagtaccttttggaaaacaccgactactccctgtcccaaatttctcatcttttgggcttttcttcgccaagctatttttcccaaagctttcgccggctgaccgcgcaaagccccatggaataccgtaagcaatgccgcctcgcgcgtgaacacgtgcaagacgacggaaaataacacacggcagcctttttcgccgcctatgcaacacaaagaggaggttcttactcttgggctatgaaaccattcagctgcaaaagccgttcgtggtggatgaaattatttccatccactattttgagtataccagtacttattcttttgaaggggaaagccacaacttttgggaatttttatatgtagataaaggagaggtatccgtttgtgccggagaatgccagcacattctgcaaaaaggacagattatttttcacaagccgggcgaatttcacagcgtttgctcttgcggcggcaccgcacccaatctggttgtggtaggctttgtgtgccgcagtgaacacatgcgcttttttgaagagcgcatcgaatcgctgggcgacagcggacgcgcgcttttggcttccattgtcaccgaagcatctgccgccttctcttctaatttgggcgaccctcaaatgcttcggcttgagcgccgcgaaaatgcttccttcggcgcagagcagctgattgcctgtgcgctggagcagctgcttgtgcgtctggtgcgccgtgccggctcgctgcaaaccgagcgctctggaacgatgatgcgtgagcataaccagcaggattttatcgcctccatgacacgttatttgcaggataacctttcccgcaagctgacgcttgccgacatctgccgcgataatctggtgggccgcagctatttgcagaaaattttccgcgagcgcaccggcggcggtgcgatggagtatttcgggcagctgaaaatcgaagcggcaaaagaaaaaatccgcgaaggatgctataattttaccgaaattgcctctatgctgggttattcctcgattcattatttttcccgccacttcaaaaaaactaccggcatgacaccgtcagagtatgcatcgtcggtaaaaggtttgtctggtaaagcgccggaaagtgaacatctttgaacatcttgcggacgattagacacctaggggataattgtgcaaatattatacgaaaaaatctattttataatcgcgcagaaactcttaaaataaacaatgaaagagcacgaacgcaaatcgcgttcgtgacgttatacacgaaacaacgcaaaggagcatgatgcactatgtctattttagtaagcggcggcgccggctacatcggcagccacacctgcattgagttgatgaaagccggatatgagattctcgtagcggataacctttacaactcctgtgaagaagcgctgcaccgtgtggagcaaatcgccggaaagcctgttccctttatcaacatcgacctttgcgaccagcctgcggttgacaagctgtttgctgaccatcctgaaattgacgcggtcatccactttgccgcttacaaggccgtgggcgaaagcgtgcagaagccgctggaatattacagcaacaacctcatcagcgcattgaacgtgctgaacgccatgaaaaaatacggcgtgaagaactttgtgttctcctcctccgctacggtgtacggcgatcccgccagcgtgcccatccgtgaggacttccctgttggcgctaccacaaacccgtacggcgctaccaaggtcatgaacgaaaatatgctcaaggatatctgcaaggcagaccccaccatgaacgttgccctgctgcgttacttcaacccgattggcgcacatgagagcggcctgattggcgaggatcccaacggcattcccaacaacctcgtgccgtacattgcaaaagtggctgtcggcaagctgaaagaggtacatgtgttcggcaacgactaccccaccccggacggcaccggtgtgcgcgactatatccatgttgttgatttggctcgcggccacgttgcagccctgaaaaagctgtccaccaactgcggcctgttcatctgcaacctgggtaccggccacggttacagtgttttggatgtcatcaaggcatactccaaagcctgcggcaaagagctgccctatgtcatcgacccgcgccgccccggcgatattgccgagtgctatgccgaccccacaaaagcgcgtgaagagctgggctgggaagctgagtacggcattgacgagatgtgcgcatccagctacaaatggcagagcatgaaccccaacggctacaaaggctaagccgttattcgctatctattttcaatcgtaatagagcggcagtgtactttgttttgcactgccgctgataatatgcggaggttatcgtatgaaaaaaccgattcttgttgttatggcagccggtatgggcagccgctacggtggattaaaacaaattgacccggtgggcaaccatggccaaatcatcatcgactattccattttcgacgcacgccgcgccggctttgaaactgtcgtgttcatcatcaagcacgaaattgaggacgcttttaaagaagccatcggcgaccgtctttccaaaatcatggacgtgcgctatgcttatcagcagctggaagaccttcccgcaggctacaccgtgccggaaggccgcaccaaaccctggggcaccagccacgctatcttggctgcacgcgatgtgattgacgcaccgtttgccgttatcaacgccgacgactactatggccccgaggcattccgcgaaatttacaactacctgtccacgcatgaggacggcgagaaatacagctacgccatggtgggctatctgctcaagaacaccgttaccgagcacggcagcgttgcccgcggcgtgtgcgtagagaataacgacggcactttggccagcgttaccgagcgcaccaaaattgagacttatgagggcggcatccacttcactgaggacgacggtgcaacctggaccgacgtttccccggacagcatcgtttccatgaacttgtggggcttcactgagagctttgtgaaagagactcaggctcgttttgccaaattcctcgatgaagcattggtgaaaaatccgctgaagggcgagtacttcctgcccagcgtggtcagccagctgattgaagaaggcaaagccgacgtccgcgtactgcgcagcggcgacaaatggtatggcgttacttacaaagaggataagcccgttgtggtaaatgccatcgcggagaaaacaaaagccggattgtacccggacaacttgtgggaggcataagcaaatggcactttgcaaagcggaagaaactctgtcccaagccttaaccggctttgatttcggcggcgaaatcgtcggcgcagtgcgctacggaaaaggacatatcaacgacacgttctgtgtttatacacaaaatgaagaaggcgactgtgtgcgctacattcttcagcgcatcaacaccaataccttcaccgatcctgacggcctgatggaaaacattgtgggcgttaccgattacctgcgcagcatcattgagaaaaacggcggcgatgccgcacgcgaaaccatgacggttctgcgcaccaaagaaggcaaaaacttctatcgtgacagtgagggcggctgctggcgcgtgtatcccttcattgagggaaccgtgtgcctgcaaagtgtagaaaagcccgagcagttctatgagagcgctaaagcgttcggccatttccagcgcttgctctccggctatgacgcttctaccctgcacgaaacgattgccaagttccacgatacacgcaaccgtttcgccaactttaaaaaggcattggatgccgatgcatgtggccgtgcaaaagacgtgcaggcggaaatcgacttcgtgctggcgcgtgaaaaagactgcgctgtgctgatggatttgctggaggccggcaagcttcccttgcgtgttacccacaacgacaccaagctgaacaatattttgatggataaagccaccggcaccggcatttgcgtcatcgacctcgacaccgttatgcccggccttgcactgaatgactacggcgactccatccgctttggtgccaaccacagcgcagaggatgagaaagacctgtctaaggtaaacttcgacattgagctgtatgaaatctacaccaaaggcttcatggaagccgccggcgatgcattgacccccgcagagaaagaatatctgccttggggcgctaagctgatgacgctggaatgcggcatccgcttcctcaccgactatctcgagggtgaccactatttccgcgtacaccgcgaaggccagaacctcgaccgctgccgcacccagttcaagctggtaagcgacatggaaaactgctgggagcagatgaaagccatcgcagcaaaatattaaaaaatatcgtccgcagcgctcaccggcgtatgcggtaaacaaaaaccgtggatgtcaaacgacatccacggtttttgttgtaaatgcacaaattttaattattttatttgcaggtgtttttatcgtacaattcatttggtataataaaacaggaaatattttcctttacaaaaaataggaacaaaagaaaaagccgcgcaaagcgcggcaaaaaagcaacaaaaaaagtgggttcggcaaaagccgggttaccaccatacccttcggcacaacggccttatctcagaactctgatggatattgataaactgacacagttttcaaaataagtttctctgatggatatagataaaccgacacatcataatctgagctctaggggtattatatcgtatttctttggaaaggtcaacagaaaggatgaaaaaacatgaagtacacgcttggtttagatattggcattggctcggtaggttgggcagtggttcaaaatgagggggaacactggattgaagattttggcgtgcgcctgttcgactcctcggaaaatcccaaagataaatgcaataaaaatcaggagcgccgcgcacagcgtgccgcccgccgcgttactcggcggcgcagtcaccgcaaaatgcgtgtgaagcagcatttgcagcgcatggggcttttaacgctggacgagctttcccgctactttgaagctcctcatcccgacccgctttctctgcgcgtcaaaggcttggacgaaccgctttccccgtgcgagctggcagcatgcctcattcatatcagcaatcaccgcggctatcaggactattttgaaaccgataccgaggatatgacaaaagccgaaaaagaggaagccgagcaagagctggcgggcatcagccgcgtcaaccgactgatggagcagggcggctaccgcaccgccgccgaaatgtttttgcgtgacgccgcttttgcctgccccaccggtggcgaacagcgcgcttacctcaaccacccttatgtaactgatcgctgcttggtagggcgtgacctgctgcgcaaagaggtgcaaatgcttttgcaaaagcaaggcgaaacttaccccattttactcgcgcccaacccggcagtcaaaaaacgcgccgggaaagagccgcttgccagccccatgacgaacgccgaaattttagaggaaattttgctgaaccagcgcgactttgaggatggccccggcacagcgggcgaccccatgcgcaaatacaaaggctttttggacacgctgggcaactgccggtattaccgggatgaaccgtgcgccttccgcgcttctccccttgccgacatttactcattagtgaacgtactttctcagtatcgctacaccaatttggaaacgggtgagctaacgcttgcccccgagctggcacgcgctttgctgcaaaaagcattggaacaaggtgaactgaaaaaaaatgatgtcaccaagctggcaaaaaaattcgatactggggtcaatatgcccacagccaaagaaagcggaaagcaggaaacgcttggcaaatgcctgaagtttttaaagccgatgaaaaagctgctggacgagtgcggcattgactggctttctgccgtgggcgagaactacaccgcgcccgacacgttgttaaaccgcatcagcaaaattgtgtgcgaaaaccataccccgcgccgccgcctgcgggcgctgcgggctgtgccggaactgaatgaagccgccatccgcaagcttgccgggcaaaatttttccggcacggctgccgtttcggaaaaatatatgaagggtgcgattgcggcatttgaaggcggcgagctgtatggccatttccagtcaaaactcgacaacgcccccattatggcaaagggcggtacacaccgcttgcttcccgccttttcgcctgatgccgaatttgccaaaaatgctgtcgttatgcgcagcttaaacgaaacgcgaaaaattatcaatgccgtcatccaagcctatggcgcgccctacgccatcaatgtagaggtggcaagcgaagtgggcaacagctttgaagaacgccaaaatattgacaaccgtcagaaagaaaacgaaaaaaacaaccagcaaatcaccgaaaccgttgccgcgctgctgggcattgagccaactgctgtcacgggcgaaatgcgcctgcgctatcggttgggtgagcggcagggctggcactgcctgtattccgacaagcccattgataaagtcaccgcgctgaacccacgccgtcaggagtttgaggtggatcacattgtgccgttttcgctgattttggacgataccattcacaacaaagcgctggtgtataccgacgaaaaccgccgcaaggggcaaactgtgcctttgatgtatctggatgccgccgcgtgcgaccgcctgcgtgtgcgtgctaatgacatgctgaaacacaagcagatttctgagcgcacctaccgctacttaaccttgcccaatttggacaacaccgagctgctttctgagtggaaatcgcgcaatttaaacgacacgcgctatattacaaaatatctggtgcgctatttaagcgaaacgctgcaatttgcccccggtgcgcgcagcacgcccgtgtttggtgttaaaggccagcttacctcctccctgcggcggcaatggctgaacaaacagacgtggggcaaagacgaaaaggacgccacccgcacggaaacccagctgcaccacgcagtggatgccgttgtcatcgcacatatcacacctgccacctccatgctgatggaaaacaaactgcgtttaaaccgcatctaccacgccgcgggcaagcagaaaacatcggaatattaccaaacgatggaaaagtgcatcaacgcgctggaagaccattaccacatgccgcgccgcgtttcgatggaaattttgtgccgcaaagacggctgcaccgccctgcacccggcgctggggctggaggtagacgtgcgcttttttgacgtggacgccgcacggaaagaagccgagcttttcgccaagcaagccaaaaaggacggcgaggaagtgccgcccgttcccacacgcgccgaactgttggagcgctactacaaccagctgcgcaacttttaccacgacgaggcttttgtggcgcggttgtcgccgccgctggtgagctataaaacgtccacacgctgccgcggcgccgtcacttcgcaaaacgccctgctgataaagcaaacgccggaaggcgcggtggaaatgaagcgccgcgacgtgctgagcctgaaagccaaggagctggacaagctttgcaccgatgacaccgacctgcgcgaatcgctggaagccgcgtttgccctgccgcgcaaaaaagaggacgacccgctgggcgagattttaaaggcacagggcaaaacggaatttgtcacccagaaaggcaggacggtgcgcaaagtgaccctgacgggcaacgagtggcgcaacccgtattataaggaaacgcccgaaagcggcaaaaccgcgctggatacacgcaattactggtgcgtggagctgtaccgcaacgaaaaaggcgagctgcaaatgcgcggcattatgaacgcggacgtaaagcgcgagggcaaaaagctggtgctgcaaacgccgccccctgccgattacgccgcgcatgtcatgtatttattcccctatgaatatattgttgtcacaaaaagcaacggtgaggaaaagtaccgcgggttttataagtcggtatttaatatcaatcaaaatgcactgtgctatatcgcaggcaatgcaccttttgatggaaaaaaagccatgagcatcggcaaaaaagacactgtgcgcaaatacgccgtgtcgctgctgggcaggctgggaggtgaagtggcatgtggcgcacccttattgtacaagccggcgaaaaaataaccctgcaaaacaactggctgtatgtgtgttccgaggaacaggaagcgcgtgtgccggtgggcgatttgtattccgtggtgattgacaaccgccgcgccgtgctcagcgtggcggtgcttaccacgctggcacaggcgggcgttcacattttgttttgtgacgagagccatgtccccaccgcccaactgcttcccctgaatgcgcactaccagccgcttgccgtgctttcggcacaaatggcatggacgcaggaatggaaagacttggtttggcagcgcattgtgcaggcaaaaattgcaaatcaggcgcgcgccctgcgcttttgccatgtgaaaaccgaaaaagtgcaggagctggaagccctcgccgccgcggtactgcccggcgacaagggcaaccgcgaagcacaggcggcaaagcgccacttccgcgccttgttcggcgcgggctttacgcgcggcgatgacgacgttaccaacgccgctttgaactacggctataccattttgcgctcggcggtgtgcaaaacgctggcggcatacggctacaactgcgcgctgggcatccatcacatggggcgcggcaacgcctttaatttggcggacgatttgatggagccgctgcgcccgctggtggattactgggtggatagtcattgtgacgaattatttgaaacgctgacgaaatcgaaccgcagcagcctgattgcactggtgaaccatgttatccggttcgagaataaaaaaatgcgggtgcgctacgccatcgactggtatgtaaaaagctttaccgccgccgtgcagggacaggacgccgggctgctgcgcctgccggagctgctgcgcagcgacccgtgctttgaggatgagcaggatgggtgaccgttggatgagagtgctgatttttttcgatttgcctgttaccaccaaaaaactgcgccgcgactatgcccagtttcgcaaagcactgctgaaagacgggtttatgatgctgcaatattcggtctattcgcggctggcgcgcaaccacgacgacgcacaaaagcacctgcgcaccgtgcaggcgaacttgccgccgcacggctcggtgcgctccatgattgtaacggaaaaacaatacatgcaaatgcagcttttggtgggcgaaaaggtgaaggacgaaaatttccttgacacgcgcgatttgattgaattataatgaataggtaaaaaacacaccaaaaccgcaaatatccacaagatattgcggttttggttctctggtggatattgataaactgatacaaagatttaaacgcggaagatattgctattgttttggttctctggtggatat

SEQ ID NO: 3431 - DNA, 23357 bp, synthetic construct
  misc_feature 1..23357: note = Synthetic
  source 1..23357: mol_type = other DNA
cgtcaggcctttgcactgagatgcctcaggatcgctagcccaggctgggaacgtaaacatgccaagagcgattacgcctgcggctaagcctttcgccaacacaccaatactcactggaatccccccgatacgcggaacagagatcatcttagaaacaggggatcggctttcctgcaaggctattttttgcgcgaggccgaggcccaagtgagcgcttgttccaggcgatcatcgccccagaacagctcgccatcctctgtgataaagctcggcgcaccgaagatgcctcgggactgggcttccgccgtctgatccttaagacgttgcttgatcgcagggtcttcggcgcgcgccatcagcgatgcagcgtctagacctagtccggccaacgctttctcgagcaccgccggctgtgcaatgtcctctccccgcccaaactcggcttcgaagatcgctttggtgaccggctcgatccagccttcatcggcgccaatcaaagcgagccgcgctgccttcagcccgttcgccgggaacgtcggaggcatgacgaatggaagaccacggctcgcggtaatccgctgcatgtcgcggatcatgtagcgtcctttcgccgggtaaagattgaatggtgaggtatcccagccctgcgccttgaaaatcggccccagaagaaaaggcttccagatgacctcgacaccggcctgctgggccaagtctgagatgcgcatgacggagagatacgagtaattcgaggcgaactcgtaccagaactctaaacggggcatgggaaagacctctcgagcaacgtaggagctcaaacctaccacggccaatcggaactgagacaaatagggcagaccagcctcgtaggaggccccttggccgctggcggatcgcgcgcctatagtgcgccgccccattcttacgacatgagcaggacacacgatggctgcgaagaccggcggagagaagatcaagaaggttgtgcttgcctattcaggcggcctcgacacctccatcatcctgaagtggctgcaggaaacctacggctgcgaggtggtgacgttcacagccgatctcggccagggcgaagagcttgaacccgcgcgtcgcaaggcggaaatgctcggcatcaagccggagaacatcttcatcgaggacctgcgggaagagttcgttcgcgattacgtgttccccatgttccgcgccaacgcggtctatgaaggggtttacctgctcggcacctcgattgcgcgcccgctgattgccaagaagcagatcgagattgcgcgcaagaccggcgcggacgccgtctgccacggtgccaccggcaagggcaacgaccaggtgcgcttcgagctcagctactacgcgctggagccgaacatccgcattatcgccccctggcgcgagtggaacttcaaaggccgcgccgagctgctggacttcgcccgcaagcaccagatccccatcgccaaagacaaggaaggcgaggcgccgttctctgtcgatgccaatctgctccactcgtcttcagaaggaaaagtgctggaagatccggccatcgagccgccgtccatcgtctaccagcgcacgatcgaccccgagcaggcgccggacaagccgaccatcatcaccatcggcttcgagcgcggcgatgccgtgagcctcaacggcgagcgcttgtcgccggccacgctgctggcgcgcctcaacgacctcggtcgtgggaacgggattggacgcgtcgatctcgtcgagaaccggttcgtcggcatgaagtcgcgcggcgtctacgagacaccaggcggcaccatcctgctcgctgcgcaccgggccatcgagtcgatcacgctcgaccgcggcgcggcgcacctcaaggacgagctgatgccgcgttacgccgagctgatctacaacggcttctggttcagccccgagcgcgagatgctccaggcgctcatcgacaagagccaggagcacgtcgaaggtgaggtgcggctgaagctctacaagggcaacgtcatcgtcatcggtcggacgagcccgaagtcactttacaacccgacgctcgtcactttcgaggacgaccgcggcgcctacgaccagaaggacgccgaaggcttcatccggctcaacgcgctgcggctccggacgctcgcgatgcgggccagatccatgcagtgaaggccgctgctgcggtgctggaatacggccacagtcgaagacggagcagtggctgaggaagcgatagagggagcgcgctacttgcgctcccactcatccttcacttccatgcactttttcgtgatgaagttgttgatgtcctcgacgaccatgctgtcgaggacattgaaggtgttgtccgtggcggttgccgtccacatggcacccttcacgagcgtgggtgcctcgatctcaccccagttgagcaccgccttggtcgctttaccgttttcgaaggtcacctttggctggaattcgaacttgatctcagccggcccctcctcgcgctcgaccttgcaagagacctgatgcttttcgagctgggcctcgtgcttcggctcactcatcgccttgatgagcatatcccgcttcagccttatgtctgacacacactgcacgcggccccatggccaggagaccttggccttggacacgatcttctgcagatgctccttccgccaggtctttacgatgtggcaagcgatgtcgccgccgttcggatcgcggttgtagaacgcgtcgcagatggccaccttgcaagccttccggctctcacgctcagccttttcttcaggcgtgagctctacctcagcctccgcgttcttagcctcctccgccatggctggagctgaggcggaagccaccatggcggcagcaatgacccagcaaagtgcgcgacgagccctcatccgatcccccttctgcgacagagccgtccccgcctatggcgaggctttcgcgcaggaatatgacggggaggccggaagatcgcagctaaaccttagtccacaagtcggggttgcttgaactcgcctggccgggcaccatatctcactttgcgtggacctgcggcgcccggtagaacgggccgactgctggcgggggcctatgaggacccgcggacgttcaacaaggtcgcttagaaagggctttgagcatgtcacgcatgtcgcttttgtccagtcccatgctgctcgggttcgaggagatcgagcggcttatcgagcgcgtcggcaagggcgccagcgatgggtatccgccttacaacatcgagcgcattgggaaggctggcgagcggggcgagttgctgcgcatcactttggcagtagccggtttcacacgcgatcagcttgagatcacagtcgaggacaaccagctaacgatccgcggtaagcagcaggaggacaagggccgggagtacctttaccgaggcattgcagcccggcagttccaacggacctttgtcctcgcggacggcatcgagatcaaaggcgcggatctgaacaacggtcttctgtccatcgatctcgtcaggcacgagccggagcggctggtgcgacggattgagatcggtgagcgcaaatccggtgcatgagcgctatcagcacctgcgttggccaaagacagagagaataactgggccgtgggtgcggtcggacgaccaggcccgcaggcgtgatgtgcctgccccgcacccgaaggagtagcatcatgagcaaggtcacacacaaggccaagcgcgcaagatcaccgcggaagcgcgcgagcattccccaggttgcgccggtgatgagccagcgcgaactcgcgcgcctcggcggaggcgagatcgcctacatcaaggtgttgacgtctgaggaggcccagcgcctctatccgatgatcgagggcttgcccagcggcatgaacctttatgcgctgcacgcggccgatggcacccccatcgcgctaaccgacagccgccaagcagcaattggccacgctcgtggagacaagctggagattgccagcgtccactgaggccgaacatctctgagaaagcagaagcgctccctcgagatcgagcggagcgctctttatttgtttgccgtggtacatttgtttgccgtggtacgcctactcatgctggtccagggtggtgtgccggccagccttggtcgaaccccgcttaaccacgataccgcgcaaactggccccgcggcctatagggctccaggtaggcgggcacgatcgactcgatcgtgtggaggtgcggcacgccaaggccctccaatgtccggccttcctgcttggcagctgagctgacgacgttgtccttcttgagcaggcgcacttggtcgagagtgatcggccgaatgctgttcggcagcggccacgtcagcagtgcgagcaggctcgccagccagaatggaagtggaaggtaagggcggtcctgatcgatccattcctgggtcttgtccagcagctcacggaaggtgaagatctccgggccgccggcctcgtagatcgtgcccggttttcccgccccttcgacagcattggctatagcgccaccgagatcgcccgcatagaccggctggaagcgcgtccgtcccccgccgatcagtggcaagagcggcgcgaagcgagccatggccgcaaagcggttgaagaagtcatcctcggggccgaagacgatggaggggcggatgatgatggcatcggggaactcctccaggacggcctgttcggattccgccttggtgcgggcgtaggctgaccggctcttcggatcggcaccgatagccgaaatgtggatgaagcgcttggctccagcctcgcgcgcggccctggccacggcacgggcaccttgtacgtgcacggcagtgaacgtctgccttccggtgggggtcagaatgccgacggcattgactactgccgttgcatccctgaccgcgttggcgaccgactccggatagcgcacgttggcctgaacggcgtggatctgcccgagccggcccatcggctgcagatggccggcgaggtctggacgcctcacggctgctctgatccgccacccgcggcgggccagccgttgaaccgcatagcggcctacgaaccccgatccgccaaacacggtcaccagaccgccgaaggcgaggtttgccgacatgccagtggatctcctgccatccgctgcccatatattcttgaggcgcagcaatatacgaccgcccaggccctgtgaagtgacggcccgcacaattgacattggaagcgctcggctctaactcatgagccgcatcgacgtgcccaggtggcggaattggtagacgcactagtttcaggtactagcggggtaacacccgtggaggttcgagtcctctcctgggcaccatctactacaaaggtagttgatttttcttacttttttgttgttttctttcccaccttccgggcttccgtactttaggtgggaaagtttccggcactgtttgttctcgagagcaggtgaccgtggttcaaagcgagctgcctgcgattggccgcttcagtataccgctcggcttgcttcagcgtccgccaaccgaagatcgccatcagcacgtgagtagatgcacccctctcagctaagtacgtcgccgcggctttccgcaaaccatgcgcagagcgatcgaccagccccgcttctctgcaccgatcgcgaaaccagtttgtgaaccccgccgctgtgaatggttgaccacgctctgtgacaaggaatgtcaggtcacctgtggggctcttatccaagacctgctgcagctccggtagcaccggaacggtgacgatggtaggtgtgcggttgcgccccttgtgttgtcgccaacttaagcagccgtcgcgcatatgctgccggccgagttgcactacgtcagagcgccgggcgccagtgtagatgagcagttcgaacgctaggcgcgccttgctgccgatcgggtggcgggccttaaactgctcaatatccttctctgaccaagtcggaaagccacctgtccgtttgggtttcaggaaatcgacgtcccgcgcaggattgccagtaatcccaagttcccggttttcaggcttcagtgcccatcggaacattgcccggagccgccgcacgcgattgttggcgccctcgggatggtcagctttccggtcccggagtatcgccacgctctttgctgagaatcgcgataagggacagtcgccgaaaatctccttagcgccgggtgcaattggctctcggtagatgctatcaaggatgaggcgcgtcacatgctgggttctaggatcgagctctcgaaatgccgacgagttcaaccacttgacaccaagccatcggagcgttcccggaataggtgccgtgctcggtgacgtcttgaactcaccggcctcgctttgccgcatcagttcatgatagcgccggtcgaatgcttccgtacctggcttctcatgcattcgaattttcttgtggccttttccgcgccagaagtagatacgaacgtttccccaacggtccacgtcctcgtagacgtacctacgcttaattgtaaccattggcggttaccctctcataccgactgtctgatccaaggatcatcatcatcgtcgtctctgctcagcgcactaatggcttgatcgattttccggacatcccagaggacgcggctgtaaatgcgaagagccttgggcattagcccatcctccaccattcgatcaaaaatcgtgggactgacgcctacatattcagccgcttgtactcgagagagcaagcgcggcatgacaccaggaggtagaacagacgagctgtttcgggttcgccgcgaggagtgttggtgaccgatccgatcatcctcacttgtgccagaggtgctaggctgcttaggaacgcgcgtacgaccacggcgcctcctcgacggagcccgctcagaaggcgttcgcatggggatttcaacctctgtagcggggcccgacgcaaaaaagccggcacgcacagagtgcggccggtcctgatcatcgggccaattttgtggtgatttttatgctaacgcggctgccgagtacgccgctttcttgagcggcagcaagaattcacttttcagcgcaacaaaaaacccggaacaatatccctcgttccgggcactcgtctcgcgatttgtagcaataatcttgctgcactaacggttttcctgcaagttccgccaatgcgacattcagacgcatagcactctcatcgatgttcagcccccaccagccagacacggaatcggcctcctcggccaaacctggggcaggaaacggcatcgtggcaggcgactgccggtcagctcggacagacgcggaggctcgaagctgcgtcctccggctcacgcccaagtcctcagtcgcctgatctatcctcgccgcggcagatgtgcgatacgaagcttgtcgagtctggcagcgacgcattctcgaaagcggagcagttcgcatggagccttatcttctgatcgtctaccttgccatgaagcccggcgatgcgcccaccccgccgccgcaaatgtttgagcgcccatcccgcgccgactgcctcagggaggccgaccgcattcatcggctgaaccttggacaggcgatctgcgtgcccaaaaaccggcttactgttatcgcgggatagcttgtcgcctaagctcggctcccaatttgccgggttccaaatgaaagaattttcgctgatcatccacctgctgagtaacgctaacaatccgaacattccgcccgaagccatctggttccccacgcgggaagcttgcgaggcgcgccgagcgctcgtgctgaagtacaggaccgcacgccaggtggaatgcgtgcactggagcgagcgcattttcacaattgcccattgaggtctattctcgctgaattcccacaaaaagcctatcataagcttcggcctaaaccgtgcaagcgaaccgtgcggcgtcgccccatttctggattgctgatgccacttatttcgtgcttatggtattgaatacaacatcgattggggagccatgttgtgcaaaaaaattccgaattttcatgctcttaaatcggctgtttgcagtgaaccattcggtatacgacgcgttgcaggtgtccaagctgcaacgtctattcggattgggcggggagcttgggcacggtgcttcaactgaggcgcccccagcgctagtcgtgtgtgtgtcggaggacttcttcgcaattgcgaggaattaagccccaccttgcccgtagatttctcgtgctcgcctgatgattagctgctggacggctccgaaaaactcggcgccgtggccccggcctcccatttcttcggcagcttcgaatccatgttcacaggcgctcaccatcaatgctgccgcaagttcgatgcgtgttgccaacttcatgccttggcgctcaattggagcgagcgccttcaagcactccttcacctgcttgaaatcggcatcgctgaaaggcgatagcagcagttctggtattctggtgtgccagccggggattgcagaccccagaaccagcggcgttagggtcaggtctttcgaatgacctgttgcctcagcgctcgtgacgggcacgggaggtagccgtttctttccttttgacggtttcagccgcttgccggccgccgcgagacgccgccgttcttcatcctcggctctacactgttgctcaatccggttttagagagcatcccagagatgactaggcagaacatcttcgcccaagtccacatgctcccatctgggcttggatcttctcgggtagctaccgggttcggggaggccagcaatatacaaagtcatctgagatcccgcccagccgatgtagggagcctgcttgtgcaggtcaaagtattcccattcgggagtgtgttcatattcgacgcaggccttccgaaccactcggatggtcaacaactcgaaggcaatgtcaaacaggtaatggcctgtgaatgctgggtatcgcagagaatggccccaactttcagctcgcgtgatcacatcgtcgaggttgatcttaagggtggaggccaactccaggagtttgctgagtggcatctcgtcgatgttgtcacgatcacggacgaacttcttgaggcgccggtgttccttcaacgtcagccgtagctcatcaattgcccaagtcggaaacgaggtgttcactgccaactgtcctgcttcatggtatcggggcgcactggtgtcccagctcttacatgcccccgctttgttcacgctcattgggaagcgcgaccgttagccatgctggttattgtgggacgttgaccacaatcgcctttgtccttttgaaagacacaccagccgacgctgtgggaaggggcgcacaggaacaacaatggtgccctcggaggggtcgccagcgaccgaaaattcgttctccagggccagcaggccggtcaacgcggctagggcggcgtctacttagtctccgttcttcagcaacttcacgtcgactcgttgcctcttaaggaccttgcggggaacttaacctttcccatttgccgaggacagagatcgcctcgcaagagtaccgccgtcgcgtgagggaagacttcgatagctgtcccctcaacaggagcaggcatgtcacgggagcccgcttgatagcgtgggaacaggggagcaattttgtcgtagaccttcctgccggcacgcatccactcgcaaaagtatgagaaccagggtcggtcggcgtccaaaacagatttatcccacgtttacgaagctcacgttcagctagtcggctgcgaccactcctagcccatgcctgggcgcatcgatagctactaccgcaatggccagggtccaaactgccatgcacgcgataattgtgaccgtctgggtgccctctaagaacatgcaatgaccccgctattgctactagcggggtcacgccggcaattgacctttgggatgccgagcccacgcgaagaggtcgtttgcttgcgaaaagccgaccgcctctcgctttgctacaaagcagtttgtattctatccgcctgctaagcacaaggggaggggtgatgcagcgcatcttcggtttcgacatcgggacgacgtcgatcggctgggcggtaattgaccatgatgccgccagagccgttggatgcattgttgggatgggtgttcggatatttccagaagcgcgcgacccggatggcacgccgctcaaccaaatccgacgtcaaaaacgcctcatccgccgacagttgcgacggcgcaaactccggcgccgcgcactaaacgagttgctcaacgaagccgggctcttgccgcctttcgcgaagggcaagcgggtaaatggcagctatgtgcgaagctcctgggaagaagtcatgcagctgccgccactcgagctgcggaagaaggccttagcagagaggcttgaaccctacgagcttgggcgcgctctctatcaccttgcgcatcggcgtcatttcaaaggacgggacgtcgagagcgacacgccagtagagagctccgctgaggagaaagcagcgcagtccgctcgcgcaacgacagtgcaaatcctgcaggagagcggaaagacactcggggagatgttagctgaacgtgccccgacccgaggcgagatccccagacagaggacgcgcggtatccacgccctccgcgagcatgtcattgaggagttcaacagaatcatcgaagcccaacgacgacaccaccccatcctgcgcgatccggttttcgtggatcagctgcggaatgtggtcttcagtcagaagccaattttttggcgtacgaatacgttgggtgaatgtccgttcgttccaggttctccactttgtcccaagggctcctggctctctcaacagcgccggatgctcgaaaagctcaacaatctctcaatcgtctgtggtaatctccgaccactcgattcggaagagcgtgcggcaattctcgaaaagcttcaggttcaagcgtcgatgacctgggccgccgtgcgagctgccctcaagccggtgtacgcaaaacgtggcgagcccggcgcagagcaagcccttcgcttcaatctggagctcggcggcgaatcgaagctaaccggcaatctagtcgaagcgaagctcgtcagcattttcggtgagcgttggaagacccacccgcaccggcaagcgatccgcgacgccatccatgaacgtttgtggaaggccgattacgtggagattggtacccagcgcgtcgttatactgcccgagaccgagcgccgtaggcgccgcgcggagctcgcgaaaaagttcatccatgaatacgacatttcggacgctgaggcgaaggctctgagtgagcttcagctccccgccggctgggagccctattcggtagaggcgctccggcggtttcttcccctcttggagcagggtgtccgcttcggcgcgctcgtggccggtccggaatggacggaatggcgcgaggcaaactttccaaaccgcaagcaaccctcaggcggaagccttgatctcctaccaagtcctgctaactccggggagcaaaagcgcctcgctgcaatccgcaatccaaccgtcgttcgcgttttgaacgagctgcggaaggttacgaacaacttgattcgcgttcatggcaaacccgacctcatacgaatcgagctggcgcgggaaattggcctatcgaagcgcgagcgcgccgaaatccgggaacagctgcggcggcaggaaaagcgtcgtcgcgaggctgaggaggacctgaaatcaaaaggcatcctccaaccaacgcgggccgaaatcgaaaaatggttgctatggaaggaaagccaggagcgatgcccgtataccggcgatcacatcagcttcgacgcactctttcggaatggcgaatacgatgtggagcatatctggccgcgctcacgctcattggacgacagctttcgcaacaagactctatgccgacgcgatgtgaacatagagaaaggaaatcggacacccttcgagttctatcaaagtcgaccggatgaatgggcggccatcgttacccgccttcgcggcatgacggccaaagggcgatcagcaggcatgccctatggcaaggttaagcggtttttagccgagtcaatgccggaggatttcgcaaaccggcagctcaccgacaccagctatgctgcgcgagaggctgtcacctttctgaagcggctgggatcaaaatcgggtgctggaacgtcggttgccgtacaagctgtggccggccgtgtcaccgcgcagctgcgccgtctttggcaactcaacaatatgctggccgataacgccgaaaagactcgctctgatcaccgtcaccatgcgattgacgctctggtcgtcgcttgcaccgatcccggtatggttcaccgtctttcccgctactggcagcagaaggacgacccgcgcgctgagcgcccgcacttacctgcgccatggcccggtattcgggccgaggtgcaacaactgaaggattgcggtgagatcagaatttcgcaccgcgtacggaaaaaagtttccggtccgctccacgatgagatgccgtacggagacaccggcaaggagataatgaaaaacggcactattcttggcgtgttcgtcaagagaatgccagtcgagaagttgtctcttgaaaccttgaagatcgatgacgttgctcagattagcaagacagcaaagttcgtagtgcgggacaaggccattcgcgaagccttgagaaatcacctcgctgcggccggtggcgatcccaagaaggcttatcccccatatccgagagtcacgcccaatggcccggaaattcggtctgtgcgtgtcctctcgcttcagcaaaagagcctcatggcgccggtggcgatgagctggaatggggagagagagagacagccgaacggctttgccgagttggggaccaaccaccacgtcgcgatctatcgaacgtccagcggcaaagccgaatatgagatcgtcagcctttatgaagctgcgcggcgcctggcccgaggagaaccgattgtccgtcgacagcgcgacggggcgaagtttgttatgtctttggctgccggagaggcagtcgagttcctggatggggaaaggaaaggcatttggatcgtgcaaggcgtctgggccaatgggcaggttgtactaacgcgagattatgatgctcgtcctaccagcaaaaaggaatccgaacgactcggcatgagcggcaaaagggaagaattctatccgaaagtatcaacccttatttcagactcggtacgcaaaatctccgtagacccaattggccgcattagggtagccaacgactgaagctcgctatggctggaaagattgtcgagttctcaaccaggggtacgcgtttctcaataacacaccgccagcttgtcgtcgaaagacctgagcacccgaaggctacgcttccgatcgaagatcttggcgttgtgattgtcgatgacgtgtgcgccacttacacccaaagcgtattcattgagttgctcacgtcaggggtgacattgataatcaccggccgcaaccatctgcccctcggcatgatgctgccactcgccggtcatcatatccaaacggagcgtcaccgagcccagctggaagcgagccttccgacaaaaagcggatctggcaagcgatacgcgcggcactgtgcttccattgagaacgcggaaattcatgtgcaacgtatgggggcgctggtcccacccgtcggcgaggttcggttcttaacgataaccgaccgccaatatggccgaatcaaagtttacgtcggcaaaaagcggcagccaaccccgccttcgccttcccagctcgagtttttctagatgctggaaaggcgaatagcggtttatgttgaatgagttagccgaggcctagagtagcaaaacgagagacggccgcaatccgcagccagaattcgagcgtgcctgcgctttgtcagaagagtagcaaaacgagagacggccgcaatccgcagcgggggctatgtacgacatcaactctattggagagtagcaaaacgagagacggccgcaatccgcagcccgaggacgaagaagggtatgtctggatcgagagtagcaaaacgagagacggccgcaatccgcagctgatcgagcgtaacggcgacatcatcaaagagagtagcaaaacgagagacggccgcaatccgcagctgaaggagccaggctcagtgcaccccgaccaccccgtgtggcgggcctgcaagcgaccttgggaccttggaggggcattcgagatctgctgcctacggcgtcagcgccgatggctcggtggtcgttggcgtgtcgcgaagggaccgtctcggtcgtgccttccgctgggaaaacggcgtcatggaagaactccgcactctgggaggcccgtcatctgcagccttcggcgtcaacgcggacggctcggtagccgtcggatggtctctcacctcattaggaagccagcatgccgtcctttgggagggcagcaaatcgataatcgacctcggcaccttgggaggccagaactcttgggcctatggcgtcaacgccgacggctcggtggtcgtcggatggtctgaaaccaaatatggtttcacgcatgcctttcgctgggaaaacggcgacatgaaggacctcggcactttgccaggcgacacctcgtctcaagcctatggcgtcaacgccgacggctcggtggtcgttggcgtgtcggaaaaagccggtttcgggcgtgccttccgctggactgaaaagacggacatgcaggaccttaaggcactgctagaaaacgctggtgtcgacatgaccgacattgacttgctagacgccaccggagtttcggacaacggccactttatcgtcgggaccggcttattttcggggcaacaacgcgcctatatcgttcgctacgacgacggcacaacagcgggcttgacgacaacggataagttgaagaactccattaatcagctcgctgagacccgcgccggtctgttggcccagcaccacgggtttgcggcgccgctactaggaacggacaagccgatgacctcgggcaatgagaccggtgtgttcgtcagcggcggctcagtctccggcggcggcttcctgcgctacggcttgggtcagggccttgccctgctggggggcatctcatacgccaaggagagctatcccgatgccgacctcgatcgcggcttcaccggggcgctggcgatgcaatatttgcacaccttgtccggctggtggcatcctttcgtcgagcttggcggctgggtggctcctgaggccgagctcagcttttcccgcacctacgccaacggcgccggcaccgccacaggcaccggccacacgcacggcgacctgtcctatctctacgagcgggccggcatcctgctcaccgtcagcgacgacgatcagatcgccctttcagccgaaatcggacgccagcgcatggcagtcgagggctacagcgagggggcggatgggaatccattcgaggcgcatgttttccccggcaccgatcgggcggacatcatcaaagcccgcttgcagtggtcgcatcgcttcacggacgatttggacgccacggtttgggcggcagcggtgcaggccttcaaccacgaaagcggccttcgagggagagtgtggggccttggaagcttcgtaccggcgagcctcgacgagcttacctgggccgagtatggcgcgcgggtcggctacaaggtgaccgacgtgaagacgctggacctgttcatgaccggcgtttccggggatgacggcattgacacgcgcgttcatgctggtgccggcttgcgctttcagttctaggggctgggctacgaacgcgtcgggctcaactgtcctctgatcgattgccacccgatggcgagaccgtgttcgtcgcagggccagggatggacgaggcttggacgggcaaagcccgggggaccgaacgaagcgttgcgtgttgcgcgctgacctaccgctaacgcacgcagagaaaggaagcatgacatcccgcccagtggcggccgtcaagaatgcgtctgtgggcagcgtcggaacacacggaatggttctggcgcgcggttggtgcttctgcgagggcgcgcgattagcgtgcaacacgacgccgaagttgcatatcgggccgtgccagagaggtgcccgggggatgccagtcctgaattgacgcgccaagtgtaacacattacgttacactcatgatccgctcgttcagacacaagggactggccgagctctgggcaattggaaagacgcgaaagatcgacgccaagttgcacagtcgagttctcaggcgtctcgaggttctggaccaggccgagcggcccgaggatctgaacgtgccagggttcgatttccatgcgctcaggggctaccagccgaaacgctacaccattcatgtgaatggcccctggtgcatcacctttgagttccacaacggcgacgcgtggcgcgtcgaccttgagcaataccactgaggcaaagatgtctgagttccccgccaagcgtgacccgaaccgagctcctccgcacccgggcgagctgctaagagaggatatccttccggctctcgggctgacggtcacggaggccgcggaagcgctcaaagtgacccgccagaccctacatcgcatcctcgccgggaaggctgctattacgccagcgatggcgcttcggctggggcggttctgcggaaacggtccgcgcctctggctgcgcatgcaggaggcctatgacctttggcatgcggaacgcgaaatcgccgacgagctcgcggccatcaagcctgcccgggctgcatgaggcatggccatgccgcgccaacctgctgcatcgatcgaaactgcacggtccggccgatcgggatcgatgccggagggcggctcgggggcatggctgagcgcgaccgaagcggagctctatgccgagttcacgagcttagtccgacgccttggtcgccggggcgtgtcgggtatgtacgtgaggattgctaacgtagcggaggcagttgcaaaggcacacgccgaggggcggccagcaatccgcgagcttactcgggccttggacgcagcgcgctctgcagaggccgcacagcgcaagaagcgttgggcttactacgaccaggttctcgggcagacctccgaggaaattatgtttggttgcctaatcggattggtcgcactcggggtcatcctttacgggatctcgatcggatggcagggcgcattctacgttggtgggttcttgattgtcgtagctctccttctcttcagcccagccatttggcggctcacccggcctggaccgttttgagttcaactcggaccgtcttagtcgagcaaaccgaacggcaggaaatccattcggcgctatgcaactctgagcactttgcccctgattcccactgccgataacgataatttgcggcagttgtagcccactggatagccatacaacccagtcgttggcagaagcgttggccgccatgcctcgctcatcagtttctattttttcacccggaacgtcgaggccacgttccggatgccgcacaatcgggccctgactactttggagccattggcggccatcttccctgggcacatggccccggttgtccgccgtgccagtgacggggaacgcgagctcagcatgctctcatggggcttcgtgctcccacagaacggcaaggcgccgcgacgcgtcacgaacgtccgcgatggagattccgcaagcggaaaaacgcaaaattcacctcttcgaattatgctcattcgcttgatgcggccgcagaatctccccgggcaccactgactacatgtcgctcagattccgccggtggttcacaagcgccatcgccttcctcaaaaacgaagtgtcgcgggataatgtctttacttgccaaatggcagcgcagacgccatgccataaaatcgtgaccaaagaaatgcggatgggcaatcccggttgtaaatctttcgtctatcctgccgtcctctgatggagctccttgaccgacttcgacttatcaaaagtcacgaaccaattgggacgtgcacaccaccccctcccctttgacatcgtttcgataccccctagcaactgccatgtggggtgccgctactttgcaaatcttttcagggtatcgttgatcggtcgaagcattttctcatacgcccaacgtgcttctcgtgccctaactccgaaaagcttaactccgaagaatcgatacaagtactcattgaagtacatcggtattcgccagccaatgctatcaagtcgagcgggggaccaaacgcgctcgaaattgaagtcgtcacagaatctggttttcgacttatttaccgggccgggtttagcgctcgcagtctctggatactcagtcagcaaaacaacccgcacctatccggggctgcagctgttcggcaagcgcttgcaggccggacttaaaatcctttttcgatacgctcggcgaccaactgcctggcacaagcctccgctccattcgaacgcctaattcgcctacacttataaattacttcagcgagcaccggtccgaatccggcatcatttcccccaaccgataagacaatcaaggttggtttgcggtaccgcttgcaaacgccattttgtttctcaatacaaagatcatctttagcttgctctatttgagcaggtagaacttcgcaattcctggcgctttggaatgccggcagcgtaactccaaactccctcttgaggtactcgagatgtgatcgcggctccagggtgcgtggcgcaccttcaaagccatagcatctcattagtttatcctccaaagatgatgcgaaacatatcctctctggcgaccaaatccggccgcaaagctagaatgcaatagcctagaatccttattgtgtgaccgcaaagcaacagacgcccctgagctagcgtgctaggaaatatacgttaatcccttagtttgttgtttgatcggcgattgacatgttcagttgccgcgccagtcgggtcgtgcgctccttgaattcaggcgagcaccggaagttgagctgtgtgcgtaccgccccgcggattgtctggcgcgccgcgacggccagaccagttcgtgagcgatccttgcggatggagatcgacgacccgcgccttactggcagcacggacggccagacacgacgtcagtgtcgtcttacccgtgtgccgccttttgtgttgatgacgccgatggagtgcatgccccctccgcatgtctaggcatttcacctctactttgatgatacctagctttttctgtcttgcttagtcgttccccaatgcctaggcattttgcctggcgctatacattccaccctcatccccgtgaccgacgatcaccactagtcttgacgttgccgatcaccgcttgtccgccatcgttgacgtgcacgtgctcgactcgcacatattgcgactgcccgcctttcagccttctgagctgctccgtctgtaccgcagtaaccttgatgagctgggctgccgcagcggccaacacgggttgctgtcgtccggtggtgttgctaagcgagttcaggacctgcatggcagcggcgtgggcgcaggccagctgaatggcagcgacggcttcgatttcattcctgggttgcgcaccttcaatgatggcgagcaccgcattaacggcgacttcgctcgtgccttggtaaggcagcctggaagcaatctcaatctggcgcagcgttgcggcgacaaagtcgggtgatgccgtgccgagcgccttcttcaacctcgcccaccagtcccttttcatgctttccggagcgtaggcaacgtgatagtcgcaattaacgcgcctgagtttgaccctgacaggtcgcttggatgctggcacagggcgtgccggcagctgatcttttttcgtcatttctgcctcggctttgcgaactgcctgacgagctctcgcgcccatctcctctcctccactgcttgttgggtccaatagccgtcgcgatagttgccattggcgggcccctgcggagctcctgggctcagcccgccgtgcagccggcaccgggctcttccgcggatggcgggagattggcaaggcgtgccggcccgggtcctggcaccgcagcgcggcgcggcccgcatattggccagccgcgcttcagtcccttggttcatggggttgagttccgatttgccaatcaccccctaaacagaatcgttcggcccacggcatgcttgtgccgttgacccacaaactgctgttggctgaacacatttccaattggatgatttgaaccgtttgccgctcgctgttgtagctcagcgtgtcggttgacgtggggccccggttgagccccaatcgcgagaagtgcctaggatgtcacgccagccgtgcaggcgtcccatctcaaatgccaaaagtcgcttagagatgcctgacggaaagcgcatcgtgacaaactcgccaccgagtacaatcgcgatctcacatcctgaccagcgatattgattgcttgtgaagccgaggtctttcaaagtcctctcaacttcagccttgatctcagaccgcgtcatagtctgctcctgttgcaatgtctctccagagcccaataggccccgccagccgcgctaggctggcacacctttgccgtccctcaatctcgtggaacggcttctaacgagacggcattttgcctacgcagcccatccgccgcatgcggccggagtctcagggcgacggcgaacttgtcactcaccttacaacgggctcgcgccagtatgtagaaccgtactctcagcagaagatttctcgtgatcgtggaacaagccaacgttcgtctactgtgcatccggacaagctggcatgcttaggaactctgattcacccttttttctgtcgtggatccatttccagccgctgtattccggaaagattgcccgtgcggcaatttcaaggttttcacaaaagtcgcgctcaatttggtaagcgacaaactcgttgggagctcgcaggaaaagggtaccatccttgaacgcctcgcagtggacctttccgaaccacaaccgcgcggaagctccgtcccgctgcgaagaaatcgacttgcggattgccaaagtctccgcgggcatgggtccatcattgtcctgctcgagatcaggaagcaggtgattaagctccgcctctgacagcgacgccttctctcgagctagccgcttcgcacattccaaagcttgcgccaccgtcggccaggatgatcgtgtcgagatcatctcgtcagctactgcagagagcacatcggccgaaaaccctgcaagtttttctcctagagcgcgtgcatgtccgcaagacaagttggcacgtatcggcaatgcttctctcaatgggatgagcaagttcttgacaacgtgaccctgccccttttgcaccaactcgtcaaatacttgcacaagttcacacaactcctgatgggcgtttttttcttgtattctctttctgttattgtgagtattattcttgtcaccaccgaaatgtattttttcggcactatcgggcgaatttcttgtcactatcgatccggatttttgtcaccaccatcgctcccatcgacgcgtattttctgggccacttcaaccaagatcggaagggtcgtctcgccccgtcgatgcaccttagttctgtgccctgagaccggcacgatccgcctcagtacatatccatatccgtcgagccgttgcatcgctcgcatgatctcgcgctctgaccgctttagagcgtcggcaatggcattgatcccatgccagtcgaagcccttcttccggttgatgaccgacatcaagtaggtaagcagggcccgatcagtagcattcaatcgtttgtccgtactcgctgtaagttcaacagatcgaacgacgcgcggccagtgccggtcggaaattccagccacccccgccgcaatgatgtcgaattgatcctctgtgtagatcttcgtctttgtccgatctaggggtggacgaccacgtcgctttctgctcgattgaagctgaacaacctcagccggtcgcttgtggtctgcgccgttgttcccgatcaccgaaactgatgtgacgttcatacacgttgcgcctccaacgcatgttgtgcggctccggtctgctggtggcagatcggccgagagggtttcaggctggcggtggatttcgtttggtcttggggttacagcagctctgagcatagcaaaggggcgagcaccgtcgccggtgactcgcccctttccagctcggcagcggcatcagcccgactggtgggaaagatgcctgcgcaaaagcctagaattctatggaaaatgcttggtcgctgggaaaagataactctttgaagagcttagctaattagatatctctcctgggcaccaacacacagccaagctcctgatttggcttaagtttcgagcatcgaaggattttccggccgcccactggtacacaggggtggtgcacaatggtgctttgcatggctcgtccaacgcggcgatccgggtcgaacaatccttacttccgcaaacgtgttcccaccgacgttctccgcatcgctcgcggtcagtccgtggtgttcagatttccaggagaacagccgggcgatcctgaggtcatctcaagggtgacaatcgccccgatcatcaaggtctcactccggactcgggacccggcacttatccgcttacgccatggccttgcgctctcgcaatttgagcgcatgtgcgaagcctaccgcgaaggaccccgaccgctcacccagcgccagatcgttgccttgtctgggctaatctacaagaggatcagcgagttgttctacgacgatcctatcgacgggaattggtgggagacggtcaaggtcgtcgttaatgccgctctagaccatccgttagacagcctccttatcggtgaagatgcaagagccgtagcacgtctacagcggctggaacgctatgctggaccgatcgtggacggtgttttgcgatcagaaggtgtcgtaaccgatgctgccagccgcgctaagctactgatcgaagcagcgaaagctctgaaagaagttgccgcaacgctcaagaggaacgcagaaggagactaccgacctgacccgaatgctgagcgctttcctccgtgggaaggctggcgtcccagatcgccaaattctacccgaggctcgatcaccttcgatgaactctttgagcgttggcagagagagaccaagcccgcatcgagcaccatcaccacttggc

SEQ ID NO: 3432 - DNA, 23279 bp, synthetic construct
  source 1..23279: mol_type = other DNA
  variation 14889..14898: note = note, n is a, c, g, or t
  misc_feature 1..23279: note = Synthetic
  variation 2221..2320: note = note, n is a, c, g, or t
  variation 15339..15348: note = note, n is a, c, g, or t
gatcttgttccactgcaccacagacagttactaacatgctcatacggtctttttcagcaagttccggtgtattaggatgatagtcaagtaaattagacaaacattcagatgctggtcttgccaagagatcctcaacagtccaaggtcccatacaccgagatgcctcccttctccagtagttcagatctgggtgctctctcggttgaaactcaggatactgtgaccggattttatccagctctgctttaagcaaggaacactttggatcagcattgtgcagccattgaaaccagttaaattgatgatacgctgatcgtgcagcgccgtcaccgggtatttctactggtgcctggtattgggaaattgcttgaattagtgcttttctttgctggctgccagcttgtggatacacgtcggcagccatgcgaaaaatctcgtgcttgccttcgtattcgttgacatcacaatgttccagtaaccaagccaccttgtcgtcagcagaaaggtcttgcctggcattcgtagcatggattgctagacgacgcaataagggtggatcagaactgatgaaacggttgcaccaatttcttacagtcactaggtcgttaatgactagccactcaaagcaatctcgtactgtatcaataatagggtcgatcctacgaggatttccgtcttgctcatgggattcaatcgccgatctatggaagctgtcgtcatccattctactattattttgataactccaagcaacgctcgctgaatggcgttgctccagcctcatggtggctcgctctaatagtgtgtagacaatctttggtaagttgggttgtagggactcttcccatagttttttcatatgccaattccaaagatcatctctgtgcttataatctggcaagaaccaaaccagtcttgcagtgatagcgtcatacacttgcaggaaactctgaagcacattggccttaatgcagtgttctgctagacgccatagatagtattcgtagccgtcacgcacagagtttgatggtgagtactcatcagtactcacaggaatacagttcatcaagatatgcacccattgcgagagcgtatgtgggtctagtgaattatctttaacataatccagttgaaagacaaagcttctccataaatgacgattcagcttcccataacgacggcagatcactgagaacaattcatcagaatgagttctggcaaaccggactgctaaccattcacacagaatcctgtcttgttcctcaagctctccctcagcgaaaagacgctttaagtacccccggtcatcaagccagccaatccacttgggagacgtggcagccctgacaaagaaccgtgtgagttccacactcgtcaaggcatgatcaatggtgtggctatcttcaccatcgatcataggcggctctcccttagcaatcccggcaatttcctgctgccagccaatgacaccgcgacgcctaaagtctgccaagccttctactcccctgtctaaaccagtgaagtcgtctttattttcttgaggaaacacaatgggttcaatacccatcctacgccaacgatcaagatcattacttgtgctgcccacaagcgcaaaacgcttttccccaccatccggcggtaaggatggcgtcaagtaggtcataatggtgtcattgtggctgtagccgacgaacagcacggtgtggttggcaaagagagaaaccagaaagcggcgcgcccaaccgtcttcttctgtgaggtaagcgcgaccaaaatcacgatgggtcagcaccatctcctcgggctctttgacagaaccatggagacgaacgatgcccttaaaacgaatgcccgggggcaacgccggagcctcgaacaccttgggcttgttcttgaacaggtcctctacctctgctgcccgctcaaacaggcaatcaaagttggtggtgacaacccgcaccggatcgtccttttcctgaaaaagacgaagcaggttccgatggagcgcattgggtttcaggttatccggctgcaaagtctcagtggcccgctggtgaaccctgacgccatcctccttcagccgacccaggaattggtcgtcggtttcagatgccgtaatggatttaccagtcccttcagccaccttctcagccagcttgcgaaagctgggcagcctggccggcgcacccatcgacacgccagcgccagcaaacaccaccannnnnnnnnnnnnnnnnnnnnnnnnnnnnnnnnnnnnnnnnnnnnnnnnnnnnnnnnnnnnnnnnnnnnnnnnnnnnnnnnnnnnnnnnnnnnnnnnnnncacccatcgacacgccagcgccagcaaacaccaccagccgcccatcccgaagagcgttcagcagtgactcagggaagtcaacacctccgatcttcatagcgcttgcgctgtctagcttagttggcataactctactacggtcagccgcctggcagggcctggggcacggatattttccggctgatgttgcccactgcacacccgccgcttgcaaatctcccaatcctcggccaacttgcaaaatccaagtcctggatcagcggaccagggaaagtcccggcttccccatcgaagtcattgcctcctccttcctcattcccacgaaagcgagaatctatctattggcccgccatcagggagataaggtgctctagcgtgggtgctactggtcactggctccctggggggttgtggcttggaggctgcggggtgtcatcgctgacaatggattcccgctttcgcgaaaatgacgggggaaggtgcgggaatggggagatggggacacggcaacacgccaaccccagcaaacaccaccagcttctcatctcgaagagcatccagcaatgccggaggaaaaacaacgcctttgatgttcatggcgcttcccctcccgggcttgccgatgctccttccaccaccgcgatctcctcggttgtcagcccgtagagttgataaaccagacggtcaatttccgcctccagtgcgctggtttcggctgctgggttggtggctttggcttgcatggcactagccacgagtcttccgagttgttcccggtcagtggccgtcattagcgggatgggcaactgctctaattggtagccttgtacatgattattggtggaagtaatgcggaagaaccaatccataaatctggagttgagcaatgccagaaacgccttgttgtgggcttgattccgcagttgtgttttgttgacggaatgaccacataggaagtctgttggcggcttttcagccaagccgaagtgcagacggcgaatgtcgttggtgccagtgacttcctgcgaaatgaggaaagacccttcccgattagctttaacctgctcccgcatgaaatcttggtcacagtactcgatggcagtactgtatttcaggatgaagcgtccgacatggcgcccccgcagcaggcgtactttggtcggtttgtttgagaaacacttggcgtgcgtggtcaggttcaaatctccctgggcgatgctggcagcataatccttcagtggctttatggtatcggcagcggcgattttctccaaaatacctacgctgcccgcctcgatacgcggaaaacaacgcaaagacgggtacaaattttcaattgcagttctggtgattggggtgaagtttaaatcgatgatggtgtgggcatcattgcccactgaaatcataattggctggttgtcaggttgagatttgacgaattggtagatgcaagttccttgcgtcacactctgaaaaaccttagctcccggagtcggtgccgctttcgggaactcaatgatgcaccgcaagcgtgtgtgttcaagcagcagtcgtcgcgtctgggcggatgacaagtcgcacatcaagctactctgtacgatcaagatagctatgctgtccttcttacataagttatatgactgctccacgaatagtttgtacagattctgcttgcctttgtcacggccttctgagaacggaaactgggctttggggtacgtccccttcttgacttgctgatacggcggattcccgatcaccacgtcaaacccgtcttgattgccgaacatgtatttggcgtcaaaccagtctgcttgggcgttctggtcgtaggggtcccagcgggagattttctcggcgtcgctgtccgccatgccaatgtggcgcagttcgctggccagggcatcccgcaattcccgatcttgctgccgggtgcatagtttcaggtcccgcgtgttggcgtgaaagtactgttcccggctttgccgcaggtcttgctccagcgtctgggtgcggggtgacgtgagcacgccttgggagttgtccagggccagcagggtgttggccgccacaaaacgggtttccaggttgggcaggggtttgacgccgtagttagcgctggggtcgttgttgggttgctgctcaatggccagggagataaagaagcgcagcttggcgatctggcaggccaccggctggatgtccaccccgaagacgctgttctggatcaggtagagcttgcgcccgaaatccccggaataacgttcaaaggtctggctgatgtccagcagttcggcgtcccgctcctgttggtctttggtctcgaatgccgcgtttgccctggcgccggctcgctctttttgcagggcttgccagcgggtgttgtccgggtcgaggcgttgcagggccagggtgagtttatggaggatgcccatgggaaaggcgccggagcccacggccgggtccagcactttgagcccggcaatggcccccacaatgcccttggcttcgccgtcctcaaacagttccctggcgtcgttgaaggcgtcttcgtagtccagcaaatagcgcagacgctcttgcaagtagtccctgtctccgtcgtggggtggcgcctttgcggccagggccgccaccaacgcctcctccaccatggtgtccaccacgaggcggggcgtgtagtaggagccggtttgccggcgggcggtctcccgggtttccgggttgatggcggccaacaggttctcgaacaccttgcccagcagttccgggtccagggccacctcctgctcgatgggggtgttttcctccacggtgaatttgtagcggttgaagatgctcaccaacccgtcagcagcaaagaacaggcggttgggaacgctcagcaggttgcgatggccgggattgtcggagaagcagtcgatgcggtagccgccggcgctggtggcgtcgaagctgtccagacaatcaaagaggccgccgttgataaagggtgtttgtttgaagagcgccagtagtcgttcagggtcggccatctccttctgatgacggtagcgggagaagtcccggtgcgttgtttgctgcctggcgctgaagccacgctggctgatctcggtgttgagggtggcgaagaacaggttttgcaacacggcgcggtaataggaatcgcctttggccgggtcgtagttcttcagcagggaacgcacttgttcttcaatgaacaactcctcggccaccagccccttctccttgataaaccacacgaacagcagacgggtgatgaggcgaatcacgtgctcctgcggcggcagattgcgcctctggttcgcggggaatctggcctccgccacgacgcgattgaaccagccgaacaggtctttatagaaacgtttgttgagttcctgggtgtccaggctggccagcagggccgccaacaggccgtcgaagttgccgggcttaccgtgcttgcccatccacgccaggcgatgggcaagggaaagctccttcagaatcgaccgatgggcgcggtggggttgcctggggtcaatgtcccgaatgagagacacgcttcccagtacgcggcgctgatcgtcccgtttgtggcggcggcgctgcacaaaggccagggtgaccaggccccctgaaccatggaacagcaggaaggcgggcatggggaagcgcttgttgatttccctcgtcaattcggcgtattggctgcgggaaatgctgggctggttgagttcaacggcgaggaaaaggtagcttttgttgatgccttcgtcaaagtttcttgtatcaaataacccgccctggctgccgcctgaacattcttcgttgatttcttcatccgtcacttggaacaggatatgaatggctgctgcgtaattgcggagattttgctccgatagtgtgccagccgtaggcgctggaaactgggcaataaaatcttccacccggccactctgccccgccaacacccgggtgctgcgataacccaaagcgccaaacagtgcaggagcgacttgggggagatccccagcggccagggaagccagggcggctttgacggcggcatcgggatccgggttccctggcatcaggttgcctcctggatcaccagccaggtgaccagttcaaaatccccggcgccccgcggcgtttccgctgcccgcagcagcttgaaaccggcgtcgccggagcggcccaggccggcggtttgttggcggtggtgggcttggcgaatctgggcaatgcaagcgttcaagaggctctcgtaacggtccatgcggcggccgtttcgggtgtcctggtcgaagcggtggcaaagccgggtgatgggtcgggtttggccggcggctgcggcctcgaaggccatgagaatgttccgggcgctgccgcaaccgtagcggacggcgccgttgccttggacgtgaaccaggtaatggggatggagggggctggcggtgcggggctgcttgtccgggttggcgttgcgttgccggaggcagaagatcacgccgggttgagccttgggggccttttgggtggcgtcttcggtgacggcatagacgccggaaggcatggcttccagggcggcccggttgcgctccaggtagcgcagaagctgggtgaggaaatcatccagggtgaagtccgccaatacgggagcatcgtccaggtcctccaggtgggggacttcctcccggagttggagaagctgggcgtcccggaagcgcagatcacgggccatgtcctcctcgctgaaggggtcttcgtcgccgctggcggtgagatccgccaaggccatgcgggcctgcacccggttttgcagacgcaagtaggtttccatgtcctccgtgggccagtagtgtaccatccgcacggacgggctgcggctgccgatgcggtcaatgcgcccgaaccgttgcaccagccgcacaggattccaatggatgtcgtagttcaggacggtgtcgcagtcttgcaggttttgcccctcggagatgcagtccgtggcaatgagcaggtcaatgtcacggtgggcgtccgctgtggaccgttgacgggccgtgggggcaaagttgctcaagatggcgttgaaattgttgggaccggccgtggcgtgggtttcatcaccggagaccatggccatggcgatgcccagctttttggtcaatgattgcaggttgtcgtataaatacttggccgtatccttgaaggtggtgaacaccagcagcttgcggttgggctggccggccttgcggcggatgcgttgcttgaggtcttgcagcttgccgtcccgctccggcgtgacggcggccacccgctcccgaaccgtggacaacatggccttgtcgtccttgaggtgggatgtccagcgggggaggtccagttcagccagccggtagggatggcggctccggttcacagcaaactcctcgtcttcgttgtcatcatcgggcagggtctctccagggatcaggccatgggtttgggactcatccccctgctcgtatcgttcaattttcttcagcagattatcgatcttcttgatggtgcgctccatggtgagttgcagggcgtgggcggagctttccagccgtttgagcagattgacgcgcatcatgcccaccaggaagcgttcactgtctttctggttgaagttgtgcgcctggcgtttgctctccaactcgtcaagccgtcccggatcaataacgtaagcgctgggctgatacactgccagcgtgaacgcgccaatccgctccgcaagatcctggtaggaaagttcttcgttgatgtcggtgtgggggtacacgttctcgggttgggcgcgccggggaaaccggccgatgcgctccatttcgtcggcgtagaattgctcgatctggcggcgggagcgggagatggacaccccgttcagcagccgcagaaaatccgcccccaacgagtccaggagttgagccttgtcccgtctcttgccctgggattgctgctgttcccactgcttgaactctttttgtgctcttgccatcaaggcgcgaatgcttcccacccccaggctgtcttgaaacgcctgttcccgcccttcggtcatcaagtagatctgattgcgtagatccatcagggaggtgttcaccggtgtggccgatagcagcaacaccttggtttgggcgcctgcctggatcacttccttcagcagacgttcatagcggctactgccgtcgttgcggaagttatgggattcgtcaatcaccaccagatcgtagttgccccactggaaatgggccaggtcaatgttgccggagcgtccagagtcgcgggacaaatccgtatgggccaggagtgtataaccaaaacggtcctgggggaacgggttttgcggatggccgttgctggcgggatagagggaccagttgtcatggagcttgcgggggcacaacacaagcacctgctgattgcgcagttcaaaatacttgatcaccgccagagcagtgtaggttttgccaaggccaacgctatccgccaggatgcaaccgttgtgatccaccaacttggcaattacgctcctggcgccgtcctgctggaattgatagagcttgttccacacctggctgtctttcaagcccgtggtggtggcgctgtcgtccccagcctggcgcgctgcaatctcctggcggaaaagttcgtagagggttttgtaatacaccgcttcgggagcatagtccttgcccatgtgggccagggcggccagcacctgctgtttcacgtccctggtgtacccgtcgtccgcccaaagccggtcgaaccagtcttgcaactcctgtaccgtctcccggtcctcggtggccagattgatttccaggttgggctgatcgcctgcccccaagcctcgcctggtgaaattggaactgcccaccacccctgtggcgccatggggcgagacggtgagatacatcttgccgtggagaaaattggcgcggctgacggagcgaatctccaccgtgctttgccgcacccatgcagcacaacgccgggcaagggccttttgcgccaggacgtacctgggttccaagccgccctcggtcagttcaaacgccttgggctccttctgccccggatcaagatcctccaccgagcccggatcgccaaacaggaaccgggtccggcccacgccctccaactggtccgccaggaggccatagccgtggatggtgaagtaggcggagacaacgctgaagtcttccccatcggccagggcctccctcagataggccaccaccgtgccggtccggttgtccaggacgtggcgttgaccttctccccgttctggagggcagggattccttctcaaattcggcagactacctccctgggtattgcgccatcaagcatcgcacatccaacaccgccctgagcagcggggcttggatcccagggcagccgcggtcatcttctgaaacctgtggcagctttaccgcgacatggactgatgcaacaatccctcgccctggggcaagggtttggattgccggcaattgaccttgggatgccgagcccacacgaagggtcgttttgctgcgaaaagcggctgcaagcagccggtcacaagcaggaccccttctcggtttgctacatggaggatggtagcattctccttcagcttgtgcaagggcttgctgcatggcgttggtttttggcttcgacattggcaccacgtccattgggttcgctgtcattgatcatgatcctggccagggaaccggcaaaatccatcggcttggggtgcgcatttttcctgaagctcgcgaccccaaagccttggtccccctgaaccaggaccgccgtggagcacggatgcggcggcgccacttgcgtcgtcgtcgccagcggcgccaggcattgggcgcactgctgcaccagcatgggttcttgccaaggcgagattcgtgcgcgtggaacagggtcatgggatctgacccttacctgctgcgcaaatgggccttcaatctccagcaggcgaattcccatgagtcacgtagccaagtgctggcggccatgcaggctgggcaagccaagctccccgcgtgggccttggagggtgagcgcctgtctccccatgcggtggggcgggccatctatcacttggcccagcggcggcatttcaaaggtcgggacagtgacgagattgctggtgacgacgggaccgctacgcagaaccagtccgatggcgatgacgcggacgagcagaaagcaaagtcggttcgggagcggaacgtacaagctcttgagcagaagaacatgacccttggcgcctggctggcagaccgaaatgcccacgagcgcaaacgaggggagcacgtcacccgtaaagtcgttgaggatgaatttgaccgggtatgggcgccctgtttgcccaatgaccggatcagggctaaggtgcgcggggccatttttgatcagcggcctgtcttctggcgcgtaaatactcttggcgcgtgtcgcttcctgcctgagaagaaaggtctggacctttgtccacggggatcctggctatcccagcaacggcggatgctggaaaagctgaacaatctccagtttgtgagcccggagcagcgctgcctggatgaagaagagcgtcaagccatcctggccaagctgcaaacccaggcctccatgacatgggcaggagttcggaaagcgcttgctcccctctatcgagaacggaatcagagcagagaggaaaagtggctgaaattcaacttggaacagggtggagaaaagaagctgcttggcaatatgattgagaagaatctggcggacatctttggtgaagcatggaaagatcatcctcatcgccaggatatccgagaggctttgcatgagcgtctccgggaagcagattacgggacttgcggccggcagcgtgtcgtcatccgtccggccaaggagcgcgaagaatggagggaacatgcggcacagtacttcattgaaaaatttgacatatcccatgagcaagcggaggaaatcaagaaattgaaactgcccacaggttgggagccttactcgactgaggcattgcagaagattctccctttattggaagcaggggtgcgatttggtgaaatcatcaacgggcctgatctggcgtcacggcgcgaagcaacatttcccagccatcaagaacaaaccaatcaaggctttgatcgcctgccaagcccaaagaacaacaaacaagagcgggagcacattgccagcttacgcaaccccactgtggcccggacgcgcaatgagctgcgcaaagtggtcaacaacttgattgacatgtttggcaagccggacttgatccgcgtggaactggcgcgggatgttggcctgtccaagcgggaacgggaggaaaagcaaacggggatgaagagccaggaaaggcgccgtagtgaggcccgtgagaaactgagaaaagcagccgaagacgcaggattgcccaccttcaaaccttcgcgcaaggacattgagaagtggatgttgtgggaagagtgtggccatcggtgcccttacactggtgaaacaattaacttcgagaaattatttgtcaccaatcagtttgacgtggaacacatctggccacgctcccgttccctggatgatagttttcgcaacaaaactctatgtcacaaagatgcgaacatccagaagggagacaagaccccatttgagtgctttggcaataataaagaagtatggcaacacattaaaaaccgcgtcaataaaatggaagctacgaagaaaggaagcattggcatgtctcgtggcaagatcaatagattgctatcggaaaaatctattcctgaggattttactgcacggcagctgaacgacacaggatatgctgcccgagaggctgttgcctatctcaagcagctctggcccgaccaaggatctgaaggaaaaggcaaggccaaggttcaagccgtatcaggacgggttacggcacacctgcgtcgactgtggggcttgaacaacattctgggaaataccgacaccggcaagaaaagccgtgacgaccatcgccaccatgctgttgatgcgttgacagttgcctgcacacaccctggcatgacgcaaaagctctcccgctattggcaagataaggacaatcctcgcgcccaagaaccgcaactcttgcctccttggaagacaattcgcaaggatgctgaagaagccgtagacgccattatcgtctctcaccgcgtccgcaagaaagtttccgggcgacttcacaaggagacagtttatggtgatacgagtgaggaagagacaacacgtaaagtgacctaccaattttttgtcacacggaagaatattgaagcattaagcaggaaagaattgacagagcagatccgcgacgatgaggtagctagaattgtcagagattgggtggacaagcatggtggcgatcccaagaaagcttttcaggactcctcttatccaactcttggagatggtggtccagagattcacaaggttcgcttgctcgtgaagcagcagattaaattgatggcaccagtaaaatctcctaaaggctatgccgacttggatggcaatcatcatgttgctatctatcgcttatctactggagagatagattacgatgtagttagtctgctagaggcatcgcggcgtttgtcaagaagagagccagtcattcagcgtgagcgtagtgacggagcaaagttcattatgtctttatccaaaaataactcattagaactcacacaaaacaacgaaaccaagatagtgattgtcaaagaaattcggacaaatggtcaaattgcgataactgatcacgaggacgcgacatcgactaagcattaccctggatcaacagctatcattaacaagtattgtggaaaaaaggtctctgttgacccaatcggccgggttcgccctgccaatgactgagcgcctttccaatgctccgtaaaacagttgagttctccacgcctggaacacgcctctcggttacctatcgccaactggtgatccagaggcctgatctccccaaggcaaccttgcccattgaggatttgggggtggtgattgtggatgacgtccgcgccacctacacccaggcggtatttctggaactgctgaacgcgggcgccacggtgttggtcacagggcgggatcatctccccatcggcatgatgctgcccctggatggccaccacgtgcaagccgagcggcatcgcgcccaggtgcaggccagcgaaccggtgcggaagcaagcctggcaagccattgtgcgagccaagatcaaccagcaggctgcagtgctggcccggttcaatgaaagccacaagaggctgttagccatggccaggaaagtccgttccggtgatccggataatctggaggcccaggctgcgcaacggtattggcccctgctgtttggcccaggatttcaccgcgaccgggaggccgagggcgtgaatgccctgctcaactacggttatgccgtgctgcgggcagcggtggcgcgggccattgtggccactggcttgatcccgtccctcggggtacaccatcgccaccgcaacaatccgttctgccttgcggatgatctactggagccctacaggccctatgtggattggcgggttcgcctgctggtggatagtaatggcgccgctgtgcccagggtgtccgaacgggaaacccgtgcggcattgctttcgttactgaatgaaaccatttgtgtggggcagcggcgtgaacccctgttgctggccttgcacaccagcgcggcctccctctgccgcaccctgacgggtggggatcgcgccttgtgtcttcccacagggttgcctttgcagttggactcccttgaaggagcagaaccgggggatgactagcctgtgacgtcggggccggtgcggcaaattccctggggatggcgttccatgtgggtgattgccatgttcgacctgccaacggatacggccaaggcccgcaaagcctatgcccaattccgtaaagccctgttgcgggacggcttcaccatgatgcagtactccgtgtacatccgccactgtgcctccattgagaacgccaagatccacgtggcccgcattggccggcgcgtcccctcagcgggagaagtgcggtttctgaccatcacggacaagcagtttggccggatcgagacctacatgggaaaaatgcgccaagcgccaccagcttcacccgcccagttggagtttttctgagcttgaaatggatgaaaccagtggcgctgagcggcttttggggatcggtagtgtagcaaaccgaggaagggccgcaatccgcagctgtgtcggtccttgccgtcgtagcggatgcagtgtagcaaaccgaggaagggccgcaatccgcagctctaagtccctgctgggcgctggctccgagagtgtagcaaaccgaggaagggccgcaatccgcagctgcatagaaatccggggtcttctggaacccagtgtagcaaaccgaggaagggccgcaatccgcagctgcatagaaatccggggtcnnnnnnnnnnagtgtagcaaaccgaggaagggccgcaatccgcagctgcatagaaatccggggtcttctggaacccagtgtagcaaaccgaggaagggccgcaatccgcagctgttgcgtcctggtcaatcgccgccgcctctagtgtagcaaaccgaggaagggccgcaatccgcagctggcgcctgctgcatctggtggaacaactcggacgggagtgtagcaaaccgaggaagggccgcaatccgcagccgagcgagagaggctgacgaagccaggaagagtgtagcaaaccgaggaagggccgcaatccgcagcgttgcgattgccagtcgcccaagcttctcagtgtagcaaaccgaggaagggccgcaatccgcagcggctagccaccactggctactgcattgctgagtgtagcaaaccgaggaagggccgcaatccgcagctnnnnnnnnnngagtgtagcaaaccgaggaagggccgcaatccgcagcttgttggtgtgggcgccgatggcaaccctgagtgtagcaacaaagaaagggtcgcaatcgcagttggacatggttatggtcccgccttactggcactcgggggaaactgtgccgccccaggcaggctgaggctgatggttgtgtggcccaggttcagggtggatgcccccagccaggcgcggcgcacgacggcaagccccacactgcctgaccccagggccagccgggaggtgatcaccccggcgcgggcgccgtcttctccctggatcaggttgtcctcgggcaaggcttcaaggggggtggggctccgccagaggcgaagctgttgcttgacgccgtcataggccaccaacctggccaacacctcctgccccaggtagcaccctttgtcgagggccacggccccggcaagacccagttcaaagggattgaagttgtcgttgatctcgttgggccatgccggtatcccctgctgaagccgcagcaactccacgtgtttggctgtcagttgggggcagcgctccagccatgggggtagacacgggaaatcctccggcagcagcagccgcaagcccggcacgccgtcgccaaagtccgtgccccgcaccagcaacgcctgggcatcccccagggaaaccggaccccagccggcaccgccggcctccatggcgatgccctcggcagccaccagagcggcggcggcctcgcccaacagactcacctgccgggcctgggccatgggcagcagggtgacctgatccgcgggaaacagatggcgatcaaagcgctgatgcaacgccggcccgtcaccggccagcaccatcaaccgggcggcgtgctgggtcaccagcacgtccagaagggccgtgagtcgcgccgtggcggtcactgcgcaactgcgccgcagatgaccgggtggggcgctgcccaggtcctgggtggtctggtcatggagaaaacgcaggctatcgacgccggtcaggcgcagaacccggacggtccggtccgtccgcaccggccaggcgcggggctccggtagagcctggcccagccagtgggggaagggcagtggggcggtcatggctggcgctccaatggtgcagggtgggtgctgatgtgctccagcaggaagagggccttgagacgcagccccgcagcggccagggcggcgtgccccccctcctggcgatccacaacggccaccacctcctgaacggcatagcctgcctcccgcaaccgctgcaccgccttgaggcaggagttgcccgtggtcaccacgtcctccagcaccgtcacccgggcgtctggcgctgggagcgggccttcaatccaggcgccggtgccatggcccttgggctccttgcgcacgatgaggccatccagccgacggcccgccagactggcagccatggccacgcaactcaccaggggatcagcccccagggtgaggccggccacggcctgggttccggggtggacctgctccagcagcagcggcgccagcagtgtggcgccggcgccactgaggctgacgggtttgcagttcacgtagtgtgtactgcgctggccactggccaggaggaaactgccacgcctgtaggcctgacgggccagcatctgccgcaaggcttcacggcgccgggcggatgcggatggggtgttgaacagtggagcaggcggctggatgtccatggcgccgagaggggagcttctatagtggccgagaggggagcttctatagtgaaggttcacggctgacgtgatggccccttttgctccactgctgcccttgctgctgagcgccatgcccccgtcagcattggccatggctgcggattgtggacccacgccaccctctcaagccggcgctgttccgtgggtccggtcctggatgcccccggcgttgccccaccagttcggcctcctctcctctcccaacgctcaccagaacacagccccggagagcggtggggacgaacaaccgttggcggccagaggggaggggaatgaccctgcgttttgccccctctagtcggttcagcgcgtctacgtcacgtccacatcacaactccgatacgtggcggcctccgccaggtgttcggcttcgatgcgttcggaatccgccagatcggcaatggtgcgcgccacccgcatgaggcgatcaaggctgcgcatcgagaggccgagacggtcggcaaggcgatccagcagatgccgggcggcgctgctgagggggctgcaaaggcgcaactgacgaccgtccaggaggcgattgtcaaacagttggcggccaaaacgctggctggtgttccggcggctgacggccaggcgctgccgcacctgggcggtggtttccgcggcgacgggacggctcacctccgtgggcgagagccgtcgcaccggcacgtggagatcaatgcgatccagcagggggcctgacacctgtcgccaatagcgacggcgcacggcatcgccacaactgcagctatggaccggatccccccaccagccacaggggcaggggttggccgccgccaccagttgaaaccggcaggggaagcgcagtcgctgcccggcccgggcgatgtcgatggcgccctgttccagaggttcccgcaggtggtccaggcaatggcggccaaattccggcagttcgtcaagaaacaggaccccgtgatgagccaggctgatttccccgggcagggggtggggtgagccgccccccaccagggctgccggggtgcagctatggtgcggagcgcggaaggggcgctgactgcgcaggcccgcttccggctgggcaaaggccaccgaatggacccgccgcaccgccagggcctcctccatcgagagcggcggtaacaaatcaggcaggcaccgggccagcacacttttgccgcagccgggtggacccaccagaagcatgtggtgcccgccggcagcggcaatttccaaggcccgccgcccgtggctttgcccctgcagatcccttagatcaaaaccgaactcatccgccgttgtcgagaaacccccttgatccggggcgggttgcgcctggggattgttcagttgttcctgggcctcgttgagatccgccgctgccaggacggagagcccgtcaatctgggccgcttcagccccgttggccttcggcaccagcagatgcctggcccctgcaacctgggccgcctcagccatggccagcaccccacgcaccggccgcaggctgccgtccagccccaactcccctgtggcccagagtccctccagccaggcgaggggaatacgcccagcggcggcttgcagggcaagggccatgggcagatcaaagctggggccttgtttgcgcagggccgccggagccagattcaccgtgagacgagacaccaacgggcgctggccgctgttgcgcagggcggagcggatccgctcacgggactcctgaaccgccgtatccggcaagcccacaatctgaaaggccggcaagccggggcctaaatccgcctccaccaccacgggacaggcctccaccccaacaatggcggcactggtgcaacgggcaagcatggggttgagcggtcaagtgtccggcccagtgttcccacgcttcggcccagcgctccatgggaagacgtcaccccgacacccggcaacgggccagggcgcgggccaggctgggagccgcttggctggcccgtacagggcgccatttgtcctgcacaaactcgatcatggttgctgtgtagccaggacccacaggacgaccactacgctccgacggcacaacagcatctttcaccacagaagaacgtgattggcgcgccagattcacaatggtctgcttggggtcgtccacctcctccggcctggcagggattttcccctgggggatggacagataccgagccaacgccccccgatcagccatgaaccaggcctccacagcccggactgcgatgcaaacatgcagtccgggcgattgtccatccgggaaggcccggatcatgtcatggtggagacttggcgcacagggcttccggtcaagatcgcatacaacaaaccacggcaagcgttttgcactctggttgtaactcggcagtttcttgagcaaattgccgacaccgttctgaacatagatggttccacattgaatcccggtttcagcaaataatttcctgacaacagcatcatcaatgattccctcaaccacagcatggacaggctgattgatgttcatcttgtgaactccctagtctgccatatgaaaccgatcaacttgctccggggccacggctggcatgagaatctcgccaagggacaactgcccatcttcgctgcagagggaagcggtgggttgatgctccgtggctggaatcatctccgtaccctgggggccaggtttcaggagatgcacttcgtccaggccgatgccaggatcattaaggaggtggggtgagtgggtggtgatcagcagttgccgtggcgagcggcgatacaggcgcgtcatcaggctgggcaatcggctgaccaaggcggtatgcaaacccagttcgggctcctccagcagcagaggtccccctttctccgccagggaccagagcaggccaatgaggcgcagggtgccgtcggagaaggcccgttcatcctgtttggccggacgcttgcgccagtggacaaagcgaacctgtaaatgccagtgccccccctcgtcctgctccagggtgaggtcctgaagctggggaatggcaatctgcagggcctggctgattttgcggagccgggcatcacgggtgcgctggggcgtagcagcaacggcctcaagaaagtcggccccgaagggatcgttgcggcgcccggcggaacgatccagatctctcatcaactgaggaacaatgtgtaaatagcggatggaggttagaaattccgtcaggggccgaaatttctggttggccaccacttgctccaaatgggtttgccgcagccggtcgggatcatctttatcttcccgttttgggcggcgcagcacctgacgcccttgagcatccgttaccctttccgccaccacttcgggcacgtgcttttgtgggtgactgcgaacctgcagcgagtacttccattgctctcgctggtttctgttgcccacggtgacggccagcgtgaaccctggcggtcgccgggcatggaggctacgaattgcccccattccaccccggctgccgatggcggcttgcaagcctttgtccgctgtatcccgcagaaagcgcagggcatccagcacgttggacttgccggaagcattgggacccagcaaaaacactcgtggggccaggggtatgtccacctgtccgtgaaagttgcgccaatgcaccatctgcaaggacgtgaaaaagagcccaccgctttggccctgtcgcttgtcacgggggacttcagggttgcgggtcgccatctgttcctggtgcctggttcttctgagggtagctggtgggcgctgctctggcggctggggttggcgggtaagataagggccaccccgcctggccttctatcgcctggcacggttcttacttctgggcaccagggaaaccaagagaagcccggaaccagactggagcatgtgcccagaggagagccgctcctgatgccactaccgtgccattgttcagagaacggctgcgaaggcagaggttatgaagagctgttccagatgtttgatgcctccctcaacgcccaaggcctgaaagccggtggtggccaaatcattgatgctacccttataccagtgcccaagcgacgccatcagcgcaaggagaagaaatcaagcagggcaaggtgcccgaggcgtggcaagccaaccccaaccggctacgacagaaggatctggtgccaggtgggtgaagaagaatggggtgagccactacggacacaaggacagtatcagtattgaggtgacctggggactgatccgctaagtggtgacccctgccaacatgcacgccagccaaatgcttgccgggctattggatgctgagaatagggaggccatggtgtgggcggactcagcttatcaaagcatactggtggtgttttgaagggagcaggctatgagagtcggatacaagagaaaggaagtggccggcatcctctggatgctgctgccaaggaaagaaatggggaacggtccaagaccggttccagagtggaacatgtctatgctcagatggagatggttatgggaggcaagctgacaggttgtattggtttggccagggagaaggcctggtggtgtttggggaatctggtgtttaacgttctcagattgatgcaacataagtatggcttgataagttcactactgatctaatctgtccatgggatagtgggaagatcgtctcaacactgccttctcaatgttagctgatatagatctgctgcggcaaggcctaacttcaagagagaacaggtcttcagaaggccgtgcagacccatggccatgtgcctttatctctatagcaacttcttctttaagctccatcttcctattcttcgtggttcctatttgatgccacacagatctaaagatattgaagtcgctgattaatacagcgagggcacttattttcggacaagtttttacatagtctatgactttttttccttggcaatcttcagatctacattcacattggcccttttctgctcaatcagcagaaaccctggccagaagcgctcgataaagctgccctgattgtcatcttcttcataacggccaacactgaaccgatccttgccaaagatcttaaagaactcgttgtagaaagtttgggtatctgcaatttccgggaacgtcgtgccctccccattgattttgcaagtgggttctccaacattgggggaagaaccacgtccaatggccttgcttgcactgcgccagcactttgccggtagcacgtagcaccatccagggcggcaacaaggtgtcgtgccgttacggacagtattatggctcacaccttccacagtgcccggtcccaacggcagtatggcttgggtcatccaatgcctggtttgcgtcttctcatctccacagagcacgacagcgtgatctggtggattcaggtacagaccgatatgtcctgcaccttatccacaaagtagagatcgttggagattttgaaatgccgttggcgatggggcggcaggttgaacaactggaaccatcgatgccctggccgtgaagcgacggcgccatttgcccaccgtgacatggctgatgtccaatcgctgagcgatcaccgtgtggaactctccttcagtccagaacagaacaatttgcgcacgctgcaccatgccgtgccccagcgggcgagagcgggccacggacatgggggacggcctcccctgcatagtatggactctatttccgggacgcttcactaggggagacgtaaaattgcctctgggactgcgagtaagtgcgagtaaggtggattatttgtccgcgttcggctataaagcaggaacccacctgaacaaggaggcagtctgccgaatttgagaaggaatccccgcccttcaggacggggaggaggtcaaggatccctactggtgagcggcgacgccgcgctggccgccagttggcgtgatcaggccaggctggggctggggcatggggcgttcctgctggtgttggcggccacggccactgctgcggtgccggggatttccgcagcgggcagcacaccggagagtcgccgtctcacagccgcagcggatggggagctggtggcgctgggtcccacggccccacggccccacggcctgcccccattgccggctggtgtctctccggccctgattagctgggtggtgctggagcagttgcgcctgacca

SEQ ID NO: 3433 - DNA, 23270 bp, synthetic construct
  misc_feature 1..23270: note = Synthetic
  source 1..23270: mol_type = other DNA
gagcaccgcggcgaggccgaaggatagccgctcagagatcgtggtctagcggcaaccggcggcgggcgtgccgtcggtgtcgccggaggatagccgctcagagatcgtggtctagcggcaacgccgacacgctgcgcgacgtcatcgagcggaggatagccgctcagagatcgtggtctagcggcaacgcgcgccagagcaaggagccgacgagccgaaggatagccgctcagagatcgtggtctagcggcaaccgctctcccatcgaccccggcgcgatccgcgaggatagccgctcagagatcgtggtctagcggcaactggaagtcgaccgttaccaagtccgtcttcaggatagccgctcagagatcgtggtctagcggcaacggcacgttgggcaggatcgtgccgttgcgaaggatagccgctcagagatcgtggtctagcggcaacacctacgacatcgcgggcgcttgtcctgataggatagccgctcagagatcgtggtctagcggcaacgcacgcagaacgagctggacctatgccagaaggatagccgctcagagatcgtggtctagcggcaactcgccgctctggtgggcggcaatcggctggaggatagccgctcagagatcgtggtctagcggcaacgcgcagggccacccgagatcgcgggcctcaaggatagccgctcagagatcgtggtctagcggcaacgcaccgccgccatgacaatcctgatcatcgaggatagccgctcagagatcgtggtctagcggcaactgatcggcgcccgtgtgttgacgacggcggaggatagccgctcagagatcgtggtctagcggcaaccagagctggccgcccctctcggcgccgaaaaggatagccgctcagagatcgtggtctagcggcaactaggcttggagcgatatccaggcggcgagcgaggatagccgctcagagatcgtggtctagcggcaacacccgctggcgccgggaactgatcctgcgcaggatagccgctcagagatcgtggtctagcggcaacgagatcgcagccgaggcgggcggctgctggaggatagccgctcagagatcgtggtctagcggcaacagcttggacaacgtctcgacgacgcgggcgaggatagccgctcagagatcgtggtctagcggcaacataccggctcacgcgggtgcgatggcgcccaggatagccgctcagagatcgtggtctagcggcaacccaagatcccgccggccctgtcgcgcggcgaggatagccgctcagagatcgtggtctagcggcaacgggtcggcgggagagcgcggggtcatgagcaggatagccgctcagagatcgtggtctagcggcgacccgtacgccatctggtggttgtgtagggtcaggcaggcccgaagcttgcgtccgtgccgcaggccgcgctatccgggaacggacacccgagtcatctgcagccggtcttgggccgtggcggcgtcagggccgcccgggtgtcgccgcggcccgggtgtcgccgcggccctgcccgcagcggaggatggacaggctgcggctcgcggccggactgacacggctcctccggcacagggcacccaaaggctatcagcgggagcgccgccggcaaggcccgccccgggacggcgggggccgcagggcggcccaacccccgctcaaggcgtgatcgccaccttgaggacgccgtcgcgctggttggcgaagaggtcgtaggcctcctcgatgcggtccagcgggaagcggtgggtgaccagcgggcgcgtgtccaggcggcccgaggcgatcacctgcatcagccggcgcatgcgctccttgccgccggggcagagggtggtgacgatcgtgtggtcgcccagtccggcgaggaaggggccgagcgggatcttcaggtcgctcgagtagacgcccagggacgacagggtgccgcccggccgcagcacgctcagcgcggcctcgaaggtcgcctgccgccccagcgcctcgatcgccacgtcgacgccgcgcccgtcggtcaggcgcaggatctcctccaccgggtcgcccttggtgaagtcgacgacgtggtcggcgcccatgcggcgggaaatctccatgcgcgcgggcacggcctcgacgccgatgatcgtcgtcgcccccatcagccgggcgccggcggtcgcgcagaggccgatcgggccctgggcgaagacggcgaccgtgtcgccgatccgcacccgcccgctctcggcgcccgaaaaaccggtcgacatgatgtcggggcacatcagcacctgctcgtcggccagcccgtccgggatgggcgcgagattggccatggcgtcgggcaccagcaggtactccgcctgggcgccgtcgatggtgttgccgaagcgccagccgcccagcggcttgaagccgtgccgggtgccggcgccgtcctgggagaggcagccgcacaggcaggcggcgctgtggccgctcggcgtgatggcgccggcgatgacccgctgcccctcggcgaagccctccaccgccgagccgagcttctcgatcacccccaccggctcgtggccgacggtcaggccgcgggcgacggggtactcgcccttcaggatgtggacgtcggtgccgcagatcgtggtggtcgtcacccggatcagggcgtcgagggggccgacgtcggggaccggcttctcgtcgaggacgatgcggttcggctcgacgaagatcgccgccttcatcttctgcgccatggcctcgattccttccgtgggcgtcgctcagtcgatgcgaccctagcggaagcggttcggcctggccttgatcccgatcaagccaagcgacgcccgacgccgatcacggcatgcggtcgggggcggtgccgacccgggcggcgccgctgcgcgcctccagccacagcagcagggcggcatggtcggtgcggcccaggtccatgcccttcatcagctcggcgtagccgtcgcgggcctgccgggtgaagggcaggtcgaggcccagcccttcggccacctgcagcaccgtctccatgtccttcagcatgatgcgcgagctgccgccgggcacccagttgcgttcgagcatcttctggccgtgcagctcgaggatccggctggtggcgaagccgccggtgatggcctcgcgcaccgccgccgggtcggcgccgccggccgcggccagcagcagcccctcggccacggccccgatggtgatgccgacgatcgcctggttggccagcttggcgatctgcccggcgccggcggggcccacccaggtcggccggcccatggcgcggaaggcgggcagcgcccgctcgaagtcctgccgtccgccgccggccatgatcgccagcgtggcggcgatggcaccgggttcgccgccgctgaccggcgcgtccagggcgctgcagccgttggcggcgtgcagcgtggcgtggtcgcgggcgagggccggcgggatcgacgacatgtcgacgaagagcgtgccgggccgcgcgcccttggccgcgccggtgccgccgaacagcacctcggtcaccaccgggccgttctccagcatggtgatgaccaggtcggcgccggccacggcctccagcgcgctgtcggcgatcctcgcgccggcggcggccagcggttcggccttggcccgggtgcggttccaggcggtgacgggaaagcccgcctgcagcaggttggcggccatgggccggcccatgatgccggtgccgagcagggcgatgcgcggggtgtcggtcatggggcggctcccttctcttgcttgtcttgcggcaggttcgacagggcgacggccacctgcccggccagccgggcgttggcgaccagcagggcgcggttggcgtccagggtgcggccggcgctggcctggtgcagccggccgagcaggaagggggtgaccgccggcccggcgacgccctgggcggcggcctccacctccgcctcggtcagcaggcgctccacctcgtcgtgctccagcgccgtctccgcgggcggcgggttggccagcaccagcccgcagcccaaggccagcgcacgctgggcgtcgatcagggcggccgcctcggccgggctctccacccggtggggcagcggcaggccgctgtcgcggctgtagaaggcggggaagccgccggtgccgtagccgaccaccggcacgcccaggccctccagcagctccagggtgcgcggcaggtcgaggatcgacttggcgccggagcagaccaccgccaccggcgtgcgcgccagctcggcgaggtcggaggagatgtcgaaggtctcgatcgcgttgcggtgcacgccgcccaggccgccggtcgccatcagcgggatgcccgcgaggcgggcgccgatcatcgtgccggcgacggtggtggcgcccagggcccggcgcgccagcaccggcgccaggtcgcggcggctcaccttggccaccgcccggccgccgcgggcgaagcgctccagttcggcgtcggagaggccggcgacgatccggccgtcgaccagcccgatggtggccggcacggccccggcctcgcgcaccgccgcctgcagggcgtgggccacctccaggttctccggccagggcaggccgtgggcgacgacggtcgattccagggcgacgaccggcccccccttggcgagggcggcggcgaccggcgggcggacgtcgaggggcgtcattccgggaagaggccctcgcccagcgccgccgtcagggcctgcagccgctcgttgcggacaagctggtcgtagggccgggccggcaccttgccccagaccggggcgggccaggcggcgtcggtcgtgaagcgggcgatgacgtggacgtgcagctgcggcgtcacgttgcccagggcggcgacgttgatcttgtcggccttgaacaggctctgcagcgcctgtgaacagtggctgatctcgtcgcagaggcggtgctggtgctcccggtccaggtcatggaagtccttcaggcccggccggcggggcaccaggatcagccagggatagctcgcgtcgtccatcagcaggacccgcgacaggggcaggtcgagcaccggcaggccgtcgcgctgcaggtcggggtgcaactcgaagctgtcggtcatgcctctctcctgcgggttcgcccgctgtcaaagctagacagcgggccggctccgggcaaccacccgtggcgccacaggggcggacggctgcgcccggggcgacgcctccggagccggcgcggagagaggcggccgatctcagccttcgctcatggcttccgcgggcatcggcgccgcggcgccccgcaccttcgcttcgatccgccggccggtctcggcgtcgatgctcttccagtaatcgaaagcgcgctcgagcaccggcgagtgcacaccggcgagcagggcgccggcaaccgtctcgaccagcgcgtcgcgctgccggtcattgaagacctcgcgcaccagcgcgcccgcctgggagaagtcgtcgtcgcccgggcgcagcgtataggcgctacggaccatctcgccgtcgctttcccagctgtcctccacagggccggtctcgtcggcccagcttctgccgccgctgttgggggcgtagaccggcgcgttgccgctgtgatggtaggccatgtgaccgttgatcatgtaggtgttcaccgggaccttgggctggttgaccggcagctggtggaagttggcgccgatgcggttgcgctgcgcgtcgttgtaggcgaaggcgcgtcccagcagcatcttgtccggggacagcccggtgccgggcaccgtgttgcccggcgagaaggccgcctgctcgatctgggcgaagaagttctccggattgcggttcagcgtcatcctgccgacctcgatccgcgggtagtcggcgtgcggccagaccttcgtcaggtcgaaggggttgatccggtaggtcttcgcctcggcatagggcatcacctggacggacagcgtccagctcggatagtcgccgcgggcgatcgcctcgaacaggtcgcgccggtggaagtcggcatcggcgccggccatggccgcggcttcggcgttggtgaagttctcgacgccctggtcgctgatgaagtgatacttcacccagaacttctcgccctgggcattgatccacatgtaggtgtgggagctgtagccgttcatgttccgccaggtgcgcggcaggccccgatcccccatcagataggtcacctggtgcgcggactcgggattcagagtccagaagtcccactgcatgtggttgtcgcgcagcccgctgtccggcagccgcttctggctgcggatgaaatgcgggaacttcatggtgtcgcggatgaagaacaccggggtgttgttgccgacgaggtcgaagttcccttcgtcggtgtagaacttgagcgagaagccgcggacgtcacgccaggtgtccggactgccggcctcgccggccacggttgagaagcgtgcgagcatctccgtcctggcgcccggctggaaaagggcggccttggtgtaggcggagacgtccgccgtcgtctcgaacaggccgaaggcgcccgatcccttggcgtggggctgccggtcgggaaccatctcgcggttgaagtgcgccatctgctccaggaaatgcacgtcgtggagcaggatggggccgtcggggccgacggtcagggagttgcggtcgctccgcgccggtgcgccggtgctcatggtcgaaccggtggtctgcttgctcatggctgtctctcctctcgtatgaggcggatcctgccgtccaagacctgcgcgggggccggccgtgtcgaacttggaagcggtctggaagtctacctcggtcacctcgcaaggtcgtcaggcgactttgctccgctggtgattctgcgtcttgatctcgatcaaggggcttcgcagccgtctcgggtccaccgtcctgacggggtcgccgttcctgccttgtacccccatatgtcgccggtcatggccgcaccccatccagagacctggctgaccgtcaccgaccgggggctctactgcccgccgggcgatttctacgtcgatcccgcccggccggtggcgcgggccgtcgtctcccacggccacgccgaccacgcccggccggacaacgccgcggtgctcgccacgccccagaccctggcgatcatggaggcgcgctaccgggagcgggcgggcggcgagcgccggccgctggcctatggcgagcgggtgagcctgggtgaggtgacggtctggctggcgcccgccggccacgtgctgggttcggcccaggtggtgatggaataccgcggcgcccgggccgtggtctccggcgactacaagcgccggcgcgaccccacctgcccgcccttcgagccggtgccctgcgacgtcttcatcaccgaggcgaccttcggcctgccggtcttccgccatccgcccgacctggacgagatcgagaagctgctggagtcggtgcggctcttccccgagcgcacccacgtggtcggcgtctacggtctgggcaaggcgcagcgggtggcgcgcctgctgcgggagtgcggctgggaccgtccgctctatctgcacggtgccctggccgagctctgcgccctctacgagcggctcggcgtcgttctgggcgagacccggccggcgaccgcgaccagccggctggagatggccggtgagatcgtgctggcgccgccctcggcccttgccgaccgctgggcgcgccgcctgtccgatcccgtgaccgccatggcctcgggctggatgcgggtgcgccagcgcgccaggcagcggggcgtcgagctgcccctggtgatctccgaccacgccgactgggacgagctgctgcgcaccatcgaggaagtgggggcgcccgaggtctgggtgacccacgggaacgaggaggcgctggtgcacgccgcccggcagcgcggcttccgcgcccgggcgctcgccctggtcggcctcggcgagggcgaggacgagccgacgggcgggccgggggcggagacggggcacccggcgccggacggaggcggggcgtgaaggcctttgcccacctgctcgaccggctgatcttcacgccctcgcgcaacggcaagctgcgcctgctggccgactacttcgcccacacccccgaccccgaccgcggctgggccctggcggcgctcaccggcaccctcgacctgaagacggccaagccggccctggtccgtgccctggtgacggagcgcaccgacccgacgctcttcgcctggtcctacgactacgtcggcgacctggccgagacggtggcgctgatctggccggcgaagccgggcgccaaccggccgccgggtctgtcggaggtggtggagcggctgtcggcggcgggccgcagcgaggtgccgggcctgctcgcccgctggctcgattccctcgacgccaccggccgctgggccttcctcaagctggtgaccggcggcctgcgcgtcggcgtctcggcgcgcctcacgaagaccgcgctggccgagtggagcggccaccccctgagcgagatcgaggagatctggcacggccaggaaccgcccttcgaagcgctcttcgcctggctgcagggcgaggccgagcggccggagctggaggcgcgcaccgccttccggccgatgatgctggcccaccccctggaggagcaggaggtggaggccctgcccgtcggcgagtaccgtgcggagtggaagtgggacggcatccgggtgcagctcgtcgcccgcgacggcgcccggcgcctgttcagccgcaccggcgacgacatcggcggcgcctttccagacctgctggacgcggtcgccttcgacgccgtgctcgacggcgagctgctggtgctgcgcgacggtgacgtcgcccccttcaacgacctgcagcagcgcctgaaccgcaagcaggtgaccgccaggatgctgcaggactaccccgcccacctgcggctctacgacatcctcttcgaggggccggaggacctgcgcgcgctgcccttcgacgagcgccgccggcggctggaggcctggtacgccgccaccctgccggcccgcatggacctgtcgccgctgatccccatcgccgagctggacgcgttgcgccggctgcgcgacggcgcgcgcgaggcgggcatcgagggcctgatgctgaagcgggccgacagcccctatctcgcaggccggcccaaggggccctggtacaagtggaagcgcgacgccctgctgctcgatgccgtgctgctctacgcccagcgcggccacggcaagcgcagctccttctattccgactacaccttcggggcctggagcgacgacggccagctcctgcccgtgggcaaggcctactcaggcttcaccgacgaggagctgaagcggctggacaagtgggtgcgcgaccacacggtcgaccgcttcgggccggtgcgcgccgtcgagccggccctggtgctggaggtcgccttcgacgccgtgcacccctccacccgccacaagtcggggctggccatgcgctttccccgcatcagccgcatccgctgggacaagccggccgccgaggccgacaccatcgccagcctgagaaagttcgtggtcgggcggtaggcggcccgtgcccgccccttgacctccctcagtgcttcgccgatccagccggcgcggtccgcgggtcgatgaaaccctagaagtgcgtgcgatggaactggccgacggccaggtcgacagagttacacggcgcattagggggcggactccgactggtacaacgccccggagcaaatggccccgtcattgctgacggggccatgtcggcggtgacctttgggatgccgagcccacacgaggaggtcatttgcttgcgaaaagcgaccgcctctcgttttgctacaatcacgagaataatctacgattgaggtaaaatgcaagggagaggtcatgcgccggatcttcgggctcgacattggcaccacgtcgatcggctgggcggtgatcgagcatgatcccgcgacattcgaagggaacatccttggaatgggagtgcgggtctttccggaagcgcgcgatccggaaggaacaccgctcaaccagacccgccggatgaagcgcttggcgaggcggacgctccgtcgacgccggcagcgtcggcgcgccctcaacgagttgctcgccgacgctggccttctgccaccgttctccaaagacaaggccagcgcctgggccgaactgatgaagacggagccgcttacgctccgcagcaagggcgtggcgccaaaggacggtactgcggacagattgacgccccacgaactggggcgcgcgctctatcacttggcgcgcctgcgtcacttcaaggggcgagaattggctgagacagaggaggagccgggggagacgcccgacgagaagaaggccggtgaagcgcggcagcagacgatccaggcactgaaggcctccggtcagacgctcggccaaatgcttgcggggcgggtggcgccgaagggggaggtgccgaggcagcagacccgtcgcatccacgctctgcgttcccacgtcgagagcgagttcaatcgcctgatccagagccaggaggcgtaccaccccatcctgcgcgatccgaagtttgcggcccgccttcacacgacgatctttgcgcagaagcctgtcttctggcgaaagaacaccctggggcactgccgcttccttccggaggcgcctctctgcccgaggggctcctggctctcgcagcagcgcagaatgctggaaaagctcaacaacctgactgtcgtcggcgggaatttccgccctctggataaagaggaacgcgcggccatcctagcaagactgggaagccaagcctcgatgagttggtccggcgtccgatcggcactcaaaccactctacaagaggcggggagagccgggtgcggagaaggcgctccggttcaacctcgaacttggcggcgagcccaagctgctcggcaacgcggttgaggccaagctggcggcagtcttcggcaacgactggatgagcctccctcacagggacgcgatccgatatgaagttcaggagcgactttggcgggctgactacgatgagatcggacagcagcgagtggtcatacggccggagtccgaccgtcgagaacgtcgagaagaggcggccagagacttcgttcgggatttcgggatcaccgaggcgcaggcgaaatcgctgagcgacctgcagcttccagccgggtgggagccctactctacggaagctctcagcctctttctgccaaagctggaagagggtgtccgcttcggtgccctggtcgccggcccggaatgggaggaatggcgggaggccagcttccccgatcgggagaggccgaccggcgagattctcgacaggctcccgagccccgccgaccctgaggaacagaagcggctcgggacgatccgcaatccgaccgtcgtccgggttcagaacgaactgcgcaaggtggtcaacaatctcctccgggtctatgggaagccccatctcatccgcgtggaactggcgcgcgaggttggcctgtcaaagagccagcgggaggagatgcggaacgcactgcggcagcaggagcagcggcgacgaactgctgcggatgatctcagatcaaagggcatcgatcagccatcccgcgcagtgatcgaaaagtggatgctatggaaggaagggctggagcgctgcccctacaccggcgaccagatcggcttcgacgcgctgttccgcaacggagagtatgaaatcgagcatatctggccccggtcgcgttcgctcgacgacagcttccgcaacaagaccctctgccgacgtgacgtgaatggacaaaagggcaatcgaacacccttcgagtattttcgttcgaatcctgacgaatgggatgcggtcgtaaaacggttgcagtccatggttgcgcgaaaagggtctccaggtgtgcctgtgagcaagttcaagcgattcaccgctgaggtaattcccgaggatttcaccaaccggcagctgaccgacaccggctatgccgcgcgccaggccgtctctttcctcaaacgtctctggccggatctggggcctgaggccccggtgaatgtggaggcagtcagcggccgggtgacggggcagctccggagattctgggagctcaacaacatcctttctgaagatggcgagaagactcgcgccgaccatcggcatcatgcgatcgatgcgctcgtggtcgcctgcaccgacctgggaactacaaaccggctctcccgatattggcagcaaagagaagatccgcgggcggagcgcccccgtctgccgccaccttggccgggcatccggagggatgcggaacgtgcggtggagggaatccttgtctcgcaccgtgtcaggaagaaggtgtcggggccgctgcacgcggagatgcctttcggagatacaggcgaagaggtcgagaagaatggtgtcaggcagcgggtcttcgtgaagaagatgccggtcgggaagctctcttcaacgaccttggagatcggcagcccctccgagatctccaggacggcgaaattcgttgtgcgggataaggcggtgcgggaagccttgaagaggcacctcgatcatgccggaggagatccgaaaaaggcctacgtttcctatccctcggtctccggcgctgggccggaaatccggaaggtccggacgctttccctgcagcaaagtcggcttatggcgccggtttcagtgaaaagagagggctccggggagggcgggccgacgggttttgccgacttggccaacaatcatcacctcgccatccgccgcctttcggatggctcggtcggttttgagatcgtgagcctgttcgaagcggcgcgacgactggcgaaacgggagccggtgatacgacgacgctttggtgatggtgccagtttcgtcatgtcccttgcgccgggcgaggcggtcgagttcctcgacggacctcgggaaggcgtctggatcgtccagggcgcttgggcgaacggtcaagtggtgctgacccggcacaccgatgctcgtccgacaagcaagggtgaagccgagagcttgggaatggacggagttcggcaggagtttcgacccgcggcttctactctggtctctgatgccgttcgcaaggtctcgatcgatccgatcgggcgggtccggccagcatcggactgaggtgatcctatgctccgaaagaccgtcgagttctctaccccagggacccgattatcggttgctcaccggcagctggttgtcgatcggccggagcttccgcctgcgaccctgcccatcgaagatctcggggtcgtcatcgtcgacgataggcgtgcgatctatacacaggcggtatttctggagctcctatcggctggagcgacggtgatgatagctgggcaggaccatcttccggcgggcatgatgctgccgctggatgcgcaccatgtccagacggagcgccaccgggcccaggtggaagctgcactgccggtgaagaagcgcatctggcaaagcatcgtccgcaccaagatcatgcagcaggcctgtgttctggagcatttcactggatccagtgaaggcttgcttcccttggcccgccgcgttcgatcgggtgatcccgacaatctggaggcacaggcggcccagcgctactggccacggcttttcgggcgagcgttccggcgtgaccgagaggccgagggtgtcaatgccatcctgaactatggctattctgtagtccgggccgctgtcgcgcgagctgtcgttgcgtccgggctcattccctcgctcggcgtgtttcatcggaatcgggccaatcccttctgcctcgccgacgatctgctagaagcttaccgtcctttcgtggactggcgcaccaagctgttgatcctcgaccattcggggacggcgccgcccttgtccgcgaaatccacccgggccgcgatcctgtctctcttcaacgagacagtggtggtcgctggccgccgagagccgctgctgctggccatagaatcgggtgctgcatctcttcgccgggccctaaccggtgctggtgaccgcaggctcgccctgccggaggggctgccgctggccctccaggcgaccgacgatgaagccgagcgctgatgcagcctcgcgtttcgccgcaagtgccttggggatggcgctcgatgtgggtaatcgcgatgttcgacctgccgacggagacgccgaagaagcggaaggactatgcgcgctttcgtaaggatctgatcgaggatggcttcaccatgatgcagtactcggtctacgcacggcattgcgcgtccgtcgaaaatgcagagctgcatgtgaagcggatgggggcgagagttccggccgagggagaggtccgcttcttgaccatcacagaccggcagtttggcaggatcatcgcttttatagggaagaaaaggcaaccgactccgccttcgccttcccagctcgagtttttctgagtgccgggaaggcgaaaagcgttgtcgcgtcagtgggttgccggaaccctagcgtagcaaaacgagagacggccgcaatccgcagctccgcatcggcctggttggcgcggaagttcagcgtagcaaaacgagagacggccgcaatccgcagccggtctcggtcgttccgcgaggatcgacgcagcgtagcaaaacgagagacggccgcaatccgcagctcgcctctaagaggttccgccgcatcgccgagcgtagcaaaacgagagacggccgcaatccgcagcggcacggccggcggctgcagcgactggtcgagcgtagcaaaacgagagacggccgcaatccgcagcatcaggggaaagcaggtcagtgcgctgccgagcgtagcaaaacgagagacggccgcaatccgcagccgtgcggcacgggccagccagctctggcgcagcgtagcaaaacgagagacggccgcaatccgcagctgcagcgcgtagatgccttcccggctgaagagcgtagcaaaacgagagacggccgcaatccgcagcatggcgcttggcctataggtctggctgtgaagcgtagcaaaacgagagacggccgcaatccgcagctggactacgccgcgcagtcgatcgggtgggagcgtagcaaaacgagagacggccgcaatccgcagccgataaaaatatttgtctttcttgggaagaagcgtagcaaaacgagagacggccgcaatccgcagcagggcatcgcgggattcggcgacgtaatagagcgtagcaaaacgagagacggccgcaatccgcagccggcagcgcgtgcgcagccggccgagagtcagcgtagcaaaacgagagacggccgcaatccgcagcggcggcactggtctacatggcgctgtcgggagcgtagcaaaacgagagacggccgcaatccgcagccacccggtccagcccaccatgtttttagtaagcgtagcaaaacgagagacggccgcaatccgcagcctctgcgcctgcggcaggagtcgggtggagagcgtagcaaaacgagagacggccgcaatccgcagcaggtgggcggaacaccgtgcaccgcttctgagcgtagcaaaacgagagacggccgcaatccgcagcttgagggtgtcgtccaagccctcctgctcgagcgtagcaaaacgagagacggccgcaatccgcagcccgccagagcagcacctcggcccgccgccgagcgtagcaaaacgagagacggccgcaatccgcagcgccagcaccacgttcggccggcggcgccgcagcgtagcaaaacgagagacggccgcaatccgcagcgcagcgtcatgggaacggccggtgcgtagtagcgtagcaaaacgagagacggccgcaatccgcagcagcagcacaagccgaaccgttacgcgcacaagcgtagcaaaacgagagacggccgcaatccgcagcaggccgaaaccctatcacaaaagcgcagttagcgtagcaaaacgagagacggccgcgatcgttggggggcgatcagtcgccgcccggcggcccggcgccgagttcagcgtccgggctcgcgccgacgatgccgttgaggatgaggtcggcgatgaaccgctggtagcgctcccgggcgccggtctcgtcgccgcggaacagcaggtcgatgatgggctgtgacgtggccacgatctccgccatccccaggatcgcgaggtagaggaagcgcggatcgaagtccctgaactcgccggccgcctgcccgcggcgcaccatgccctcgtgccggcggtaggccttggtggtcatctccaccagccgctccgccgactgctggcccttgccgttgtagatccgctcgaccagggcgcggaagtagccgggattctccacgaggaaggaggtcagggccgcgacccggttcgccaggatctccgcctgcgtcggacgatcctcgctggccgcggccatccgctcgtccagttcgagccgcgcaaggtcgagcgcctggtcgagcagcacctccaggtcggggaagtagtagcggatgagcttctgatcgactcccagcgccttggctatctccgcccgcgtcgcggcgtggggtccatgggccatcacgaggtctttggtctgctggacgatcttctctgcgccgaccgccgatccgcgggaactggggcgtcctttgctgcgcgtcagggggctggtcatcggccgatcgcaagggggtctcgtcagacagcactaggccctcggcaaggacgatgcaatcggcggggcgccgctatttttccgcccaagcggaaaatttattccgtcaatgcggaatatacgttgacagcgcctgccagcgtcggctctgctggaactgtgcaagagcaacggcgccggacgagcgccggccgatatttcgtgggaggagccgaaaatgagacatcatgcagccggggcgcttgccctcgccacggtactgaccgtggcgggaggcctggacgctcgtgctcagacctcggacgacgtcgtccgtgtgggcgtgctgacggatatgggcggtatcttttccgacaacaccggcgccggatcggtcatcgccgcccggatggccatcgaggacttcggcggcacggtcaatgggaagccgatcgacctggtgtcgggcgatcatcagaacaagcccgacgtcgccgccaacctcgcacggcggtggttcgacgagcagggcgtcgacgtcatcgccgacatcatcggctccagcgtcacctacgcggtcctgcagatcgccaatcagaaggatcgcgccctgctgatgaccggcgccggcgcctccgacctcaccggccccaactgcagcccgatttcggtgcactgggtctgggacacctactctttcggcggcgtcctcggaaaggccgtggccgaacgaggcgcgaagaagttcttcttcatcaccgtggactacagctacggcgagcagatgcagcgcgacaccgcccgcgcggtcgaggccgccggtgccacggtcgtcggctcggtgaagcatcccttcggaacggcggacttcagttcctacgtcctggccgcccaggcgtcgggtgccgatgcggtggcgatggccaacgccggcggcgacacgctgaacgccgtgaagcaggcgaccgagttcggcctgccggcctcgggcatgcagatcgccgccatcctgggtctgaaggagatggcggcggcaggtccccaggtcgttcagggcgtgctcgcgccctcttcctggtactgggacatggacgagaagtcgcgcgccttcgccaggaggttcgaggcgcgcagcggcggcgtgccgccgacggagttccaggtgggcgtctactccgccgtcctccactacctcgaagccgtgaaggcggcgggcacggacgaggccaaggccgtcgtcgccaagatgaaggacctgccggtggacgacgtcttcgcacgcaatgccacgctgaggcaggacggccggctggtgcacgacatgtacctgatcgagggcaagggcgccggcgagagcaccggcaagtgggatgtggccaagatcctcgcgaccgtgcccggcgatcaggccttccgacccctgggtgaaggcggctgcccgctggtgaagtgaccgccgaccctcccaattccgtttcgttcgacgagagagtcttcccgatgctcaaagcctgcacgctcttcttcaagaacccggctatggacccggtcgagttccagacctactggcgtaccgagcacgtccctcatgtgaagaggatgccgaacgtccgccgctacgtgcagaatcatccgcggctcgacgtcgggaagcccgcgccctacgacggtttcgtggaattgtgggtcgacgacacggcggcgttgaagcagctggcggcctccccggagtatgcgagggtggtcgaggatgagaaggttttcgtcgaccgtcctcgaatcgacctgaccctcacggaggagcacgtcgtcctcgacggccccgtgcccgcgggcgcggtcaagcagatcgtcctgctcaagcgacgtcccgggatgacgcctgcggagtttcaggatcactggctgaacgtccacgccccgctcgtcggacgccccaacggcctctgccgctatgcccagtcgcacacgaaactgtccggctaccgttcggatcgggagccgacctgggacgggttcggcgagatgtggttcgtctctgaggaggcgatgcgggcggcgcgccaggcgcccggacaggagcgggtccgggccgacggcgccaatttcgtggatcccgacaagctgaagtcgtttctggtcaccgagcacgtgatggtcgcctgagacccctgcgcgggcgcggcggcaatgcacatcaaccggctgctccggcgggccgcgcggatcgcgccgcgcggcatcgccatcgacggcgaggacaggatccgcacctggccgcaggtgtacgaacgggcttcccggctcgccggggcctatcgggcggaagggttgggtgcgggtgaccgcatcgccattctcgcccacaactgcgggcgctacctcgaagcgatcttctcggtgtcgctcctcggcggcgtcctcgttccgctcaacacgaggctgtcgcagggcgaactggcgcactgcgccggtcacgccgcggtcggcgccctcctggtcgacgccgagcacctcgatcgcgggcggcagctctgccgggaggtgggtggtgcagtccggctgatcgtcatcggcagccgtcccgccgctgccgaactctccttcgaggacctggcgcaggcgccggcattgcccgagacccaggcggaaaggtccgacgatctggccggcatcttctacaccggcgggaccaccggcaccccgaagggggcgatgctcacccacggcaacctcgtggcgaacgccctgaacctgcaaccgcacttcaggttctcgccggagacccggtgcctgcacgccgccgcgatgttccatattgccgagagcctcagcatcttcggcgtcaccatggccgggggacagcacctcttcatcccgaagttcgatccgctgggcttcatggaagccgtcgagcagcggcaggcgaccttctcgggcctcgtccccaccatgctgaagcggatcgtcgaccacgagcgcttcggggagcacgacctctcgtccctgcaggcgctcttctacggcggcagcccgatcctcgagtccgacatgcggcgggccgcggcggccctgccccatgtcgcgctccatcagggatacggcctgaccgagacctctccgaccatcaccatcctcggacccgagcatcacccccgcggtgacaccggcggcgggaaggccgcttccgccggtcagcaggtcttcggtgtcgacgtgtcgatccgtgacgacgacggcggcgagttggccgccggcagagacggcgagatctgggtgcgcggcagcaccgtgtcgagcggctactggcgcgatcccgcggccacaggcgcggccttccgagacggctggttccgcaccggcgacgtcgggcacttcgacgaggacggctttctctacgtcgtcgaccgggtcaaggacatgatcatcagcggcggcgagaacgtctattcgatcgaggtcgagaacgtcatagccgcgcaccccgacgtgctggaatgcgccgtgatcggggttcccgatccggactggggcgagcgggtccatgccgtgatccggctgcgccggggcgctgacgtcgccggtctgcgggagcactgccgcgggcgcctcgctccctacaagtgccccaagaccatggacttcgtggtggacccgctgccgctgtcggcggtgggcaagatttcgaagcaggaactcaaggcccgtctgtcacggcagacgaagcaggaggaaggcagtaccgcatgagggaagacatcgcgttccgggcaggcgacggcaccgtcctgcgcggctggcactatcccgccgagaccgccggcagcgagccggcgcccgtggtggtgatggcgcacggcttttccggcatcaagggttcgttgaccaagtatgcggaggtcttctcttccgccggactggcggtcctgctgttcgaccatcgcggcttcggcgacagcgacggggcggtgcggcaggaggtcgacccctatcagcaggtttccgacttccgcgacgcgatcacggcggctcagaccttgcccggggtcgatgcggaccggctgggcgtgtggggatccagcttcgcgggcggccacgcgatggtgctgggggcgaccgacgcgcgggtgaaatgcgccgccatgcaggtgccgatcatcagcggccatgccaccgtcatgcggctgttccgtgccgacgtgctggccaaggtccggaagctcttcgccgaagaccggctcgcgcggatgcgcggcgaagagccgatgaggattcccgtcttcgcgaccgacgaaagcctctgcgccctcccgccgccggtgtctgcgcgcttcatccgggcgagcgaggaagaggatccgctctggcgcaacgaggtgacgctgcgttccctggaactgcttgccgcctacgaacccgcccggctcatcgggctggtctcgccgaaaccgctgcttctggtcgtcggcgcgcgcgacgtcgtggcccccgccgatctggcgctcgccgcctacgagaaggcgcgggagcccaagcggctggtgatccatccgggcggccacttcgccacctactaccagcacttcgagcagtcgagcggcgcggcgcgggactggttcctgcagcatctctagcggtcgccccgaaaacctcacgcagacttcaggctctgcggcgcgggggcggctggcctgcgcccccttcgctgccctatgatcggcgccgtccggtaccggcagcgggagagcccatggccgtcgagctgcgcgaaggcgtccgtcgtctcgacggcacgctgcgagtgaccctgggcgtgctggcgctggccagcggggtctacacctatcttggcgtgcgcgagctgctggacggcaccgcgacgctcgtcttcttcgccgccgtgatctactcggcggccgtgtcggtcggcatctacgccttctggtccttcatgatgcagttcctgccgcaggtgcgcgacggcaccagccggctgctgctgagcgccgccatgctgctgggctcggccatgatcgtcgccatgtcgtcctggctgaacgccgccgcgctggcgggctcggccgccctggagcagcacctggcgaccaccctggagagctacgcccgcgacctggaccaggcgcacaacaacgccctggcggcccagagcctgctgcccgacatccagatgacctccctgcgcttcgcccggctggccgacgccgagcggcagggcggcacgctcaccggctcggccggctccggcactgtcgtgcagctgctgacccagatgtcgaaccagctcgacggcctgggcgacgagatcgagcagtcgcgcgaccgggtggcgcacctcttcgaggagggcagccgccacatcgccaacatgcgcgaactggtctccgccagcgggccgatcaacccgcgcagcgacgccttcggcagcgaggccatggcgctgatgggcgtgatcgccgccctgcagcagacctcggtggcaccggcggtgaagcgggcggcgcaggacctgtcggccggcttcatcgcgccggtggccgacggccgcaccgccgacctcgccgagcggcagaccaccgtggtcggcaacgtcgagcgggcggtggcggcccagtcgcaggtgctctccgcggcggccgacgacatcctgtccgacccggcggtgaccccccagcgcttcgagccgctgtccaccgccgaggcggtgctgcgctacgcccccgacttcctgccgagctgggcgggcgccatctccatcgacctgatgccggccgtgatcgtgctgatcctctgcgtcgtgcaggcgcgcatccggcgggagagcgggccgcgctcggcgggctccagcatgaccgcggaggagctgctgaccgccatgcagatcctgcgggagatggatcaggctcggacggcgggtgcgcgcgccgccgcggcgggaccggccgaggcgccggccgccgagagcgctgtcgccaccctgccggcggtgcgggccgcgcggaaggagtgagaccccgaagcgtgcggctcccagcatgagtggctgggtatgaaccgccggggcgtcctgcagggctacgagcccttcgacgagccgccgccgcgcccgggcctgggcgcccgcctgcgccgccggctggggccgcggccggacgaggtgctgctgcgcctgctgttccgctgcctgatcctggccaccgtcgtggtgctcgggctcgacctcgccgacatggagaagggcgccggccaggacgagagctggcgcgagcggctcgatcagcccctggtcccgggcgaggagccggccgccgagccctacctgccgtccagccgcccggagtcgctgcctgggcagcggccagtgcccggcggcggaccggggctgcacgaagccggggacgcccgcgcgcccatgaccttcgacctgctgggggaggggcggctgctggcggtcggcaccatcacccccggcacggc

SEQ ID NO: 3434 - DNA, 23114 bp, synthetic construct
  source 1..23114: mol_type = other DNA
  misc_feature 1..23114: note = Synthetic
cggcacgtcgcatgggaccctccatccagcaagcccaccatcgcagatcactgctgacggcatgctgtcagtagtgtgtcagcataacggtatccgtccaacaacggagagctgccatgatccgccttcacatttttccggcgagcctgaagggcacgcccaatccgagcccactctgcgtgaaactggagacggcgctgcgtcttgccggggttccgcaccgggtctggtacaatacgaatcccgccaacgggccgaagggaaagctgccctttatcgagatcgaggaccagcgcatcggcgactcggcgctcattctctatcacctgaaagagcggcttggcgtcgatctcgacaggtcattgagcgatggcgagcgggcacagtcgcatatgctgcatcagatgctggatgagcggctttactgggttcttcttcacagccgctggatggatgaggcgaactggcgggtcaccaggcagtgttatttcggcgggcttccctttccgctctccctgatcgtgccgcgcatggcgcgaaagcagatgcgcgccgcgcttcacgcccagggcattgggcgacacagcgcggaagaaatctatgagctcggcgcgaaggaccttgcggctcttgccaccctgctgggggacaagcctttcttcttcggcgatatcccaacgctcgcggatgcgaccgtgttcgcctatctcgtcaatattgccgggccggagcttccaagcccgctcaaggacgccgcgctccgccacgacaatctcttgcggcacatggaccgcatgggcgaactctatgcggcgaagaggcagccgcagcgaatcgcgctgacgctcgcagcctgaacggcgaggcccggaaggttgaaaccttccgggccgtttggccgcaccgcctatgaggcgttatttcttctgggaggggtcgtgcccatcgcccgcatgagtaccgttccatgagggcggatcggaagctgggaagctttcatcgagcgtctcatcgacatcgtcttcacgatgcttgcgctctctttcagcttcctcagccttcctgacggctcttttcgcatcttcctccgcagacgccaccccgctcgtccaagcggggggatcggaagcggggaaagtctccttctgagcctcatcgacctttgtttttttatcgatctggctctcgtggttcttatccggattagacaaggtatttacctccatctgtggggaaagaacgcgcggctctgcgtcagagttccatggttatgggattttgctaatgcgcctcgtcccagtttttcgcggcacgggcatcgacatcgagcggcacagtcagcgccacggcgggcgcggcggcatccgacatgatgcgcgacaccaccttgctcgtcttctcggcttccttttccggcacttcgaaaatcaattcgtcatgaacctgcagcagcatccgcgcggcgagcttcgcatccgccaatgcctgcggcatgcggatcatggcgcggcggatgatgtcggcggccgagccctgaatcggcgcgttgatggcggcgcgctccatgaagcttttctccgcgggattcttagaattgatcgcggggaggtgaatgcggcggccgaagatcgtttcgacataaccgttcttgtgagcgaaatcccgggtgtcgtccatataggcgcggatgccggggaaacgcttgaagtagcgatcgatatattctcccgcctcctgccgcgggatgccgagctggttggccaggccgaaggcggatatgccgtagatgatgccgaaattgatggccttggcgcggcggcgaacggaagactccatgccctcgatgggcacgccgaacatttccgatgccgtcatcgcatgaatatcgagaccttcggcaaaggccttcttcagcgcctcgatatccgcgatatgggcgaggaggcgcaactcgatctggctgtagtcggcggagatgagaagatttcccttctcggcgacaaaggccgttctgattttccggccgtcttccgtgcgcacgggaatgttctgcaggttcggctcggttgacgcgaggcggccggtcgatgtcgaggcgagcgagtagcaggtgtggatgcggccggtctcggggttgatatattcagggagtgcatccgtataggtgcttttcagcttggaaagcccgcgccagtcgagcacgcgctgcggcagctcatggcctttcgcggccagcgcctcaagcgtgtcggcgtcggtcgaccaggcgccggtcttggttttgcggccgccttcgaggctttgcttgtcgaagaggatttcgccgagctgtttcggcgagccgatattgaagcgttcgccggcaagctcgtagatctcatcctcatattgcgccatcttctgcgaaaaatcgccggagaggcgcgcgagcaccgccttgtcgaccttgacgccggctcgctccatttccgcgagaacggaaacgagcggacgctccagcgtttcataaacagtaacgcgacgctccgcgacgaggcgcggcttcaggatatgccagaggcggagtgtgacgtcggcatcttcggcggcataggcggtggcgcggtccaccggcacctggtcgaaggtgatctgcgccttgcccttgcccgcgacttccgcgaaggaaatcggcttgtggccgagatgcagttccgacaattcgtccatgccgtggccatgcacgcctgcgtcgagcgcgtaggacatgagcatcgtgtcgtcgagacctttcaattggatgccatgctgacgcaggaccgtcatgtcgaatttcaggttctgaccgatcttcaggatggaaggatcctcaagcagcggtttcaggcgggcgatagcctccttaagcggaatttgcggctggccaccggcatccgcgaagtcgaggccgccgccagcgccatgctgcagcgggatgtaacaggcctcgccgggcagcagcgaaagggagacgccaacaaggcgcgcctgcatcgggaagaggctgtccgtctccgtatcgacggcgaggaagccctgctcgcgggcgcgcgcgatccactcgtcgagatcggcaagcgccgttaccgcaacataattcgcatcgttgaaatccgcgtcgatgcccttcggaactgcacccggcgtgccgccccgtgcggtgcgcgcgaccgtctgcttttcctttttcggctcctcgcccgcgggggcagcgagcgcgccatcggtaatgagggcatgctttccggcagcgggaatggcgtcgacgtcgatgttgaaacgctcgccgacgcggcgcgtcagcgtgttgaattccatgtccttgaagaagccgatcagcgtttcaggatcgggctcgcggacgcccatgccctcaagcggctcttcgagggggacgttattgtcgagctcgacaagacggcgggagatgcgggcctgctcggcaaattcgataaggttttcgcggcgcttctgctgcttgatctctccggcgcgggcgagcagcgtttcgagatcgccatattcgccgatgagctgggccgcggtcttgataccgatgccggggacgccgggaacgttgtcggtggagtcgcccgccagtgcctgcacatcgacgaccttttccggcggcacgccgaatttctcgattacctgttcgcgcgcgattgtcttcagcttcatggtatcgagcatgtcgacattgtcgttcacgagctgcatcagatccttgtcggaggagacgatggtgacgcgggcgcccgcttcatgcgcgaggcgcgcataggtggcgatgatgtcgtcggcctcgtagcccttcttctcgatgcaggggacaccgaaggcgcgggtcgcgtcgcgcacaagcgcgaattgcgggcgcaggtcttccgacggctcgacacgattggccttgtattcggggtagatgtcgttgcggaaggtcttggcggcggcgtcgaaaatgacggcgagatgcgtcggctcgaactcgtccttggtgtcctcgatgagcttgtagagcatgttgcagaagccggcgacggcgccgaccggcatgccgtccgatttccgcgtcagcggcgggagggcatgataggcgcggaaaatatagcccgaaccatccaccaggaagagatggtcgccttttttcagtgctcttccggtcttttccgccattgccgtttccgccttgccgcttgccacacgccctgcctttcctatctatagtgcctcaccgtccccggtctcgggggccgccactatagcgcgtaccgcgcgtcaaaaagaaccggccccgaagccaagcctgaaaagtttcagaaaagagcccgctcatggcccattcgcttgccgacaatgaagacagcctcgaaacgcgcctgccgccggagccggcgccccgcacgggcgcacgctatgccatcgaggcccggaacctgcgcaaggtctacaaggcgagcggcaaccagccggccaaggaggcgctgaagggcatcgaccttgcgataccgcgcggatcgatcttcgcgctgctggggccgaacggcgcgggcaaatcgaccttcatcaatattcttgccgggctcgtgaccaagacctccggctcggcctcgatctgggggttcgatacggatgtcaatccgcgacaggcgcgcgcctccatcggcgtggtgccgcaggagctcaacatcgacccgttcttcacgcccgccgaagtgatggagatgcaggcgggactctatggcgtgccgaagcgcgagcggcggaccatggaaatcctgaaagcgatggggctcgacgacaaggcggatgcctatgcgcggacgctttcgggcggcatgcggcggcggctgctggtggcgaaggcgatggtgcacaacccgccggtgctcatcctcgacgagcccacggcgggcgtcgatatcgagctcaggcggcagctctgggagtatgtgaagggcttgcatgcccgcggcacgaccatcgtgctcacgacgcattatctcgaagaagccgaggcgctgtgcgacaccatcgcgatcatcgacaaggggcaggtggtggcttgcgaaccgaaggagacgctgcttggacggatcagcgacaagcggctgatcgtgcggcctgcgacacccgcgacgcaactgccggcggcgctggccggcatgaaggcggaagtgcgtcccggtgggacgatttccgttcagtacaatccggcggaaacaaatgtcatgaccattctcggtcggttgagcgccgagggcatggagatcatcgacatttcgactgaggaatcggatctcgaggatgttttcatgcagctgacatcgcactagctcaggccgaggcgcgcttcaccagctcacccatcaccatatcgaccgagccgacgcccgtggtcagcggcatcagcacggcctcgagcgccgttgccggccccgcctgagcgaacaccgcctggccatgcaaccgcagcgggcggcgcagctggcagacgatgccgaaaaccttggcgacagcagccgcggatttttccgacatttcctgctccagcgtgcgaccggtgtagtcgttcgcgaaaagctcgttgagggcggtacccatgaggcggacgcggaaatgcgcgagcgagagcgcgggcggggccgcatcgaccagaaaaaccgatggcaaatggctgataatctcggcggggcttacatccgcgcgagcgggcatgggccggccggcgcgctttgtttcccaataggccagcatttcacgcaggcggctgtcctggaaggagagcagcgggtcgatataaatgtcgaaaggcgcaagcctcaggggctccgacatggaacgcagaactctcacggtgtccgcccgcgcgaacgacgtttcacgcagggcccccttcctataggcggattcgaggaggacgccaaggagggcgcggggcccaatggcggcgattgtcaggcggcccggtttgttctaccttgcgcccgcttcgccggacggcccttgtccggaccgcaggcacccgtagctcagctggatagagcgctgccctccgaaggcagaggtcacacgttcgaatcgtgtcgggtgcaccactcatccataaaagtaggtaccattgagggcggcagcggcttgtcagccgtcagctgataggccagcacgtccttgcggccggaaatcctcacccggtccttggtgaccgccacattctccagcaagagccggagataggccttgcggaaccccggctcgccgtcctcccgcaaccgggcccgaaaaccattcgcgaaggcctccagcttctccggggtaacgactgagagaggcgagtcgatttcgcgatttacgaatgagataacccggttcacctgttcgcgctcattctggcgctgggtaaagcggctcttgacggcatcgagcgggacacccttttccagagcgtcggtcagctttgccagtttttgatccagctcccggcgttcccgcttcaattccttcagcttcgcttgcgctgccgcgcgccgccccgaattgcgagcaagcaaagaccccagcatattctcaaggcgatccgcttggagaaccttatcgcatagcgcatcggttacgatttcatcgagcttgcccataggcacggtcacgccagcgcatccgctcttccccatatcagccgaccgcgagcatgtgtaataccagtattgcccgttcttgccggttcgcgtccgcatcggagcgccgcaattttcgcaagtcgcgacgcctgtcagcaatatgcggctgcttgcgatgcgaggcggcgtcattgtcggattgcgggcgtcaagttgcgcttgcaccgcatggaagatgctttcctcgacaatcggtggcaccgcaatttcgatccactcttcgcgcgggcgcggctttcgggtccggctatccgtgcggttgaagtaatgcgttccgatataggcagagcgccgcaaggcctcctgaatgtgctggatacggaaaggctttccattccggttattcacgccgcgtccattcaggtaggaaaccaagttctttatgccgagcggtcctgtcttgccgtcgccatagagatacaactggaaaatcagtttgacgatttccgcttcctgcggctccaaatcgagcttcttcttgtccttgttgccgtgccgctcaacaacgattgttttgtagccgtaaggcgcggccgcaccgttccagaagccgcgctttgcgttctcaatcatggagcgggtgacgtgcttggcggtttccgcgctttgatactcatcgaacgatgaaagcatatggcgcatcaagttcgcttgggcgccttctccggtttcctgcgtcatggacacaagccgggcgccatgcttttcaagtatcctcgtatatacagcggcaccgcacgcatcccgaaagaagcgcgaaaagctatgcacgagcaccacgtcgacttgcatcgccccagacttcacatcatccatcatgcgctggaattgaggcctgttatcgtcgcgggccgatgcacccggatcgacataggtgcccacgatctctatatcgcgttccttgcagtagcgttcggcgtgagcgatttgatcgggaatggacaggtcatggtcagcctgccgtgtcgttgatacgcgcgcataaacaatagctttctgtcccatgacccgtcctttcaggccctatcgggccgcttcctctttcagcatttcggcaatgatatcccggagataggtctctacgagagccagctcatcgggcgttaccggcagttcgtccggcatatccagcgtgacaagcatgtcaaatttgcggctatccactcatggggcaccgcctttcctgcctgtatgggaccggcccatgccattccatgcctcaagcccgtccttgccgccgtggtcaaggagagcggtaatatccgaacgcaggcctttgtggcccagtgcgtccaatacgcagctccggaaaaactcgaatgtccgctcattcggaatcgccagttcggcatatttgagaatctggttggtgcgctcattgatccgcgcttcgatgtccttgcggttcaccatttgcctgactcgtagtcgcggatgcgctgctctacatcctgttgccatatgctggggatatgatgcggctggagcatgtcgaggatttcttcggtcaaatcttcaagcgtgaccatccgccgccaatgtcccgactccaggacggacagtgccgcaagggctttcatgttgccgtacatggaattgacgatcttgaacttgcggtattgaagcgcgctatccggatcgtagtgccgcgccaatccgagttggggcatgtccccgattgcatcctgaagcgattgccagagaggatgcagcggccagcgcgatttgttgctgtcgcctgtcggccgtcgaagcgacgtatgctcatgggcgagctgcctcagaatatcgccctgtagctcttccaagtcaccgagcgtccggatcgcaccggccttgagacgttcgccccgtatctgaaactcgatacgccaaacattttcgctttggccccaaagctcgaagaaccagaccttgccgctgctttgctctatctcggcaaccttgtcatagacgcggattaccgtatggccggaccctaggcggaaagtttgaacgcggccgccgtcgcggtacttggcgtccttatgggcccgcgtggcgaaatgatcctcattgaagtcgacttccggcaaatcgaagtcgaaggaccaatcggcgcgcgatacagtttccggcgcgatcatggccgcgcctattgagcgcgcccagtcgactatccgttgatggagggcgattgcgcctgaccgccatagggcttcggaccggaactggacccggagcgtcggctgcatgacttccgtcaggccaagcgagaaggcctcattctccaagagaaaccggtagggcttcgccccgtagggacgcagtgcgaagtcttcgcagccgagcgtcagcgcctcgaattcgcgctgcccgtcgcggatcatttctttgcggtattcgaggtccgggaaatcaagctttgaagtccgcatatcgagcgagtaacagacatagagactgtcgagcccgctcaacagaagccggggggtgcccgtttttgctgtgccgccaattgtgtccctgttcatgtcgcgctccctatgtctgcctgagggctcaagcagtcacggcatatggagcgggcgcaagcagggccccggaaattcggccttcccatatatacatatggagactgaactcgaatgccgatttcggtcagttgccgaaagccggttttgtgcatttctgtcgaatcaccggctgaaaatcggctgaccatttcacgcctccatatggcgttgaaaccggtgtcagcattggcggctcgcctaaaactccctaaggaaaaaccgaccccatatgcaaaacttccatatggaaatcagccgctttcagaaattccggctatggggatttcccgcatatgtgcattttgggcgaatcagtgtgcttcaagcgatgccaaaggaatgatcggatcgcccgccgctcggtccgcctcaaggccacgcgccgctaacgcggcgtggcttcgccagccttgacccggcccgcccggcaggcaaagggcccggcatggccttcaagccgcaatgcggcctgaaggccggtctttgaggtgaggggacttgctcaatggggcgctatcggaggccagaccaccccatgtatcgaaagccccccgtgttaccaatcacgggggacaagcaaaaaggcccacgcgctgcttgcggtgggccttttcgataataaccggcagctgaccttgggatgccgagcccgcacaaggggtcaatttgcttgcgaaaagcgaccgcctctcgatttgctacagagcagaggctagcctttacccctatttgacgcaagggggatcgggcatggagcggattttcggcttcgatattggcactacatccatcggattttcggttattgactacagttcaacgcaatcggccgggaatattcagagacttggcgtccggatatttccggaagcccgcgatccggacgggacccctctaaaccagcaacgcaggcaaaagcggatgatgcgccgtcagttgcggcggcggcggatacggaggaaggcgctcaacgagacactgcatgaagcgggctttctgcccgcctatggttctgccgattggccagttgtcatggcggatgaaccttacgagttgcgcaggcgaggtctggaagaaggcttgagcgcatatgagttcgggcgagcgatctaccatcttgcgcagcaccgccatttcaagggccgcgaacttgaagaaagcgatactcccgaccctgacgtcgatgacgaaaaggaggcggcgaacgagcgggcagcaaccctgaaggctctcaagaacgagcaaaccacattgggcgcgtggcttgcacgccgaccgccatcggaccgcaaacgcggaatccacgcgcatcgcaatgtagttgcggaagagttcgaaagactttgggaagttcaatcgaagtttcatccggcgctcaaaagcgaagaaatgagggcaaggattagcgacacgatctttgcccagcggccggtattctggcgcaagaacactttgggcgaatgccgcttcatgccgggcgagcctctatgtccgaaaggctcctggctttcgcaacagcgacggatgctggaaaagctgaacaatctcgcgatagcaggtggcaatgcccggccgctggacgccgaagagagggatgcaattctctccaagcttcagcaacaagcctccatgtcgtggccgggcgtccgaagcgcattgaaggcgctgtataaacagcggggcgaacccggcgcggagaaaagcctcaaattcaatctggaactgggtggcgagagcaaactccttggcaacgcactcgaagccaagctagccgacatgttcgggccagactggcctgcgcatcctcgcaagcaggaaatccgccatgccgtccatgagcgcctatgggcggcggactatggcgaaacgccagacaagaagcgcgtgattatcctctcggagaaagacaggaaggcgcatagggaagccgctgcaaattcgtttgtggccgactttgggattaccggggagcaagcagcccaactgcaggcgctcaagctgccgaccgggtgggaaccctattcaatcccggccctgaatttgtttcttgcagaacttgaaaagggtgagagatttggcgcccttgtaaatggcccggattgggaaggttggcggcgcaccaacttcccccatcgcaatcagccaaccggcgaaattctagacaaactgccaagcccggcctcgaaagaagaacgcgagcggatttcccaactccgaaatccaacggttgtccgcactcaaaacgaactccgaaaagtcgtgaataatcttatcgggctttacgggaagcccgaccgaattcgcattgaagtcggccgcgacgtcggaaagtcgaagcgggagcgcgaggaaattcagagcgggattcgccgcaacgaaaaacagcgaaagaaagcgactgaagacttaatcaagaatggcatcgctaatccgtctcgcgacgacgttgagaaatggattctttggaaggaaggacaggaacgctgcccatatactggcgaccaaattggcttcaatgcgctgtttcgcgaaggccggtatgaagttgaacatatatggccccgttcacgctccttcgataacagcccgcgcaacaaaacgctttgccgaaaggatgtgaacatcgagaaaggcaaccggatgcccttcgaggcattcggccacgatgaagaccgctggtccgctatccaaatacgcctgcaaggcatggtgtctgcgaagggtggaaccggcatgtcacccggcaaggtaaagcgatttcttgccaagactatgcccgaggattttgcagcccgccaattgaatgacactcgctatgcggcaaagcaaattcttgcgcagctcaaacgcttgtggcccgacatgggccccgaagcgcctgtcaaagtcgaggccgtcaccggccaagtgaccgcgcaacttcggaagttgtggacgctcaacaacatacttgcggacgacggggaaaagacacgagcggatcaccggcatcatgcaattgatgccttgacggttgcctgcactcatccgggcatgaccaacaagctttcacgctattggcagttgagagacgatccgcgcgcagaaaagccggcgcttacgcctccttgggacaccatccgcgcagatgcagagaaagccgtgagcgagatagtagtgtctcatcgcgtccggaagaaagtttccggcccgctccacaaggaaacgacatatggcgacacaggaaccgacataaaaaccaagagcggaacctatcgtcagtttgtcacgcgcaagaaaatcgaatctctatcgaaaggcgaacttgacgaaatacgcgatccgcgcatcaaggagattgttgcggcgcatgttgccgggcgcggcggcgatcccaaaaaggcgtttccgccatatccatgcgtatcgcccggcggaccggagattcgaaaggtgagactcacgtcaaagcaacagctgaacctcatggcccaaactggcaatggatatgccgaccttggctccaatcatcatatagcgatctatcgcttgccggacgggaaagctgattttgagattgtgagtttgttcgatgcctctcggcgactggcccaaagaaatcccatcgttcaaagaacgcgggctgatggggcgagctttgtcatgtctctggccgccggcgaagcaataatgattccggaaggaagcaaaaagggaatttggatcgttcagggtgtttgggccagcggccaagtagttttggagcgcgacactgatgctgaccattcaactaccaccagacccatgccaaacccgatactaaaggatgacgcaaagaaagtttcaattgacccaatcggtcgagttcggccatcgaacgactgagagttgcgatgatccgtaaaaccgtcgagttcgcaacgccggggacgcgcctttccgttgccaacaagcagctggtaatcgagcgacccgatcttccgaaggcaacgctgccgattgaggatctgggcgtcgtcattgtcgacgacttgagggcgacatatacgcaagcggtttttatcgaactgcttgaagccggtgcaactgtcatggtgacagggcgggaccacctgcccgccggaatgatgctcccgcttgatgcgcaccatatacaaacggagcggcaccgggcgcaggtggaagcgagcgaaccgacgaaaaagcgcgcttggcaggcattgatccgaagcaagattgcgcaacagggcatagttcttgctcatttcacaggcgagcatggcggccttcttccaatggcgcggcgcgtccgctccggcgatcccgacaatctggaggcgcaagccgcacaacgttattggccccgcctgttcggaaaagattttcggcgagaccgcgatctggaaggcgtcaatgccttgctgaattatggttatgcagttgtccgcgccgcgacggcacgcgcgactgttgcggccgggttaattccgtcacttggcgtattccatcgaaaccgcgcgaatccgttttgccttgccgacgatcttctggagccttaccggccctatgtggattggcgggtccgattgcttgccaatcaaatgggcgaagaggcgccaagcctcgatgatcgtgacacgcgggcggcgctgctttccattttcaatgagactgttcttgttgggggcaggcgaatgccgctcttgcttgcacttcacgcaagcgccgcttcgctgtgccgcgcgttgacgggaggtgaagcggcactggcattgcccgaaggcatgccgcttgcgcccgatcttctcgacaatgatggagagggatgatggcccattcgcgccctattcctcaattgccttgggggtggcgctcaatgtgggttatcgccatgttcgatcttccaaccgatacaccgaaggcccgcaaagcctatgcgcgcttccggaaggacttgctggaagacggcttcaccatgatgcagtattcggtctactcgcggcattgcgcttcaatcgagaatgcggaagttcatgtgaagcgaatgggtgctgttgtgcccgctcaaggtgaggtcagattcctgacgattaccgacaaccaattcggaaggatcaaggtctatgtcgggaaaaagcggcaaccaacaacacaatcaccctcccagcttcagcttttttgaagcatggaagggcgaaagcgtgtgccatttcaatggcttgccggaagggcagcaaatcgagagacggccgcaatccgcagcgcgaggtgctgacctaccgcaacggcgtcaagagtagcaaatcgagagacggccgcaatccgcagcattatgcggacatcattgcgagcgaggcgcagagtagcaaatcgagagacggccgcaatccgcagcagttgagattgcgtgtctcacccattgctacagagtagcaaatcgagagacggccgcaatccgcagcgcggcgtaatcggcttccgaaacctcgacgagagtagcaaatcgagagacggccgcaatccgcagcgcgcttcacgagcgcctctatagtcggcgtagagtagcaaatcgagagacggccgcaatccgcagcatggcggcaaggtggagcgcgacctgcaccagagtagcaaatcgagagacggccgcaatccgcagcagcgcatggcggcaggcgtggctcggggctagagtagcaaatcgagagacggccgcaatccgcagcgcgacacgctgctcgccatccgggcgtccgagagtagcaaatcgagagacggccgcaatccgcagcatgaggcgatgatcctcaaggatgcagagaagagtagcaaatcgagagacggccgcaatccgcagcgcgtctaggtggtcaatgtcgcaagtgaccagagtagcaaatcgagagacggccgcaatccgcagcggcaccagggcgatggcggcatggtggccgagagtagcaaatcgagagacggccgcaatccgcagccataaagagtgagcaggcaatgttgagtcgagagtagcaaatcgagagacggccgcaatccgcagcgtaccagccgctatgtctcgcttgagggacagagtagcaaatcgagagacggccgcaatccgcagcgcctgctccgatgcaatctccgcaaccagcagagtagcaaatcgagagacggccgcaatccgcagccttacaagtaattactgatccttcaggaagagagtagcaaatcgagagacggccgcaatccgcagcgtgtcgggttatccgacacaccgaggtaggagagtagcaaatcgagagacggccgcaatccgcagccctgcctcgccgagggtttcttcaagctcgagagtagcaaatcgagagacggccgcaatccgcagctgccgcatcagggcatgcgcgagtgtgcgcagagtagcaaatcgagagacggccgcaatccgcagcgcggttacgtccgccaacgtgcggagcgggagagtagcaaatcgagagacggccgcaatccgcagccgtcatccgtcgcaagcgttcaaacgctggagagtagcaaatcgagagacggccgcaatccgcagcgccgcgagtacaagagcgacactcacgctcaagagtagcaaatcgagagacggccgcaatccgcagcgagggctcgcggggatgcgcgaggtgacgcagagtagcaaatcgagagacggccgcaatccgcagccttgtcgcggaggggcagaccgtggcgctcagagtagcaaatcgagagacggccgcaatccgcagcgccgaagagattgaagcgatacggaagcggagagtagcaaatcgagagacggccgcaatccgcagcgagaaagccgaagccctctgcttgttcacgagagtagcaaatcgagagacggccgcaatccgcagcccctgtatcgcggtcaaagcctctagggcgagagtagcaaatcgagagacggccgcaatccgcagcccagtattccggcttcagaacatcctcaagagagtagcaaatcgagagacggccgcaatccgcagcggccgcgatatcggctatctgtcgcgcaccagagtagcaaatcgagagacggccgcaatccgcagcgacgacacgaaagcttccatcgccgcgcctagagtagcaaatcgagagacggccgcaatccgcagcggaacgccgttcgcttggtctgcgagccgcagagtagcaaatcgagagacggccgcaatccgcagccagggtgttgttctgtgcggagagggtgaaagagtagcaaatcgagagacggccgcaatccgcagcgccgcggcataggcggccacgtcctcgcggagagtagcaaatcgagagacggccgcaatccgcagcagtgccgccgatccatcgttttccgcgctaagagtagcaaatcgagagacggccgcaatccgcagccagagagccgtgataggagccgtgggcggaagagtagcaaatcgagagacggccgcaatccgcagcgagccggaatgcttctcggtattggccgcaagagtagcaaatcgagagacggccgcaatccgcagcagcggcggggctttccgcagacgaagctaaagagtagcaaatcgagagacggccgcaatccgcagccggtccacgattgggcctcgcattacggcgagagtagcaaatcgagagacggccgcaatccgcagcgggtgcgcgctcacatgccggtcgtgcaagagagtagcaaatcgagagacggccgcaatccgcagcatgaggcgaagttgctgctgcaggtgctgaagagtagcaaatcgagagacggccgcaatccgcagcggctttgtcgatctctccaaactcgatattagagtagcaaatcgagagacggccgcaatccgcagcgaggtggcttggggatcgtcaccgggcttcagagtagcaaatcgagagacggccgcaatccgcagcatgaggcgaagttgctgctgcaggtgctgaagagtagcaaatcgagagacggccgcaatccgcagcggctttgtcgatctctccaaactcgatattagagtagcaaatcgagagacggccgcaatccgcagcgaggtggcttggggatcgtcaccgggcttcagagtagcaaatcgagagacggccgcaatccgcagccccgatcaagagacagacgaacgctgggcgagagtagcaaatcgagagacggccgcaatccgcagcgggccgaacgtattcccgccgcctcttctgagagtagcaaatcgagagacggccgcaatccgcagcgtaatctcttttgagtgaacgtgtctgcctagagtagcaaatcgagagacggccgcaatccgcagccgaagctggcggggatgctgaactgcgccgagagtagcaaatcgagagacggccgcaatccgcagcgaaaacggctctaccgcctgatccgcccgcggacaggccagagagccgttccgcgctaatcgcgcgacatttgcaggcaaatagtccagtacgtatcctcaccttccccggtgcaccaacttccgccgattgccctccatagtacgtatagccgccggggtacggtacgccttggcatggcagaggaggaccgcgttccatccgtgccgggaataggccggtctcgaaatccatgccggaggcccatgcggacgtttgacgccgtctcccggagagccctcgcgcaggatgcgacacaggtcccccgcaccgcagtgaagtcaatcactcgccgcgccgccttcatgaccgatcacgtgaaacggttcaatcgagccgtcactgtctcaccagacgagtttagctcactttacgctatcgacaaccggtgcgcatgtgtcacgctgttctgaagcgtacctgcaaggcagaccgattgacgcccgtattccgcatatagccatacaatagtcctgccgttcgagcggcaggtcggcgctccgatcgtttagccgcgggggttagaacgcaaggaggagcgcatggctttcgtcggtgacatattccggcattctcccgagatcgcattgtttctcgcattggccctgggctactggattggaaaattccagttcggcaagttccagctcggcggcgtggccggaacgttgctggccgctgtggcgatcagccagttcggggtgcatatcgacgacggcatcaaggccgttctctttgctctattcatctatgccgtcggcttcgagagcggccctcagttcttccgttctctcggcagacactcgatccgcgagatcgtcatggcggcggttctggcgattagcggattggcaacggtgatcgtgctcgccaagctcttcgagctggacaagggcattgcggccggcatcgccgctggcggtctcacccagtcggcgatcatcggcactgccggcgcggcgatcgagaaacttggccttgccgcggacgaagcgcagcggctccaggccaacgtcgcgatcggctatgccgtgacctacattttcggttctttcggcgcgattatcatctgcgtcaacattcttccctggttcatgggacgaggtattcgcgacgatgccgtgaaagccgaagctgaaatgctgaagggcgcgcgcatttacggcgcgggggaagcgccggctttgcccgaacttttcggccgcgtctatcgcatccagaaggcgtcaggccaaaccgtatcggcaatcgagagcgccgccaccaacggccccatcaccatcgaacgcgtcaagcgcaagggaaagatcatcggcatcgaaccagatctcaagctggagacgggcgacttcgtccttgttgtcggccgccggtccggcatcgtcggcctggacgacaggctaggcccggaatcgccggggacggaaggcatggaactggtcatgacgacacgcgatatcgtaatcaccggcaagaatttcgtcggccggtccgtcgggcaaatcattgccgaaaacagcagcctgcgccacggcatctatgtgctggccgtgacgcgcggcgggacgaagctggacctgaagaacgacaccatgatccgggcgggcgacatcgttactatccatggcgtccaggaagacctgcaacggctggtgggcgaggtcggacccgccatcattcccagcgacaagacagatttcgtcttccacgggctcgggctggtcgctggactgttgatcggcctgctggtcctgcgcatcggctccacaccgcttacgctcggagccggtggcggcgcgcttctcgccggcctgatcttcggctggtaccgcagccggcatatgacaatgggcaacatgccgacggctgcgtccaccttgctgcgtgacctcggccttgccggcttcgtcggcgtggtcgggctgcagtcggggcagcaagcggtgcagacggtcatggaaagcgggctttcgatcttcctgatcggggtggtcgtcaccgtcctgccgctcctcatcacgatgatcgtaggccgttatgttctgcgttacgaaaacgtagcggtgttcgcaggcgcgctgtctggatcgcggagcgccaatccagcattcggcgaaatcctggacaaggccggcaactccgtccccaccgcgcccttcgccatcacctatgccctcgcaaatgttttcctgacgctgcttggcccgctggtcgtggcgttcgtctgacataaatggagtgggacatgaccgactacagccagttcgcgaaactcagccccttcgaactgaaggacgaactcatcaagctggcgtccggacagaagaaccggacgatgctcaatgccgggcgcggcaatcccaattttctcgccaggctgccgcgtcgcgccttctttcggctcggcctgttcgcgacggcggaatcggaactctctttttcctacatgcaacaggcggtgggcggtctgcctcgcatcgacggcatcgaggcgcgttttgagcgtttcacaagtgaaaaccgcgatcaggaaggcgtcgagttcctgcgccgcgccctgagctatgtgcgagaccagatggggctttcggcctccgatttcctgcatgagatggtcgaaggggtcctgggctgcaattacccgatgccgccgcgcatgctgcgcatgagcgaggaggtcgtccgccactacctgatgaaggagatggccggtggacgcgtttcagccaaggacgtcgatgtcttcgccgtcgaaggcggtacggcggcgatgacctatatcttcgactgcctgaagcagaaccggctcgtgacagcgggcgacaaggtagctatcggaatgccggtcttcacgccctacatcgaaataccggaactggacgtctacggcctgaaggaagtcgccatcaacgccgacccggatgccggctggcaatattccgatgccgagctggagaagttgaaggacccggcgatcaagattttcttttgcatcaatccgagcaatccaccctcggtgaagctcgacgggcgcagcatggaaaagatcggcaagatcgtgaagaaagaccggcccgatctgatgatcctgaccgacgacgtctacggcacattcgccgacgatttccagtcgctgttcgccgcgtgtccgcgcaacacgatcctggtctattcctactcgaagtatttcggcgcaacgggatggcgcctcggcgccgtggcgcttcatcgggacaacgttctcgataaagccctcgccaagctgccgaaaaatgccaaagcgacgctcgaccggcgctattcgtcgatcgtgaccgacgtctccgcattgaaattcatcgaccggctggtcgcggacagccgcacggtggcgctcaaccacacggccggcctgtccacaccgcagcaggtgcagatggcgctgttctcgctgttcgcgctgatggacgagaaggacagctacaaggcgacgctgaaggcgctcatccgcagaaggcaggccgcgctctatgccgaactcggcgtcgagatgccggacaacggaaattccgcggactactacactctgctcgacctggaaaagatttcgagcaagctctacggcaagaaattcgccgcatgggtgaaaaaggagttctcggccaatgagctcctgttcaggatcgccgaagagacgggcaccgtgctcctgccaggccgcggcttcggcatggaccaccctgccgggcgggcttcgcttgccaacctgaacgagtacgaatatgccgcaatcggccgttcgcttcgcaagatggctgacgagtactacgccgagtacatgaagaagaaccgccactagcggcggtttatccccgaatggaacccacggcgagacggccatcgtccggcgccagcctttgtcctattatgggatcctgttgtggggataaatatcggcctgcgcgccgaccgattttccgctggagccccggttgccgaaaattttctacctcatcgccggtttcgtcgcgctcggactgggcgggctcggcgtgcttctgccgctgctgccgacggtgcccttcatcattctcgcggcgttctgtttcgcgcgcagcaatgagcggctggagcggtggcttgtcgagcaccggacattcggcagccacatccgcgcgtggcgggagcggggcgcgatttcgcgcaagggcaagcaggcggcactcgccgccttcgcggtgagcatcgtcctcgcgcttctcctcgcgccgctgccctggtcgctcgcgccgatggcggcggcgctgatcggcggcagctggatctggacgcggcccgacgcatgaacggttgagcgcgccccgcgaaaagcctatcctcaaggcatgctgcgttttcccgctcacgcgtccaaccggctacccacccgatgaagccttggcagatcgtcctgacgatcaccgccgtgagtttcggcctcaccatgatcgaaattcccgcaggcacgtggctcagcaccgcggcgctcagcctcgcatgcggcgttgccgcgctctcgctcatggcggcggccgccatccttgccggccgctggggctggcccgagaccgcccttggcgggctggaccgcgtttacgccgctcacaaatggctcgccgtctacgcgctggcgctcgcctcggtgcattttctcttcaaggccggcgatccctcatgggcggccgaaagcatcatggcattgccgcagggctggacccgcctcgcgcggcaggcgagcttcgtcgcgctgatgagcatcgtcattctcgcgctcaaccggaacattccctacagcacatggcgctggtggcatcgcctgtcggggccgctcttcctgatcgtgatcgtccattggctgagcatcaaatcgcccctggatctcgtcagcccggccgggctgtggctggccggcctttccgcactcggcattgccgccgccgcctacaagctgctgctctatccgtttctcgcccgccacgccgactaccgcgttgtgaaggttctgcgcggaccctcggccgccgagatcgagttcgagccggtaaagcgcggcatcgattttcatgcgggccatttcgggttcctgcgcatgaaggtggacggcctgcgcgagccccatcccttcacgatcgccgccgctccggcaccggacggcaggatcaccttcgtgatccgcgcactcggtgattacacggcgaaactgatcgccgatgtcgagccgggcatggaggccgatgtctatgcgccttacgggcgcttcgaacgcaagcccgattgccgccgcgagatctggatcggcggcggcgtcggcatatcgccgttcattgcctggatgcgggatgagcagaaaggcggcttcgcaaacgtatcgctcttctacttcttcacgcccggc
